United States Patent Application Publication US 2018/0126003 A1 - sequence listing, part 47

SEQ ID NO: 80905 - DNA, 2820 bp, Artificial Sequence
  derived and/or modified sequence
gcggccgcggaggaggaggaaggggaggagggcgaggcgggaggtgcaggagggaccctcgccatgggtccacgggcctagagtggcggaagataccggcctggtgccaaactggctactgctgcttcctgtggcctccatggctgaggactggctggactgcccggccctgggccctggctggaagcgccgcgaagtctttcgcaagtcaggggccacctgtggacgctcagacacctattaccagagccccacaggagacaggatccgaagcaaagttgagctgactcgatacctgggccctgcgtgtgatctcaccctcttcgacttcaaacaaggcatcttgtgctatccagcccccaaggcccatcccgtggcggttgccagcaagaagcgaaagaagccttcaaggccagccaagactcggaaacgtcaggttggaccccagagtggtgaggtcaggaaggaggccccgagggatgagaccaaggctgacactgacacagccccagcttcattccctgctcctgggtgctgtgagaactgtggaatcagcttctcaggggatggcacccaaaggcagcggctcaaaacgttgtgcaaagactgtcgagcacagagaattgccttcaaccgggaacagagaatgtttaagagccgagggtgtggagtatgccggggctgtcagacccaagaggattgtggccattgccccatctgccttcgccctccccgccctggtctcaggcgccagtggaaatgtgtccagcgacgttgcctacggggtaaacatgcccgccgcaagggaggctgtgactccaagatggctgccaggcggcgccccggagcccagccactgcctccaccacccccatcacagtccccagagcccacagagccgcaccccagagccctggccccctcgccacctgccgagttcatctattactgtgtagacgaggacgagctacagccctacacgaaccgccggcagaaccgcaagtgcggggcctgtgcagcctgcctacggcggatggactgtggccgctgcgacttctgctgcgacaagcccaaattcgggggcagcaaccagaagcgccagaagtgtcgttggcgccaatgcctgcagtttgccatgaagcggctgctgcccagtgtctggtcagagtctgaggatggggcaggatcgcccccaccttaccgtcgtcgaaagaggcccagctctgcccgacggcaccatcttggccctaccttgaagcccaccttggctacacgcacagcccaaccagaccatacccaggctccaacgaagcaggaagcaggtggtggctttgtgctgcccccgcctggcactgaccttgtgtttttacgggaaggcgcaagcagtcctgtgcaggtgccgggccctgttgcagcttccacagaagccctgttgcaggaggcccagtgctctggcctgagttgggttgtggccttaccccaggtgaagcaagagaaggcggatacccaggacgagtggacaccaggcacagctgtcctgacttctcccgtattggtgcctggctgccctagcaaggcagtagacccaggcctgccttctgtgaagcaagagccacctgacccagaggaggacaaggaggagaacaaggatgattctgcctccaaattggccccagaggaagaggcaggaggggctggcacacccgtgatcacggagattttcagcctgggtggaacccgcttccgagatacagcagtctggttgccaaggtccaaagaccttaaaaaacctggagctagaaagcagtagactggaggcttctacagactgtaggattcaagtctgcagggcaggcactcgggaagggaagatggatgtaaagtgtgggagaccgaggacacagtggagcccacgagcacgagctggaacccacgaggatggcctggaacccatgtcagtctctcaccacctccagcttcgatgatgtgggtgtcctgcagaagaagctggtgcccttcctcacagagttaaatatgcatctggcccaggaattagagaagctgaaaggatgatcctggggaaggtggagcagctgcaggcctggctgcaggcctgactactgcccacaccaacgaggtgatctagcagatacatggcaacgtgtgaactgcaacaacgcctggtgccccagcaccaaccttccaagtgtaaaaacaatgtgctgctgcttcacttccgccctccggttatcaagcaaaatgtctcttgtggcccatcttactggaagagagttccgggaaacatagcctcaccaaggtgacacattacaaagccaccctaccatgaatccgctcccaagggtctcactgctcacctgaggataactcaatataactatgtggctgaaaatgcaaagctgaagaccatggatttcatggtgattccagcaagtacagagattctatgaagcccacccagaaaaaacttgctggtcctggctatttttgtgtcatttattcaagtattgagaacctggcctgtggtaggcactgtacttaatactaggatacagaaatgcaaaagatacggcccatgcaattttattaaatgcatcaatatgtattacaaatggtgaatggatttccaactttatcatggaatttaatgctgaatatatagaattcagaaaattgttgggaggacagcccttttgtgaaccttgtttggggcacagtaggaattggaaataatttagtttctatctctaagctgttctattttaaaattatttttaaatttttattgtcccacttacttac

SEQ ID NO: 80906 - DNA, 2913 bp, Artificial Sequence
  derived and/or modified sequence
gatgcaactggctctcggcaggggggcgcgcgcaccgctgcggagcgccggcccgtaggcgcgggagcctccctattaagggcacgcgacatcgaggcaatagtgcgcaggtgcttagccagaggcggagcccgagaggcaggcagcggacttccggttccgggagcaacgaacagccgcggaggcgacagctaccgcttcagaggaggcggccgcggaggaggaggaaggggaggagggcgaggcgggaggtgcaggagggaccctcgccatgggtccacgggcctagagtggcggaagataccggcctggtgccaaactggctactgctgcttcctgtggcctccatggctgaggactggctggactgcccggccctgggccctggctggaagcgccgcgaagtctttcgcaagtcaggggccacctgtggacgctcagacacctattaccagagccccacaggagacaggatccgaagcaaagttgagctgactcgatacctgggccctgcgtgtgatctcaccctcttcgacttcaaacaaggcatcttgtgctatccagcccccaaggcccatcccgtggcggttgccagcaagaagcgaaagaagccttcaaggccagccaagactcggaaacgtcaggttggaccccagagtggtgaggtcaggaaggaggccccgagggatgagaccaaggctgacactgacacagccccagcttcattccctgctcctgggtgctgtgagaactgtggaatcagcttctcaggggatggcacccaaaggcagcggctcaaaacgttgtgcaaagactgtcgagcacagagaattgccttcaaccgggaacagagaatgtttaagcgtgtgggctgtggggagtgtgcagcctgccaggtaacagaagactgtggggcctgctccacctgcctcctgcagctgccccatgatgtggcatcggggctgttctgcaagtgtgaacggagacgctgcctccggattgtggaaaggagccgagggtgtggagtatgccggggctgtcagacccaagaggattgtggccattgccccatctgccttcgccctccccgccctggtctcaggcgccagtggaaatgtgtccagcgacgttgcctacggggtaaacatgcccgccgcaagggaggctgtgactccaagatggctgccaggcggcgccccggagcccagccactgcctccaccacccccatcacagtccccagagcccacagagccgcaccccagagccctggccccctcgccacctgccgagttcatctattactgtgtagacgaggacgagctacagccctacacgaaccgccggcagaaccgcaagtgcggggcctgtgcagcctgcctacggcggatggactgtggccgctgcgacttctgctgcgacaagcccaaattcgggggcagcaaccagaagcgccagaagtgtcgttggcgccaatgcctgcagtttgccatgaagcggctgctgcccagtgtctggtcagagtctgaggatggggcaggatcgcccccaccttaccgtcgtcgaaagaggcccagctctgcccgacggcaccatcttggccctaccttgaagcccaccttggctacacgcacagcccaaccagaccatacccaggctccaacgaagcaggaagcaggtggtggctttgtgctgcccccgcctggcactgaccttgtgtttttacgggaaggcgcaagcagtcctgtgcaggtgccgggccctgttgcagcttccacagaagccctgttgcaggaggcccagtgctctggcctgagttgggttgtggccttaccccaggtgaagcaagagaaggcggatacccaggacgagtggacaccaggcacagctgtcctgacttctcccgtattggtgcctggctgccctagcaaggcagtagacccaggcctgccttctgtgaagcaagagccacctgacccagaggaggacaaggaggagaacaaggatgattctgcctccaaattggccccagaggaagaggcaggaggggctggcacacccgtgatcacggagattttcagcctgggtggaacccgcttccgagatacagcagtctggttgccaagtctgcagggcaggcactcgggaagggaagatggatgtaaagtgtgggagaccgaggacacagtggagcccacgagcacgagctggaacccacgaggatggcctggaacccatgtcagtctctcaccacctccagcttcgatgatgtgggtgtcctgcagaagaagctggtgcccttcctcacagagttaaatatgcatctggcccaggaattagagaagctgaaaggatgatcctggggaaggtggagcagctgcaggcctggctgcaggcctgactactgcccacaccaacgaggtgatctagcagatacatggcaacgtgtgaactgcaacaacgcctggtgccccagcaccaaccttccaagtgtaaaaacaatgtgctgctgcttcacttccgccctccggttatcaagcaaaatgtctcttgtggcccatcttactggaagagagttccgggaaacatagcctcaccaaggtgacacattacaaagccaccctaccatgaatccgctcccaagggtctcactgctcacctgaggataactcaatataactatgtggctgaaaatgcaaagctgaagaccatggatttcatggtgattccagcaagtacagagattctatgaagcccacccagaaaaaacttgctggtcctggctatttttgtgtcatttattcaagtattgagaacctggcctgtggtaggcactgtacttaatactaggatacagaaatgcaaaagatacggcccatgcaattttattaaatgcatcaatatgtattacaaa

SEQ ID NO: 80907 - DNA, 1968 bp, Artificial Sequence
  derived and/or modified sequence
atggccgaggactggctggactgccccgccctgggccccggctggaaacgtcgagaggtatttagaaagagtggggcaacctgtggacggtccgacacctactatcaatccccgacgggcgaccggatcaggtcaaaggtagagctgacccggtacctgggacctgcctgcgacctgacattgtttgacttcaaacaagggatcttgtgctaccctgcccctaaagctcaccctgtagcggtcgcctccaagaaacgcaaaaaaccctctcgaccggctaaaacacgtaagcggcaggtgggcccccagtcaggggaggtacgcaaggaggcaccacgcgacgaaactaaagcggacactgacactgcaccagcctcgttccccgcccccgggtgttgcgagaattgtggaatttcattttcaggcgacgggacccaacgacagaggctgaaaaccctgtgcaaggattgccgcgcccagcggattgcattcaatagggagcagcgaatgttcaaaagggtcggctgtggggagtgtgccgcgtgccaagttaccgaagactgcggcgcgtgttccacttgtctgttacaacttccacatgatgttgcgtccgggctgttttgcaagtgtgagcggagacgctgcctcaggattgtggaacggtctaggggttgcggcgtgtgcagggggtgtcagactcaggaagactgtgggcattgtcctatttgcctcagaccaccccgacccggcctacggaggcagtggaagtgtgttcagcgcaggtgcctccgcggaaaacatgcccggcggaaagggggttgtgatagtaaaatggccgcccgccggcggccaggcgcacagccgctgccaccacctcccccatcccaaagtcccgagccaactgaacctcatcctagggctctcgctcccagcccaccggcagaatttatttactactgcgtcgatgaggacgaactgcaaccctacactaacagacgccagaaccgcaagtgcggcgcttgtgcagcctgtcttcgccgcatggattgcggtcgctgtgatttttgttgtgataaacctaagtttggggggagcaatcaaaaacgccaaaaatgtcgctggaggcagtgtctccagtttgcaatgaaaagattattgccatccgtctggtcagaatctgaggatggagccggttcaccccctccctatcggcggcggaaacgtccctcctccgccagacgtcaccacctaggccctaccctgaagcccactctcgcaaccaggaccgcacaacctgaccacacacaggcacccaccaaacaagaagctggcggcggctttgtactcccaccacccggaaccgatctggtctttcttcgggaaggagcttcctcccctgttcaggtgccagggcccgtagcagcgtctaccgaggctttgctgcaggaggcacaatgttctggactgtcttgggtggtcgctttaccacaagtcaagcaggagaaagcagatactcaggatgagtggacgcctggcaccgcggttctgacttcccctgtactggtgcccggatgcccttccaaagcagtggaccctggactcccaagcgtgaaacaggaacctcccgaccctgaggaggacaaggaggaaaacaaagacgacagtgcctcaaagctggcacctgaggaagaggctggtggagcaggcacccctgtcatcaccgagatattttctctgggtggtactcgctttagagacaccgccgtctggcttccgagcttgcagggacgacattcaggcagagaagatgggtgtaaggtctgggagaccgaagacaccgtggagcctaccagtaccagctggaatccccgaggttggccgggtacccacgtgtcactgtcccctcccccagcatccatgatgtgggtgagctgccgtcgctcatggtgccctagcagccagtcatag

SEQ ID NO: 80908 - DNA, 1968 bp, Artificial Sequence
  derived and/or modified sequence
atggctgaggattggcttgactgcccagccctcggtccaggttggaagcggagagaggtttttcgcaagagcggcgctacatgtggcaggtccgacacctattaccaaagcccgacaggggaccgaattcgcagtaaagtagagttgacaagatacctgggacccgcttgtgatctcaccctgttcgacttcaagcaaggcatactgtgttaccctgcccctaaggcccatccagtggctgttgccagcaaaaagagaaagaagccgtcccgtcccgcaaagacacgaaaaaggcaagtagggcctcagtctggtgaagttcgcaaagaagcgccacgcgacgagactaaagcggatactgacactgcccctgcgtcgtttcctgcccctggttgctgcgaaaactgtggaatctcctttagtggcgacggaactcagcgccaacgtctgaagacgctctgtaaggattgccgagcccagcgtatcgcattcaaccgggaacagcgcatgttcaagcgagtagggtgtggcgagtgcgccgcttgtcaggtgactgaagactgcggcgcttgtagcacttgtctactccagttgccccacgacgtggccagcggactgttctgtaagtgtgaacgcaggcgatgcctcaggattgtagaaaggagtaggggttgcggtgtctgtagaggttgtcaaactcaagaagactgcggccattgcccaatctgtctcagaccccctagacccggtctaaggcgacagtggaaatgtgtgcagagacggtgcttgcgtggcaaacacgctcggcgaaagggtggatgcgatagcaagatggccgctcgcaggcggccaggggctcagccccttccccctcccccaccctcccagagcccagaaccaactgagccccatcctcgtgctttggccccatctcctcctgctgagtttatctattattgtgttgacgaagacgagctgcagccctacactaataggcggcagaaccgtaaatgtggagcatgcgccgcatgtctgcggcgtatggactgcggacgttgtgatttttgctgcgacaaaccgaaatttggtggcagcaaccaaaagcgccagaaatgccgctggcgacagtgcctgcaatttgcgatgaaacggctactgcccagcgtgtggtctgagagcgaagatggcgcagggagcccaccaccctaccgtagaagaaagaggccctcgtctgctagacgtcaccacctgggacccacactgaaaccaacccttgcgaccagaacggctcagcctgaccatacgcaggcaccaaccaagcaggaggcagggggagggttcgttctgccaccaccaggcacagacctggtattcctgagggagggagcatcatctccagtgcaagtacccggacctgtggctgccagcactgaggccctgctccaggaggcccagtgcagcggactgtcatgggtcgtagccctcccgcaggtgaagcaagagaaggccgacacccaggacgaatggacacccggtacagcggtactgacctcccccgttttggtgcctgggtgcccgtctaaagccgtggaccccggacttccttccgtaaaacaggaacctccagatcctgaggaagataaggaggagaacaaggacgatagcgcgtccaagttagccccagaggaggaggccggaggagccggaactccagtgattactgaaattttctccctaggcggaaccagattcagggacaccgctgtctggcttcccagcctgcagggacgccacagcggtagagaagatggatgtaaggtgtgggaaactgaggataccgtggagccaacttctacatcatggaacccacgcggatggccaggtactcatgtttctctgtcccccccacccgcatcaatgatgtgggtgtcctgccggcgatcatggtgtcctagctctcagtcatag

SEQ ID NO: 80909 - DNA, 1968 bp, Artificial Sequence
  derived and/or modified sequence
atggccgaggactggctggactgccccgccctgggccccggctggaagagaagagaggtgttcagaaagagcggcgccacctgcggcagaagcgacacctactaccagagccccaccggcgacagaatcagaagcaaggtggagctgaccagatacctgggccccgcctgcgacctgaccctgttcgacttcaagcagggcatcctgtgctaccccgcccccaaggcccaccccgtggccgtggccagcaagaagagaaagaagcccagcagacccgccaagaccagaaagagacaggtgggcccccagagcggcgaggtgagaaaggaggcccccagagacgagaccaaggccgacaccgacaccgcccccgccagcttccccgcccccggctgctgcgagaactgcggcatcagcttcagcggcgacggcacccagagacagagactgaagaccctgtgcaaggactgcagagcccagagaatcgccttcaacagagagcagagaatgttcaagagagtgggctgcggcgagtgcgccgcctgccaggtgaccgaggactgcggcgcctgcagcacctgcctgctgcagctgccccacgacgtggccagcggcctgttctgcaagtgcgagagaagaagatgcctgagaatcgtggagagaagcagaggctgcggcgtgtgcagaggctgccagacccaggaggactgcggccactgccccatctgcctgagaccccccagacccggcctgagaagacagtggaagtgcgtgcagagaagatgcctgagaggcaagcacgccagaagaaagggcggctgcgacagcaagatggccgccagaagaagacccggcgcccagcccctgcccccccccccccccagccagagccccgagcccaccgagccccaccccagagccctggcccccagcccccccgccgagttcatctactactgcgtggacgaggacgagctgcagccctacaccaacagaagacagaacagaaagtgcggcgcctgcgccgcctgcctgagaagaatggactgcggcagatgcgacttctgctgcgacaagcccaagttcggcggcagcaaccagaagagacagaagtgcagatggagacagtgcctgcagttcgccatgaagagactgctgcccagcgtgtggagcgagagcgaggacggcgccggcagcccccccccctacagaagaagaaagagacccagcagcgccagaagacaccacctgggccccaccctgaagcccaccctggccaccagaaccgcccagcccgaccacacccaggcccccaccaagcaggaggccggcggcggcttcgtgctgcccccccccggcaccgacctggtgttcctgagagagggcgccagcagccccgtgcaggtgcccggccccgtggccgccagcaccgaggccctgctgcaggaggcccagtgcagcggcctgagctgggtggtggccctgccccaggtgaagcaggagaaggccgacacccaggacgagtggacccccggcaccgccgtgctgaccagccccgtgctggtgcccggctgccccagcaaggccgtggaccccggcctgcccagcgtgaagcaggagccccccgaccccgaggaggacaaggaggagaacaaggacgacagcgccagcaagctggcccccgaggaggaggccggcggcgccggcacccccgtgatcaccgagatcttcagcctgggcggcaccagattcagagacaccgccgtgtggctgcccagcctgcagggcagacacagcggcagagaggacggctgcaaggtgtgggagaccgaggacaccgtggagcccaccagcaccagctggaaccccagaggctggcccggcacccacgtgagcctgagccccccccccgccagcatgatgtgggtgagctgcagaagaagctggtgccccagcagccagagctag

SEQ ID NO: 80910 - protein, 567 aa, Artificial Sequence
  derived and/or modified sequence
MAEDWLDCPALGPGWKRREVFRKSGATCGRSDTYYQSPTGDRIRSKVELTRYLGPACDLTLFDFKQGILCYPAPKAHPVAVASKKRKKPSRPAKTRKRQVGPQSGEVRKEAPRDETKADTDTAPASFPAPGCCENCGISFSGDGTQRQRLKTLCKDCRAQRIAFNREQRMFKSRGCGVCRGCQTQEDCGHCPICLRPPRPGLRRQWKCVQRRCLRGKHARRKGGCDSKMAARRRPGAQPLPPPPPSQSPEPTEPHPRALAPSPPAEFIYYCVDEDELPYTNRRQNRKCGACAACLRRMDCGRCDFCCDKPKFGGSNQKRQKCRWRQCLQFAMKRLLPSVWSESEDGAGSPPPYRRRKRPSSARRHHLGPTLKPTLATRTAQPDHTQAPTKQEAGGGFVLPPPGTDLVFLREGASSPVQVPGPVAASTEALLQEAQCSGLSWVVALPQVKQEKADTQDEWTPGTAVLTSPVLVPGCPSKAVDPGLPSVKQEPPDPEEDKEENKDDSASKLAPEEEAGGAGTPVITEIFSLGGTRFRDTAVWLPRYYHLALDWKCNCGYHLCCRSVLVP

SEQ ID NO: 80911 - DNA, 1704 bp, Artificial Sequence
  derived and/or modified sequence
atggctgaggattggctggattgccctgcattaggtccagggtggaagcgaagggaggttttccgcaagagcggcgctacgtgtggcaggagtgacacttattaccagtcacccactggagatagaatcagatcaaaggtggaactcacgaggtacctgggtccagcgtgtgacctgaccctcttcgactttaaacaaggcatactctgttatcctgcacccaaagcccatcccgtggctgtggctagtaaaaagaggaaaaagccctctagaccggccaagactagaaagaggcaagtgggtccccagtccggcgaggttaggaaggaagcgcctagagacgagactaaagctgacaccgataccgcccccgcctcctttcctgctccgggctgttgtgaaaactgtggtataagcttttccggcgatggaacgcagagacagcgcctaaagacactttgtaaagattgccgcgcgcaacgcatagcattcaatcgagagcagcggatgttcaagtcacgcggctgtggggtatgccgaggatgtcagacccaagaggattgcggccattgtcctatctgcctgcgacctcctcgccccggactgagacgacagtggaagtgtgtgcagcgccgatgtctccgtggcaagcatgcgcgccggaagggcggctgcgattctaaaatggccgcccgaagacgtccaggcgctcagccactgcccccaccaccaccgtcacagtcccctgagcccaccgagccgcatccgcgcgctctcgcccctagcccccccgccgagtttatttattattgtgttgatgaggacgaactaccttatacaaaccgccggcaaaatagaaaatgcggagcatgtgccgcttgcctcagaaggatggattgtggccggtgcgacttttgctgtgacaagcccaaattcggaggctcaaaccagaagcgacaaaaatgccggtggaggcagtgcctccaattcgctatgaagcggctgctgccctccgtctggagtgagtccgaagatggggccggttcaccacccccttataggagaagaaaacggccgagctctgccaggagacatcacctcggccctactctgaagcccactctggctactcgcaccgcccagcctgatcacacccaggctcctacaaagcaggaggcggggggtgggttcgttctgccaccacctggcacggatctagtcttcctcagagaaggtgccagcagccctgtgcaagtaccgggccccgtggccgcctccacggaggccctgctgcaggaggcgcagtgcagcggcctttcctgggtcgtggctctcccccaggtaaagcaagagaaggccgacacgcaagatgagtggacccctggaaccgccgtgctcaccagtcccgttttggtgcccggctgtccttcaaaggccgtagatccaggcctgccatccgtgaagcaagaacctcctgaccctgaggaggataaggaggaaaacaaggatgatagcgcttccaaattggcgccagaagaagaggccggtggggcgggtacacccgtcatcaccgagatcttctccttgggagggacacgcttcagggacacggccgtttggttacctcgctactaccacctggccctggattggaagtgcaactgcggctatcatctgtgctgcaggagcgtcctcgtgccatag

SEQ ID NO: 80912 - DNA, 1704 bp, Artificial Sequence
  derived and/or modified sequence
atggccgaggactggctggactgcccagccctgggccctggctggaagagaagagaggtgttcaggaagagcggggccacctgtggccgcagtgacacctactaccagagccccactggagaccgcatccgcagcaaggtggagctgacccgctacctgggccctgcctgtgacctgaccctgtttgacttcaagcagggcatcctgtgctacccagcccccaaggcccaccctgtggccgtggccagcaagaagaggaagaagcccagcaggcctgccaagaccaggaagaggcaggtgggcccccagagcggggaggtgaggaaggaggcccccagagatgagaccaaggctgacacagacacagccccagccagcttccctgcccctggctgctgtgagaactgtggcatctccttctctggagatggcacccagaggcagaggctgaagaccctgtgcaaggactgccgggcccagagaattgccttcaaccgggagcagaggatgttcaagagccggggctgcggcgtgtgccggggctgccagacccaggaggactgtggccactgccccatctgcctgcggcccccccggcccggcctgcggcggcagtggaagtgtgtgcagaggcgctgcctgcggggcaagcacgcccggaggaagggcggctgtgacagcaagatggccgccaggagaagacctggggcccagcccctgcccccacctccacccagccagagccctgagcccacagagccccacccccgggccctggcccccagccccccagctgagttcatctactactgtgtggatgaagatgagctgccctacaccaacagacggcagaacagaaaatgtggggcctgtgccgcctgcctgcggaggatggactgtggccgctgtgacttctgctgtgacaagcccaagtttggaggcagcaaccagaagaggcagaagtgccgctggaggcagtgcctgcagtttgccatgaagaggctgctgcccagcgtgtggagcgagagtgaagatggagctggcagccccccaccctacagaagaaggaagaggcccagcagcgcccggcggcaccacctgggccccaccctgaagcccaccctggccaccaggacagcccagcctgaccacacccaggcccccaccaagcaggaggccggcggcggctttgtgctgcccccacctggaacagacctggtgttcctgcgggagggcgccagcagccctgtgcaggtgcccggccctgtggccgccagcacagaggccctgctgcaggaggcccagtgcagcggcctgtcctgggtggtggccctgccccaggtgaagcaggagaaggctgacacccaggatgagtggaccccaggcacagctgtgctgaccagccctgtgctggtgcccggctgccccagcaaggctgtggaccccggcctgcccagcgtgaagcaggagcccccagaccctgaggaggacaaggaggagaacaaggatgattctgccagcaagctggcccctgaggaggaggccggcggggccggcacccctgtgatcacagagatcttcagcctgggcggcacccgcttccgggacacagctgtgtggctgccccgctactaccacctggccctggactggaagtgcaactgtggctaccacctgtgctgccgctctgtgctggtgccctag

SEQ ID NO: 80913 - DNA, 2532 bp, Artificial Sequence
  derived and/or modified sequence
ggaaggggaggagggcgaggcgggaggtgcaggagggaccctcgccatgggtccacgggcctagagtggcggaagataccggcctggtgccaaactggctactgctgcttcctgtggcctccatggctgaggactggctggactgcccggccctgggccctggctggaagcgccgcgaagtctttcgcaagtcaggggccacctgtggacgctcagacacctattaccagagccccacaggagacaggatccgaagcaaagttgagctgactcgatacctgggccctgcgtgtgatctcaccctcttcgacttcaaacaaggcatcttgtgctatccagcccccaaggcccatcccgtggcggttgccagcaagaagcgaaagaagccttcaaggccagccaagactcggaaacgtcaggttggaccccagagtggtgaggtcaggaaggaggccccgagggatgagaccaaggctgacactgacacagccccagcttcattccctgctcctgggtgctgtgagaactgtggaatcagcttctcaggggatggcacccaaaggcagcggctcaaaacgttgtgcaaagactgtcgagcacagagaattgccttcaaccgggaacagagaatgtttaagagccgagggtgtggagtatgccggggctgtcagacccaagaggattgtggccattgccccatctgccttcgccctccccgccctggtctcaggcgccagtggaaatgtgtccagcgacgttgcctacggggtaaacatgcccgccgcaagggaggctgtgactccaagatggctgccaggcggcgccccggagcccagccactgcctccaccacccccatcacagtccccagagcccacagagccgcaccccagagccctggccccctcgccacctgccgagttcatctattactgtgtagacgaggacgagctaccctacacgaaccgccggcagaaccgcaagtgcggggcctgtgcagcctgcctacggcggatggactgtggccgctgcgacttctgctgcgacaagcccaaattcgggggcagcaaccagaagcgccagaagtgtcgttggcgccaatgcctgcagtttgccatgaagcggctgctgcccagtgtctggtcagagtctgaggatggggcaggatcgcccccaccttaccgtcgtcgaaagaggcccagctctgcccgacggcaccatcttggccctaccttgaagcccaccttggctacacgcacagcccaaccagaccatacccaggctccaacgaagcaggaagcaggtggtggctttgtgctgcccccgcctggcactgaccttgtgtttttacgggaaggcgcaagcagtcctgtgcaggtgccgggccctgttgcagcttccacagaagccctgttgcaggaggcccagtgctctggcctgagttgggttgtggccttaccccaggtgaagcaagagaaggcggatacccaggacgagtggacaccaggcacagctgtcctgacttctcccgtattggtgcctggctgccctagcaaggcagtagacccaggcctgccttctgtgaagcaagagccacctgacccagaggaggacaaggaggagaacaaggatgattctgcctccaaattggccccagaggaagaggcaggaggggctggcacacccgtgatcacggagattttcagcctgggtggaacccgcttccgagatacagcagtctggttgccaaggtattaccaccttgctcttgactggaaatgcaactgtggttaccacctgtgctgcaggtccgtcctggttccctgatttgtgtttcctgttctgcctggatcctgattctcagaaaccagttactggacttctgatccacatcctgaccctggtccactgtgaccctcagactcttaattatgctccaccaggtcgtgccactgccccactagtccatttgatctgcccccatcctaggatatcctgagtctaagccctggtttctgccaatggcaaataggaagattttattaacaggttttaaaaaattattattattactggttatttggtttgacaaggcacttaggctccctgagctttgccttagctggaaaataaggatagtattacttgctattctatcaaccctgtaagatatttgcggccacgcgcggtagcgcaccctgtaattccaacactttgggaggccggcgggaggggcagtggggaggatcgcttgaacccaggagcaggagttccagcctgagcaacatagcgggaccccctgtctcttcaaaatttgtttttaaattagcagggcgtggtggcgcaggctttgtagtcccagatactctggaggctgaggcccaggaggacgaggctgcagggagccatgatcacgccactgcactccaccctgggcgacagagcgagaccttgtctcagaaaaaatctgtgaggttaaaaggctgtgtgtgtgaaaatatcttggaaattgtaaagaactacacaaatataa

SEQ ID NO: 80914 - DNA, 1704 bp, Artificial Sequence
  derived and/or modified sequence
atggccgaggactggctggactgccccgccctgggccccggctggaagcgcagagaggtgtttagaaagtctggagccacttgcggtagaagtgacacgtactatcagtcccctactggagaccgcatccgcagcaaggttgaattgacacgctacctggggcctgcatgcgacctgactttgtttgattttaaacaagggatcctgtgttatcctgcaccaaaagcccaccccgtcgctgtggctagcaagaaacgaaaaaaaccttcacggcctgcaaagacgcgtaagagacaagtggggcctcagtccggggaagtgcggaaggaggcaccgagggacgagaccaaagccgacaccgacacagcccccgcttcatttcctgcacccgggtgctgcgaaaactgtggtatttcattctccggcgatgggacacagagacagcggctaaaaaccctctgtaaggactgccgtgctcaacgaatcgcctttaaccgggaacagaggatgtttaagtctcgaggatgcggcgtatgccgtggatgccagactcaggaggactgcggacattgtcccatatgcttgcgtcctccccgtcccggtcttcgccggcagtggaaatgtgttcaaaggagatgcttgcggggcaaacacgcacgccgcaagggagggtgtgattctaaaatggctgcacgcagacgccccggggctcagccactgccccctccgcctcccagtcagagccctgagcctacagagccacatcctcgggcccttgccccatctccacctgcagagttcatctattactgcgtcgacgaggatgagctgccctacaccaacaggcggcagaaccggaaatgcggcgcttgcgccgcgtgtctgagacggatggattgcggccgctgcgacttttgctgtgacaagccgaaattcggaggttccaaccagaaacgtcagaaatgcagatggcgccaatgtctgcagtttgccatgaagcgtctactccccagtgtctggtccgaaagtgaggatggtgccgggtcgccgcccccctaccgacggagaaagcggccgtcttccgcaagacgacatcacctcggccccacactgaagccgaccctggccactcgaaccgcccagccagatcatactcaggcgcccaccaagcaggaggctggcggcggcttcgtcctgccccctcctggtactgacttggtctttctgagagaaggtgcttcatctcccgttcaggttccaggaccagtagctgcctcaaccgaagcattactgcaggaggctcagtgctctggcctgtcgtgggttgtggcactgccacaggtcaagcaagagaaggccgacactcaggacgaatggacacccgggactgctgtcctcacctcgcctgtgttggtccctgggtgtccctcaaaggccgtcgacccaggattaccctcggtgaaacaggaaccgccagaccccgaagaggacaaggaggaaaataaggatgatagcgccagtaagctggctcctgaggaagaagcaggaggcgccggcactccagtgattaccgagatcttcagccttggcggcacacggtttagggacaccgcagtctggttgccgagatactatcacctggccctggactggaagtgcaattgtgggtaccacttatgttgtagatcagtgctggtgccatag

SEQ ID NO: 80915 - DNA, 1704 bp, Artificial Sequence
  derived and/or modified sequence
atggccgaggattggctagactgccctgcccttggccctggatggaaaagaagggaggtgtttcggaagagcggcgcaacatgcggaaggtctgacacttattatcagagtccgactggcgaccgaattcgatctaaggtggaactgacacgctacctcgggcctgcttgtgaccttacacttttcgacttcaaacaaggcattctctgctatcctgcacctaaggctcaccccgttgcagtagcgagcaagaagcgcaagaaaccatcgcgcccagccaagacaagaaaacgccaagttgggcctcagtcaggcgaggtgagaaaagaagcccctagagacgagactaaggcggacaccgacaccgcgcctgcatcattccccgcaccgggttgctgtgagaactgtggcatctctttctctggagacgggacacagcgccagcggctcaagacactgtgtaaagattgccgggcacagagaattgccttcaacagagagcagaggatgttcaagtcaaggggctgtggtgtgtgtagggggtgccaaacacaggaggattgcggtcattgccctatctgtctgagacctccgcgacctggccttcggcgacagtggaagtgcgtgcagcgtaggtgcctccggggaaagcatgctcgaaggaagggaggatgcgatagtaaaatggcggcacgacgacggcctggggctcagccactcccccctccgccaccaagccagtcacctgagccaaccgaaccacacccacgcgcactcgctccgagcccaccagccgaatttatctactactgcgttgacgaggatgagctaccttatacaaatcggcgtcagaataggaagtgcggtgcttgcgctgcttgtctgagacggatggactgtggacgctgcgatttttgttgcgataagcccaagttcgggggttctaaccagaaacgccagaagtgtagatggagacagtgtctccagttcgcaatgaaacgactgttacctagcgtctggtccgaatctgaagatggcgctggctcgcccccaccttacaggaggcgaaagaggccctctagcgcaaggcggcaccacctcgggccaactctcaaaccaacactcgctacccggacagcccaacccgatcatactcaggctccgacgaagcaggaggctggtgggggattcgtacttccccctccgggtacggatcttgtctttctgcgggagggggctagctcacctgtccaagtacccggtccggttgctgcttccacggaggcactgttgcaggaagctcagtgcagtggattgagctgggtggtggctttacctcaggttaaacaggaaaaggctgatactcaggatgaatggacccctggtaccgccgtgctgacatcgcccgtgctggtgccgggttgcccgtcaaaggccgtggatcccggtctacccagcgtgaagcaagaacccccagatccggaagaggacaaagaagagaacaaggacgacagtgcctcgaaactggctccagaagaggaagcgggaggagcaggaactccggtgattaccgagattttctctctgggtggaacacgctttcgtgacacggctgtgtggcttccgcgttattaccatttagccctagactggaagtgcaattgtggctatcatctctgctgtagatccgttcttgttccttag

SEQ ID NO: 80916 - DNA, 1704 bp, Artificial Sequence
  derived and/or modified sequence
atggccgaggactggctggactgccccgccctgggccccggctggaagagaagagaggtgttcagaaagagcggcgccacctgcggcagaagcgacacctactaccagagccccaccggcgacagaatcagaagcaaggtggagctgaccagatacctgggccccgcctgcgacctgaccctgttcgacttcaagcagggcatcctgtgctaccccgcccccaaggcccaccccgtggccgtggccagcaagaagagaaagaagcccagcagacccgccaagaccagaaagagacaggtgggcccccagagcggcgaggtgagaaaggaggcccccagagacgagaccaaggccgacaccgacaccgcccccgccagcttccccgcccccggctgctgcgagaactgcggcatcagcttcagcggcgacggcacccagagacagagactgaagaccctgtgcaaggactgcagagcccagagaatcgccttcaacagagagcagagaatgttcaagagcagaggctgcggcgtgtgcagaggctgccagacccaggaggactgcggccactgccccatctgcctgagaccccccagacccggcctgagaagacagtggaagtgcgtgcagagaagatgcctgagaggcaagcacgccagaagaaagggcggctgcgacagcaagatggccgccagaagaagacccggcgcccagcccctgcccccccccccccccagccagagccccgagcccaccgagccccaccccagagccctggcccccagcccccccgccgagttcatctactactgcgtggacgaggacgagctgccctacaccaacagaagacagaacagaaagtgcggcgcctgcgccgcctgcctgagaagaatggactgcggcagatgcgacttctgctgcgacaagcccaagttcggcggcagcaaccagaagagacagaagtgcagatggagacagtgcctgcagttcgccatgaagagactgctgcccagcgtgtggagcgagagcgaggacggcgccggcagcccccccccctacagaagaagaaagagacccagcagcgccagaagacaccacctgggccccaccctgaagcccaccctggccaccagaaccgcccagcccgaccacacccaggcccccaccaagcaggaggccggcggcggcttcgtgctgcccccccccggcaccgacctggtgttcctgagagagggcgccagcagccccgtgcaggtgcccggccccgtggccgccagcaccgaggccctgctgcaggaggcccagtgcagcggcctgagctgggtggtggccctgccccaggtgaagcaggagaaggccgacacccaggacgagtggacccccggcaccgccgtgctgaccagccccgtgctggtgcccggctgccccagcaaggccgtggaccccggcctgcccagcgtgaagcaggagccccccgaccccgaggaggacaaggaggagaacaaggacgacagcgccagcaagctggcccccgaggaggaggccggcggcgccggcacccccgtgatcaccgagatcttcagcctgggcggcaccagattcagagacaccgccgtgtggctgcccagatactaccacctggccctggactggaagtgcaactgcggctaccacctgtgctgcagaagcgtgctggtgccctag

SEQ ID NO: 80917 - protein, 550 aa, Artificial Sequence
  derived and/or modified sequence
MAEDWLDCPALGPGWKRREVFRKSGATCGRSDTYYQSPTGDRIRSKVELTRYLGPACDLTLFDFKQGILCYPAPKAHPVAVASKKRKKPSRPAKTRKRQVGPQSGEVRKEAPRDETKADTDTAPASFPAPGCCENCGISFSGDGTQRQRLKTLCKDCRAQRIAFNREQRMFKRVGCGECAACQVTEDCGACSTCLLQLPHDVASGLFCKCERRRCLRIVERSRGCGVCRGCQTQEDCGHCPICLRPPRPGLRRQWKCVQRRCLRGKHARRKGGCDSKMAARRRPGAQPLPPPPPSQSPEPTEPHPRALAPSPPAEFIYYCVDEDELQPYTNRRQNRKCGACAACLRRMDCGRCDFCCDKPKFGGSNQKRQKCRWRQCLQFAMKRLLPSVWSESEDGAGSPPPYRRRKRPSSARRHHLGPTLKPTLATRTAQPDHTQAPTKQEAGGGFVLPPPGTDLVFLREGASSPVQVPGPVAASTEALLQAVDPGLPSVKQEPPDPEEDKEENKDDSASKLAPEEEAGGAGTPVEPTTQPQYSGNFDNDLYEIYLIDI

SEQ ID NO: 80918 - DNA, 1653 bp, Artificial Sequence
  derived and/or modified sequence
atggctgaggattggcttgactgccccgcactgggtcccggttggaaacggcgcgaagtctttcggaaatccggagccacatgtggtagatccgatacctactaccaaagcccgacgggagatcgtataagaagcaaggtagagctgacacggtatctcggacctgcctgcgatttaaccttgttcgacttcaaacaggggatcctctgttatccagctcccaaggctcaccccgtcgccgtcgcaagcaaaaagaggaagaagccctcacgcccggctaagacccgtaaacgccaggtgggaccacagagcggggaagtgcgaaaagaagcaccgcgagacgaaaccaaagccgacaccgacaccgcaccggcctcttttcctgctcccgggtgctgcgaaaattgtggaatcagctttagcggcgatggtacccagagacagcgcttgaaaaccctgtgcaaagactgtcgcgcccagagaattgcctttaatagggagcagagaatgttcaagagagtcgggtgtggtgagtgcgctgcttgtcaggtgacagaggactgtggggcctgctctacttgtctgctccagctccctcatgatgtggctagcggacttttctgtaagtgcgagaggcgacggtgtttgagaattgtagagcgctccagaggatgtggagtctgcaggggctgtcagacccaggaggactgcggtcattgccctatctgtttgagaccaccacgccctgggttgcggaggcaatggaagtgcgtccagcgacggtgtctgcgcggaaaacacgctcgtcggaaaggaggttgcgactcaaaaatggctgctcgcaggaggccgggcgcgcagcccttgccacctccacccccctcacagtcaccggagcccacagaaccccatccccgagccctcgctccaagtccgcctgccgaattcatttattactgtgtcgacgaggacgagctgcagccctataccaacaggcggcagaatcgcaagtgcggcgcctgtgctgcctgtctgcgtcgcatggactgtggccggtgcgatttttgttgtgataagcctaaattcggtggtagtaatcagaaacgacagaaatgtaggtggaggcaatgtctacagttcgccatgaagagattgctgccttctgtatggagcgagtctgaggacggggccgggtccccacccccatatagacgacgcaaacgcccctctagtgcacgacgccaccacctggggcccacgttaaagcctactttagctactcggacagcacagccagaccacactcaggccccaacgaaacaggaggccggcgggggttttgttctcccgccccctggtactgacctggtctttctgcgcgagggtgccagcagtcctgtgcaagtacctggacccgtggctgcatccaccgaggctctactgcaggcggtggaccccggacttccgtcagtcaaacaggaaccacctgaccccgaggaggacaaggaagagaataaggatgattccgcttcgaagttagcgccggaagaggaggcaggcggcgccgggactcctgtggaacctacgactcaaccgcaatacagcggaaatttcgataatgacctgtatgaaatatacctgatcgacatctag

SEQ ID NO: 80919 - DNA, 1653 bp, Artificial Sequence
  derived and/or modified sequence
atggccgaggactggctggactgcccagccctgggccctggctggaagagaagagaggtgttcaggaagagcggggccacctgtggccgcagtgacacctactaccagagccccactggagaccgcatccgcagcaaggtggagctgacccgctacctgggccctgcctgtgacctgaccctgtttgacttcaagcagggcatcctgtgctacccagcccccaaggcccaccctgtggccgtggccagcaagaagaggaagaagcccagcaggcctgccaagaccaggaagaggcaggtgggcccccagagcggggaggtgaggaaggaggcccccagagatgagaccaaggctgacacagacacagccccagccagcttccctgcccctggctgctgtgagaactgtggcatctccttctctggagatggcacccagaggcagaggctgaagaccctgtgcaaggactgccgggcccagagaattgccttcaaccgggagcagaggatgttcaagagggtgggctgtggggagtgtgccgcctgccaggtgacagaggactgtggggcctgcagcacctgcctgctgcagctgccccatgatgtggccagcggcctcttctgcaagtgtgagcggcggcgctgcctgcgcatcgtggagaggagccggggctgcggcgtgtgccggggctgccagacccaggaggactgtggccactgccccatctgcctgcggccccccaggcctggcctgcggcggcagtggaagtgtgtgcagaggcgctgcctgcggggcaagcacgcccggaggaaaggaggctgtgacagcaagatggccgcccggcggcggcctggggcccagcccctgcccccacctccacccagccagagccctgagcccacagagccccacccccgggccctggcccccagccccccagctgagttcatctactactgtgtggatgaagatgagctgcagccctacaccaacagacggcagaacagaaaatgtggggcctgtgccgcctgcctgcggaggatggactgtggccgctgtgacttctgctgtgacaagcccaagtttggaggcagcaaccagaagaggcagaagtgccgctggaggcagtgcctgcagtttgccatgaagaggctgctgcccagcgtgtggagcgagagtgaagatggagctggcagccccccaccctacagaagaaggaagaggcccagcagcgcccggcggcaccacctgggccccaccctgaagcccaccctggccaccaggacagcccagcctgaccacacccaggcccccaccaagcaggaggccggcggcggctttgtgctgcccccacctggaacagacctggtgttcctgcgggagggcgccagcagccctgtgcaggtgcccggccctgtggccgccagcacagaggccctgctgcaggccgtggaccccggcctgcccagcgtgaagcaggagcccccagaccctgaggaggacaaggaggagaacaaggatgattctgccagcaagctggcccctgaggaggaggccggcggggccggcacccctgtggagcccaccacccagccccagtacagcggcaactttgacaatgacctgtatgagatctacctgattgacatctag

SEQ ID NO: 80920 - DNA, 2090 bp, Artificial Sequence
  derived and/or modified sequence
aaagcgcatgcgccagctagatgggcagcgaggagagccgcaactgccagtccctcgaaggggttagctgtcgttgaacgtcagcacgcagatgcaactggctctcggcaggggggcgcgcgcaccgctgcggagcgccggcccgtaggcgcgggagcctccctattaagggcacgcgacatcgaggcaatagtgcgcaggtgcttagccagaggcggagcccgagaggcaggcagcggacttccggttccgggagcaacgaacagccgcggaggcgacagctaccgcttcagaggaggcggccgcggaggaggaggaaggggaggagggcgaggcgggaggtgcaggagggaccctcgccatgggtccacgggcctagagtggcggaagataccggcctggtgccaaactggctactgctgcttcctgtggcctccatggctgaggactggctggactgcccggccctgggccctggctggaagcgccgcgaagtctttcgcaagtcaggggccacctgtggacgctcagacacctattaccagagccccacaggagacaggatccgaagcaaagttgagctgactcgatacctgggccctgcgtgtgatctcaccctcttcgacttcaaacaaggcatcttgtgctatccagcccccaaggcccatcccgtggcggttgccagcaagaagcgaaagaagccttcaaggccagccaagactcggaaacgtcaggttggaccccagagtggtgaggtcaggaaggaggccccgagggatgagaccaaggctgacactgacacagccccagcttcattccctgctcctgggtgctgtgagaactgtggaatcagcttctcaggggatggcacccaaaggcagcggctcaaaacgttgtgcaaagactgtcgagcacagagaattgccttcaaccgggaacagagaatgtttaagcgtgtgggctgtggggagtgtgcagcctgccaggtaacagaagactgtggggcctgctccacctgcctcctgcagctgccccatgatgtggcatcggggctgttctgcaagtgtgaacggagacgctgcctccggattgtggaaaggagccgagggtgtggagtatgccggggctgtcagacccaagaggattgtggccattgccccatctgccttcgccctccccgccctggtctcaggcgccagtggaaatgtgtccagcgacgttgcctacggggtaaacatgcccgccgcaagggaggctgtgactccaagatggctgccaggcggcgccccggagcccagccactgcctccaccacccccatcacagtccccagagcccacagagccgcaccccagagccctggccccctcgccacctgccgagttcatctattactgtgtagacgaggacgagctacagccctacacgaaccgccggcagaaccgcaagtgcggggcctgtgcagcctgcctacggcggatggactgtggccgctgcgacttctgctgcgacaagcccaaattcgggggcagcaaccagaagcgccagaagtgtcgttggcgccaatgcctgcagtttgccatgaagcggctgctgcccagtgtctggtcagagtctgaggatggggcaggatcgcccccaccttaccgtcgtcgaaagaggcccagctctgcccgacggcaccatcttggccctaccttgaagcccaccttggctacacgcacagcccaaccagaccatacccaggctccaacgaagcaggaagcaggtggtggctttgtgctgcccccgcctggcactgaccttgtgtttttacgggaaggcgcaagcagtcctgtgcaggtgccgggccctgttgcagcttccacagaagccctgttgcaggcagtagacccaggcctgccttctgtgaagcaagagccacctgacccagaggaggacaaggaggagaacaaggatgattctgcctccaaattggccccagaggaagaggcaggaggggctggcacacccgtggaaccaaccacccaaccccagtattctggtaattttgacaatgatctatatgaaatttatttgattgacatttag

SEQ ID NO: 80921 - DNA, 1653 bp, Artificial Sequence
  derived and/or modified sequence
atggccgaggactggctggactgccccgccctgggccccggctggaaaagacgggaagtctttagaaaatcgggcgctacctgtggacgaagcgatacatactaccagtcccccaccggtgaccggatcagatcgaaggtcgaactgaccagatacctcggccccgcttgcgacctgacactatttgatttcaaacagggaatactctgttaccccgcccctaaggcgcaccctgtggcggtggctagtaaaaaacgcaaaaaaccaagtagaccagctaaaacgcgaaaacggcaggtgggtccacagtccggtgaggtgcggaaggaagccccacgcgatgagactaaagcagacacggatactgctcctgctagttttcctgcgcctggttgttgtgaaaattgcggcatatctttcagtggagacggcactcagaggcagcgcctgaaaacactttgcaaggattgtagagcacaaagaattgcatttaatagagagcagagaatgttcaagcgcgttgggtgtggcgagtgcgcagcatgtcaggtgactgaggattgcggggcttgttccacatgccttctccaactcccacacgacgttgcttccggcttattttgcaagtgcgagcgccgacgttgtctgcgaattgttgaaagaagtagaggttgcggtgtgtgtagagggtgtcagacccaggaggactgcggccactgtcctatatgtttgagacctcccagacccggtttacgccgccagtggaagtgcgtgcagaggcgatgtcttcgcggcaaacacgccaggagaaagggggggtgtgactcaaaaatggctgcccgccgcagacctggcgcccagccgttgccacccccaccaccaagccagtcccccgagcccacggaaccacacccacgcgcccttgccccatcccccccagccgagtttatatactactgtgttgatgaagatgagctccagccgtacactaatagaaggcagaaccgcaaatgcggagcttgcgctgcatgtctgagaaggatggactgcggaagatgtgacttctgctgtgacaagcctaagtttggaggcagtaatcagaagcggcaaaagtgcagatggcggcagtgcttgcagtttgcgatgaagagattgctgcccagcgtttggtcggaaagcgaagatggagctggctcaccgccaccatatcgacgtcgcaagcgcccttctagcgcaaggaggcaccatttgggaccaaccctcaagccgaccctggccacaagaaccgcccaacctgatcacacacaggcccccacaaagcaagaagcgggagggggatttgttcttcctcccccgggtaccgatctagttttcttgcgagaaggtgcttcaagtcccgtacaagtccctgggccagtggccgccagcactgaagctcttctgcaggctgtcgatcccggcctgccctccgtaaaacaggaaccccctgaccctgaagaggataaagaagagaataaggatgatagcgccagtaagctggcgccggaggaggaggccggcggcgcaggcacaccagtagaacctacaactcagccacagtattcaggcaacttcgacaatgacctgtacgagatctatctcatcgatatttag

SEQ ID NO: 80922 - DNA, 1653 bp, Artificial Sequence
  derived and/or modified sequence
atggcggaagattggctggactgcccagccctcggacccggttggaagcggcgagaggtgtttaggaaaagcggtgccacctgcggccgatccgatacatactaccagtccccgacgggcgaccgcattcggagtaaggtcgaactcacacggtaccttggacctgcttgcgacctcaccctgttcgatttcaagcagggtattctgtgttacccggcaccaaaagcccatcccgtggccgtggccagtaagaagcggaagaaaccttcccgtccagcgaagactcggaaacgccaggttgggccacagagcggtgaggtgaggaaagaagcgcctcgtgacgagaccaaggcagacacggacactgcccctgcttccttccccgctcctgggtgttgcgaaaattgcggcattagcttctcaggagacggtacccaacgccagcgattgaagacattatgtaaggactgccgcgcacagagaattgcattcaatcgagagcagcgtatgtttaagcgagttggttgcggtgagtgcgccgcatgtcaggtgaccgaggattgtggggcttgcagcacctgccttctgcaactcccgcatgatgtcgccagcggattgttctgtaaatgtgaacgcagacgttgcttgagaatcgttgaaagatccagaggatgcggggtttgtcggggatgtcagactcaggaagattgcggccactgtcccatttgtttgagaccacctcgccctggactccgacgccaatggaagtgcgtccagaggaggtgcctccgcggaaagcatgcccgtagaaagggcggttgtgattcgaaaatggcagccagaagacgcccaggcgctcagccactcccaccacctcctcctagtcagtctcccgaacccaccgaaccacacccacgtgcgctcgcaccgtccccaccagccgaattcatctattactgcgtcgatgaggacgagctgcagccatatacgaataggagacagaatcgcaagtgcggagcttgcgccgcttgcttaaggaggatggactgtgggagatgcgacttctgctgcgacaagcccaagttcggcggaagcaaccagaaacgtcagaaatgcagatggaggcaatgtctgcaattcgccatgaagcgactgctgccttctgtgtggtccgagtcagaagacggggctggctctcctccaccatatcgcagaaggaagcgtccatccagcgcacggcgacatcacctcggacccaccctgaagccaacccttgccacccgcacagctcaaccggaccacacacaggcccctacaaagcaggaagcgggagggggattcgtactccctccccctgggactgatctcgtcttcctgcgggagggtgccagctcccccgtccaggttccaggccctgttgccgctagtaccgaggctttgctgcaggcagtggaccccggactgccatctgtgaaacaggagccacctgaccccgaggaagacaaagaagaaaacaaagacgacagcgcaagcaagctggcacccgaagaagaggccggtggagccggaaccccagttgagcctactacacaacctcagtatagtggtaacttcgataacgacctgtacgagatttacctgatcgatatctag

SEQ ID NO: 80923 - DNA, 1653 bp, Artificial Sequence
  derived and/or modified sequence
atggccgaggactggctggactgccccgccctgggccccggctggaagagaagagaggtgttcagaaagagcggcgccacctgcggcagaagcgacacctactaccagagccccaccggcgacagaatcagaagcaaggtggagctgaccagatacctgggccccgcctgcgacctgaccctgttcgacttcaagcagggcatcctgtgctaccccgcccccaaggcccaccccgtggccgtggccagcaagaagagaaagaagcccagcagacccgccaagaccagaaagagacaggtgggcccccagagcggcgaggtgagaaaggaggcccccagagacgagaccaaggccgacaccgacaccgcccccgccagcttccccgcccccggctgctgcgagaactgcggcatcagcttcagcggcgacggcacccagagacagagactgaagaccctgtgcaaggactgcagagcccagagaatcgccttcaacagagagcagagaatgttcaagagagtgggctgcggcgagtgcgccgcctgccaggtgaccgaggactgcggcgcctgcagcacctgcctgctgcagctgccccacgacgtggccagcggcctgttctgcaagtgcgagagaagaagatgcctgagaatcgtggagagaagcagaggctgcggcgtgtgcagaggctgccagacccaggaggactgcggccactgccccatctgcctgagaccccccagacccggcctgagaagacagtggaagtgcgtgcagagaagatgcctgagaggcaagcacgccagaagaaagggcggctgcgacagcaagatggccgccagaagaagacccggcgcccagcccctgcccccccccccccccagccagagccccgagcccaccgagccccaccccagagccctggcccccagcccccccgccgagttcatctactactgcgtggacgaggacgagctgcagccctacaccaacagaagacagaacagaaagtgcggcgcctgcgccgcctgcctgagaagaatggactgcggcagatgcgacttctgctgcgacaagcccaagttcggcggcagcaaccagaagagacagaagtgcagatggagacagtgcctgcagttcgccatgaagagactgctgcccagcgtgtggagcgagagcgaggacggcgccggcagcccccccccctacagaagaagaaagagacccagcagcgccagaagacaccacctgggccccaccctgaagcccaccctggccaccagaaccgcccagcccgaccacacccaggcccccaccaagcaggaggccggcggcggcttcgtgctgcccccccccggcaccgacctggtgttcctgagagagggcgccagcagccccgtgcaggtgcccggccccgtggccgccagcaccgaggccctgctgcaggccgtggaccccggcctgcccagcgtgaagcaggagccccccgaccccgaggaggacaaggaggagaacaaggacgacagcgccagcaagctggcccccgaggaggaggccggcggcgccggcacccccgtggagcccaccacccagccccagtacagcggcaacttcgacaacgacctgtacgagatctacctgatcgacatctag

SEQ ID NO: 80924 - protein, 588 aa, Artificial Sequence
  derived and/or modified sequence
MMSSPAQPDLMWNLVPWVLFCGCCRIFPDGVAGREQLLAQQRMHSMISSVDVKSEVPVGLEPISPLDLRTDLRMMMPVVDPVVREKQLQQELLLIQQQQQIQKQLLIAEFQKQHENLTRQHQAQLQEHIKELLAIKQQQELLEKEQKLEQQRQEQEVERHRREQQLPPLRGKDRGRERAVASTEVKQKLQEFLLSKSATKDTPTNGKNHSVSRHPKLWYTAAHHTSLDQSSPPLSGTSPSYKYTLPGAQDAKDDFPLRKTESSVSSSSPGSGPSSPNNGPTGSVTENETSVLPPTPHAEQMVSQQRILIHEDSMNLLSLYTSPSLPNITLGLPAVPSQLNASNSLKEKQKCETQTLRQGVPLPGQYGGSIPASSSHPHVTLEGKPPNSSHQALLQHLLLKEQMRQQKLLVAGGVPLHPQSPLATKERISPGIRGTHKLPRHRPLNRTQSAPLPQSTLAQLVIQQQHQQFLEKQKQYQQQIHMNKLLSKSIEQLKQPGSHLEEAEEELQGDQAMQEDRAPSSGNSTRSDSSACVDDTLGQVGAVKVKEEPVDSDEDAQIQEMESGEQAAFMQQVIGKDLAPGFVIKVII

SEQ ID NO: 80925 - DNA, 1776 bp, Artificial Sequence
  derived and/or modified sequence
atgatgtccagtcctgcacagtccagatccccggacctgatgtggaatctcgtgccctgggtacttttctgcggctgttgcaggatctttcccgatggggttgcgggccgcgaacagctcctcgcccaacagagaatgcatagcatgattagctccgtggacgtcaaatcagaggtgcctgtaggcctggaacccattagccctctcgacctgagaacagacctgaggatgatgatgccagttgtggatcctgtggtcagggagaaacagctgcagcaggagctgctcctgatccagcagcagcagcagattcaaaagcaattacttatcgcagaattccagaagcaacacgagaaccttactcgacagcaccaggcccaattgcaggaacatattaaggaattactggcgatcaagcagcaacaggagctgctcgaaaaagaacagaagttggagcaacaaagacaggagcaggaggtggagcgccaccggcgcgagcaacagttgcccccgctcagaggaaaggaccgcgggagagaaagggccgttgcctcgaccgaagtcaagcagaagctgcaggaatttctgttgagcaaaagcgcgacgaaagacactcccactaacggaaagaaccactccgtgtcaaggcatccaaagctctggtacaccgccgcccatcacacgtcactcgatcaatcctctccccccctttccggtacgtctccctcctacaaatacaccttgccaggagcacaagatgcaaaggacgactttccgcttcgcaaaactgagagctcagtgtcttcttctagccccggatccgggccaagctctccaaacaatggaccaaccggcagtgttacagagaatgagaccagcgttttgccccccactccacacgccgagcagatggtgtcccagcaaaggatattaattcatgaggattccatgaatttgctaagcctttacacgtcaccctcacttcccaatatcacattagggttaccagctgtgcccagtcagctgaacgccagtaactcgctgaaggaaaagcagaaatgtgagacacagacacttagacaaggagtgccgcttcctggccagtatggcggtagtatcccggcaagcagttcccacccccatgtgacactggagggtaagccccctaacagtagtcaccaggctttgttgcagcatctcctgctgaaggaacagatgcgacagcagaagttattagtcgccggtggggtccccctgcatccacagagcccactggctaccaaagagaggatctctccagggattcgaggaacacacaagttacccaggcatagacctcttaacagaactcagagcgccccgctgccccagagtaccctcgcccaactcgtcattcagcagcagcaccagcaatttttggagaagcaaaaacagtatcagcaacagatccatatgaacaaactgttaagtaaatcaattgagcagctaaagcagccgggatcccacctcgaggaggcagaggaggaactgcagggggatcaagctatgcaggaagatcgtgcaccctcaagtggtaactctaccaggagtgactcatcagcttgcgtggacgacaccctaggacaggtcggcgccgtgaaggtaaaagaggaaccggtcgatagcgacgaggacgcccagatccaggaaatggagagcggcgagcaagctgcctttatgcaacaagtgatcgggaaagatctagctccaggatttgtgattaaggtcataatctag

SEQ ID NO: 80926 - DNA, 1734 bp, Artificial Sequence
  derived and/or modified sequence
atgcttcagactatttacgaaagtgacagctgtttctcgtccgacggagtcgctggccgagagcagctcctggctcagcaacggatgcatagcatgattagttcagtcgacgttaagtcggaggtgcccgtcggactggaaccaatctctccgctggacctccggacagatctccggatgatgatgcccgtggttgatccagttgtgcgcgagaaacagttacagcaggaattgctgctgatccagcaacagcagcaaattcagaaacagctgctgattgcagaattccaaaagcagcacgagaaccttacacggcagcaccaggcccaattgcaggaacacataaagctgcagcaggagctgctcgctatcaagcagcagcaggagctgttggagaaagagcagaagctggaacagcagcgccaggaacaggaggttgaacgccacagacgagagcagcagctgccccctttgcggggcaaagataggggcagggagagagctgtcgcatccactgaagtcaagcagaaattgcaggagttcctcctgtcgaagtctgctacaaaggacactcccactaacggaaagaaccattccgtctccaggcaccctaagttatggtacacagctgctcatcatacctctctggaccaatccagtcccccactttccggaacctcgccctcttataaatacacactcccaggggcccaggatgcaaaggacgacttcccactgaggaaaacggaaagctctgttagctcctcgagtccaggttcggggcccagcagtcccaacaatggcccaacggggtctgtcaccgaaaacgagaccagtgtcctgccaccgaccccccatgcagaacagatggtttcgcaacagcgaattctcatccacgaagactctatgaaccttctctccttatacacctcgccaagccttcccaacatcactcttggattacccgcagtccccagtcagctgaatgcttctaacagcctcaaagagaaacagaagtgtgagacacagacacttcgccaaggcgtgccattaccagggcaatacgggggaagcattcccgctagctcttcccatccgcatgtcacactggaaggaaaacctccaaattcatcacaccaggctctattgcagcacctgctgctcaaggaacagatgagacaacaaaaacttctcgtagctggtggcgtaccgttacacccacaatcacccctggctactaaggaacgcatttccccaggcattcgaggcacacacaagcttccaagacacaggcccctgaatcggacgcagtctgctcccctcccacagtcaacactggcccaactggtcatccagcagcagcaccagcagttcttggagaagcagaagcagtaccaacagcaaatacacatgaacaagctgctgagtaagagcatcgagcagttgaagcaacctggcagccaccttgaagaagctgaagaggaactgcagggggatcaggcaatgcaggaggaccgcgccccttccagcggtaatagtactcgaagcgactcttccgcttgcgtggatgacacccttggacaggttggggctgtaaaagtaaaagaagaacccgtggacagcgacgaagacgcccagatccaggagatggagagcggcgaacaagccgccttcatgcaacaggtgatagggaaagatctcgcacctggcttcgtaatcaaggtcatcatctag

SEQ ID NO: 80927 - DNA, 1767 bp, Artificial Sequence
  derived and/or modified sequence
atgatgtcttctccagctcagccagatctgatgtggaacctggtcccatgggtgctgttctgcggatgctgccggattttccctgacggcgtggctggacgggagcaactgctggcccagcagagaatgcacagtatgataagttccgttgatgtgaagagtgaagtacccgtcggcctggaacctatctcccctctcgatctgcgaacagacctgcggatgatgatgcccgtggttgaccctgtggtgagagagaagcaacttcaacaagaactcctcctaatccagcagcagcagcagatccagaagcagctgctgatcgctgaattccaaaagcagcacgaaaacctgactcgccagcatcaggcccagctgcaggagcatatcaaggaactactggccatcaagcagcaacaggagctcctggaaaaggagcagaagctggagcagcaaaggcaagaacaggaagttgaaaggcaccggagggagcagcagctgcccccactgcgtggcaaggaccgaggcagggagcgggctgttgcctcaactgaggtgaagcaaaaactgcaggagttccttcttagcaagagcgcgaccaaggatacccccaccaacggcaagaatcactctgtctctcgacaccctaagctctggtacaccgccgcccatcacacatcactcgatcagagctctcccccattgagcggtaccagcccctcttataaatatacactgccaggagcccaagacgccaaggacgacttccctttgagaaaaactgaatccagcgtcagctcctcctcccccggctccgggcctagcagccccaacaacggacccaccggtagtgttaccgagaacgagacttcggtcctgcctcccacaccacacgcagaacaaatggtctcgcagcagagaatcctgatacacgaagattcaatgaaccttcttagcctgtacaccagcccatcgctcccaaatatcaccttggggctgcctgccgtgccttctcagctcaacgcctccaactctctaaaggagaaacagaagtgtgagactcaaaccctgagacagggggtgccactgccaggacaatacggcggctccattccggctagctcatcacacccacacgttaccctggaggggaaaccacctaactcaagtcaccaggccttattacagcatctattactgaaagagcaaatgcggcagcagaaactcctcgtggctgggggggtcccactgcacccacagtcgcccctggccacaaaggaaaggatcagccctgggattagagggacacacaagctacctagacaccgccccctaaacaggacacagagcgcaccactccctcagagcaccctcgcccagctggtgattcagcagcaacaccagcagtttctggagaaacagaagcagtatcaacaacaaattcacatgaacaagttgttaagcaagagcattgagcagcttaagcagccggggagccacctggaagaggctgaggaggaactgcagggcgaccaggccatgcaggaggacagagcccccagctcgggcaattcaactcgctccgatagttcagcctgcgttgacgatacgctcggccaggtgggcgcagtgaaagtcaaggaagaacctgtggacagcgatgaggatgcgcaaatacaggaaatggaatccggcgagcaggccgcattcatgcagcaggtgataggtaaagatttggcgccaggctttgtgatcaaagtaataatttag

SEQ ID NO: 80928 - DNA, 2533 bp, Artificial Sequence
  derived and/or modified sequence
gcagcgcgcaccgagccggccgcgccgcgcccgccgctctcgccgctttcgccgcggtctcctcctctagcgcccgccgcggccggtaaatctcggctggaggagcagcggcggcccccgagtcaactttcattccctttttgcttctgcctcaccattctcttctcctcctcgaaagatggctgtttggagaagggggagaagttaagaggtcgccagcgcggagcgaaggagggcgcgatagcctcagcaggagcgggcggaggtttctcctctgccaacccctcctggaccattgtcagcagttgaacgacaaaggctgtgaatctgcatcctagtcttagcagtccctctgattctcatgatgagctcacctgcacagtctcgatctcctgacctcatgtggaaccttgtaccatgggtgctattctgtggctgctgtaggatcttcccagatggggtggctggacgagagcagctcttggctcagcaaagaatgcacagtatgatcagctcagtggatgtgaagtcagaagttcctgtgggcctggagcccatctcacctttagacctaaggacagacctcaggatgatgatgcccgtggtggaccctgttgtccgtgagaagcaattgcagcaggaattacttcttatccagcagcagcaacaaatccagaagcagcttctgatagcagagtttcagaaacagcatgagaacttgacacggcagcaccaggctcagcttcaggagcatatcaaggaacttctagccataaaacagcaacaagaactcctagaaaaggagcagaaactggagcagcagaggcaagaacaggaagtagagaggcatcgcagagaacagcagcttcctcctctcagaggcaaagatagaggacgagaaagggcagtggcaagtacagaagtaaagcagaagcttcaagagttcctactgagtaaatcagcaacgaaagacactccaactaatggaaaaaatcattccgtgagccgccatcccaagctctggtacacggctgcccaccacacatcattggatcaaagctctccaccccttagtggaacatctccatcctacaagtacacattaccaggagcacaagatgcaaaggatgatttcccccttcgaaaaactgaatcctcagtcagtagcagttctccaggctctggtcccagttcaccaaacaatgggccaactggaagtgttactgaaaatgagacttcggttttgccccctacccctcatgccgagcaaatggtttcacagcaacgcattctaattcatgaagattccatgaacctgctaagtctttatacctctccttctttgcccaacattaccttggggcttcccgcagtgccatcccagctcaatgcttcgaattcactcaaagaaaagcagaagtgtgagacgcagacgcttaggcaaggtgttcctctgcctgggcagtatggaggcagcatcccggcatcttccagccaccctcatgttactttagagggaaagccacccaacagcagccaccaggctctcctgcagcatttattattgaaagaacaaatgcgacagcaaaagcttcttgtagctggtggagttcccttacatcctcagtctcccttggcaacaaaagagagaatttcacctggcattagaggtacccacaaattgccccgtcacagacccctgaaccgaacccagtctgcacctttgcctcagagcacgttggctcagctggtcattcaacagcaacaccagcaattcttggagaagcagaagcaataccagcagcagatccacatgaacaaactgctttcgaaatctattgaacaactgaagcaaccaggcagtcaccttgaggaagcagaggaagagcttcagggggaccaggcgatgcaggaagacagagcgccctctagtggcaacagcactaggagcgacagcagtgcttgtgtggatgacacactgggacaagttggggctgtgaaggtcaaggaggaaccagtggacagtgatgaagatgctcagatccaggaaatggaatctggggagcaggctgcttttatgcaacaggtaataggcaaagatttagctccaggatttgtaattaaagtcattatctgaacatgaaatgcattgcaggtttggtaaatggatatgatttcctatcagtttatatttctctatgatttgagttcagtgtttaaggattctacctaatgcagatatatgtatatatctatatagaggtctttctatatactgatctctatatagatatcaatgtttcattgaaaatccactggtaaggaaatacctgttatactaaaattatgatacataatatctgagcagttaataggctttaaatttatcccaaagcctgctacaccaattacttctaaagaaaacaaattcactgttattttgagtttatgtgttgagatcagtgactgctggatagtctcccagtctgatcaatgaagcattcgattagtttttgattttttgcaacatcta

SEQ ID NO: 80929 - DNA, 4102 bp, Artificial Sequence
  derived and/or modified sequence
gcactgagcagtgatgaatgtttcatgtagctgaagtaagagtgactggaatatgctgcagacaatttacgagagtgactcctgtttttcctcagatggggtggctggacgagagcagctcttggctcagcaaagaatgcacagtatgatcagctcagtggatgtgaagtcagaagttcctgtgggcctggagcccatctcacctttagacctaaggacagacctcaggatgatgatgcccgtggtggaccctgttgtccgtgagaagcaattgcagcaggaattacttcttatccagcagcagcaacaaatccagaagcagcttctgatagcagagtttcagaaacagcatgagaacttgacacggcagcaccaggctcagcttcaggagcatatcaagttgcaacaggaacttctagccataaaacagcaacaagaactcctagaaaaggagcagaaactggagcagcagaggcaagaacaggaagtagagaggcatcgcagagaacagcagcttcctcctctcagaggcaaagatagaggacgagaaagggcagtggcaagtacagaagtaaagcagaagcttcaagagttcctactgagtaaatcagcaacgaaagacactccaactaatggaaaaaatcattccgtgagccgccatcccaagctctggtacacggctgcccaccacacatcattggatcaaagctctccaccccttagtggaacatctccatcctacaagtacacattaccaggagcacaagatgcaaaggatgatttcccccttcgaaaaactgaatcctcagtcagtagcagttctccaggctctggtcccagttcaccaaacaatgggccaactggaagtgttactgaaaatgagacttcggttttgccccctacccctcatgccgagcaaatggtttcacagcaacgcattctaattcatgaagattccatgaacctgctaagtctttatacctctccttctttgcccaacattaccttggggcttcccgcagtgccatcccagctcaatgcttcgaattcactcaaagaaaagcagaagtgtgagacgcagacgcttaggcaaggtgttcctctgcctgggcagtatggaggcagcatcccggcatcttccagccaccctcatgttactttagagggaaagccacccaacagcagccaccaggctctcctgcagcatttattattgaaagaacaaatgcgacagcaaaagcttcttgtagctggtggagttcccttacatcctcagtctcccttggcaacaaaagagagaatttcacctggcattagaggtacccacaaattgccccgtcacagacccctgaaccgaacccagtctgcacctttgcctcagagcacgttggctcagctggtcattcaacagcaacaccagcaattcttggagaagcagaagcaataccagcagcagatccacatgaacaaactgctttcgaaatctattgaacaactgaagcaaccaggcagtcaccttgaggaagcagaggaagagcttcagggggaccaggcgatgcaggaagacagagcgccctctagtggcaacagcactaggagcgacagcagtgcttgtgtggatgacacactgggacaagttggggctgtgaaggtcaaggaggaaccagtggacagtgatgaagatgctcagatccaggaaatggaatctggggagcaggctgcttttatgcaacaggtaataggcaaagatttagctccaggatttgtaattaaagtcattatctgaacatgaaatgcattgcaggtttggtaaatggatatgatttcctatcagtttatatttctctatgatttgagttcagtgtttaaggattctacctaatgcagatatatgtatatatctatatagaggtctttctatatactgatctctatatagatatcaatgtttcattgaaaatccactggtaaggaaatacctgttatactaaaattatgatacataatatctgagcagttaataggctttaaatttatcccaaagcctgctacaccaattacttctaaagaaaacaaattcactgttattttgagtttatgtgttgagatcagtgactgctggatagtctcccagtctgatcaatgaagcattcgattagtttttgattttttgcaacatctagaatttaattttcacatcactgtacataatgtatcatactatagtcttgaacactgttaaaggtagtctgccccttccttcctctctctttttttagttaagtagaaatgttctggtcaccatgccagtagtcctaggttattgtgtaggttgcaattgaacatattaggaatacaggtggttttaaatatatagatgcaaattgcagcactactttaaatattagattatgtctcacatagcactgctcattttacttttattttgtgtaatttgatgacactgtctatcaaaaaagagcaaatgaagcagatgcaaatgttagtgagaagtaatgtgcagcattatggtccaatcagatacaatattgtgtctacaattgcaaaaaacacagtaacaggatgaatattatctgatatcaagtcaaaatcagtttgaaaagaaggtgtatcatattttatattgtcactagaatctcttaagtataattccataatgacatgggcatataccgtaacattctggcaaataacaattagaaaagataggtttaacaaaaaaatttacttgtatataatgcaccttcaggaggactatgtcctttgatgctataaaatacaaacaactttgaaggcaacagaagacactgtttattcaagtcagttctttgtcaggttcctgctgttctcctacagaaaagtgattctgtgagggtgaacaggaaatgccttgtggaaacaggaagtccaagtgattcatgtactgaggaatgtaggaaaaaaaatctgaggatagtgctttactctttctgtttttaaagggcactctatgaattgatttattgtctaagaaaataacaccacaagtagggaaattgttacggaagcttttcactggaacatttccttcatattcccttttgatatgtttaccttgttttataggtttacttttgttaagctagttaaaggttcgttgtattaagacccctttaatatggataatccaaattgacctagaatctttgtgaggttttttctattaaaatatttatatttctaaatccgaggtatttcaaggtgtagtatcctatttcaaaggagatatagcagttttgccaaatgtagacattgttcaactgtatgttattggcacgtgttgtttacattttgctgtgacatttaaaaatatttctttaaaaatgttactgctaaagatacattatccttttttaaaaagtctccattcaaattaaattaacataactagaagttagaaagtttaaaagttttccacataatgaaagtccttctgataatttgacaaatagctataataggaacactccctatcaccaacatattttggttagtatattccttcatattaaaatgactttttgtcagttgttttgcattaaaaatatggcatgcctaagataaaattgtatattttttccatctcataaatattcattttcttcaaagtcttttttcaatctcataaaaaagggatagtgcatcttttaaaatacattttatttggggaggaacatgtggctgagcagacttttgtataatattacttcaaagatatgtaatcacaaacaaaaaaaactattttttataatgtcatttgagagagtttcatcagtacagttggtggacgttaattgtttgaatttgatagtctttgaatttaatcaagaaactacctggaaccagtgaaaaggaaagctggacttaaataatcttagaattaattgataaatgtctcttttaaaatctactgtatttattataatttacacccttgaaggtgatctcttgttttgtgttgtaaatatattgtttgtatgtttcccttcttgccttctgttataagtctcttcctttctcaaataaagttttttttaaaaga

SEQ ID NO: 80930 - DNA, 2524 bp, Artificial Sequence
  derived and/or modified sequence
gcagcgcgcaccgagccggccgcgccgcgcccgccgctctcgccgctttcgccgcggtctcctcctctagcgcccgccgcggccggtaaatctcggctggaggagcagcggcggcccccgagtcaactttcattccctttttgcttctgcctcaccattctcttctcctcctcgaaagatggctgtttggagaagggggagaagttaagaggtcgccagcgcggagcgaaggagggcgcgatagcctcagcaggagcgggcggaggtttctcctctgccaacccctcctggaccattgtcagcagttgaacgacaaaggctgtgaatctgcatcctagtcttagcagtccctctgattctcatgatgagctcacctgcacagcctgacctcatgtggaaccttgtaccatgggtgctattctgtggctgctgtaggatcttcccagatggggtggctggacgagagcagctcttggctcagcaaagaatgcacagtatgatcagctcagtggatgtgaagtcagaagttcctgtgggcctggagcccatctcacctttagacctaaggacagacctcaggatgatgatgcccgtggtggaccctgttgtccgtgagaagcaattgcagcaggaattacttcttatccagcagcagcaacaaatccagaagcagcttctgatagcagagtttcagaaacagcatgagaacttgacacggcagcaccaggctcagcttcaggagcatatcaaggaacttctagccataaaacagcaacaagaactcctagaaaaggagcagaaactggagcagcagaggcaagaacaggaagtagagaggcatcgcagagaacagcagcttcctcctctcagaggcaaagatagaggacgagaaagggcagtggcaagtacagaagtaaagcagaagcttcaagagttcctactgagtaaatcagcaacgaaagacactccaactaatggaaaaaatcattccgtgagccgccatcccaagctctggtacacggctgcccaccacacatcattggatcaaagctctccaccccttagtggaacatctccatcctacaagtacacattaccaggagcacaagatgcaaaggatgatttcccccttcgaaaaactgaatcctcagtcagtagcagttctccaggctctggtcccagttcaccaaacaatgggccaactggaagtgttactgaaaatgagacttcggttttgccccctacccctcatgccgagcaaatggtttcacagcaacgcattctaattcatgaagattccatgaacctgctaagtctttatacctctccttctttgcccaacattaccttggggcttcccgcagtgccatcccagctcaatgcttcgaattcactcaaagaaaagcagaagtgtgagacgcagacgcttaggcaaggtgttcctctgcctgggcagtatggaggcagcatcccggcatcttccagccaccctcatgttactttagagggaaagccacccaacagcagccaccaggctctcctgcagcatttattattgaaagaacaaatgcgacagcaaaagcttcttgtagctggtggagttcccttacatcctcagtctcccttggcaacaaaagagagaatttcacctggcattagaggtacccacaaattgccccgtcacagacccctgaaccgaacccagtctgcacctttgcctcagagcacgttggctcagctggtcattcaacagcaacaccagcaattcttggagaagcagaagcaataccagcagcagatccacatgaacaaactgctttcgaaatctattgaacaactgaagcaaccaggcagtcaccttgaggaagcagaggaagagcttcagggggaccaggcgatgcaggaagacagagcgccctctagtggcaacagcactaggagcgacagcagtgcttgtgtggatgacacactgggacaagttggggctgtgaaggtcaaggaggaaccagtggacagtgatgaagatgctcagatccaggaaatggaatctggggagcaggctgcttttatgcaacaggtaataggcaaagatttagctccaggatttgtaattaaagtcattatctgaacatgaaatgcattgcaggtttggtaaatggatatgatttcctatcagtttatatttctctatgatttgagttcagtgtttaaggattctacctaatgcagatatatgtatatatctatatagaggtctttctatatactgatctctatatagatatcaatgtttcattgaaaatccactggtaaggaaatacctgttatactaaaattatgatacataatatctgagcagttaataggctttaaatttatcccaaagcctgctacaccaattacttctaaagaaaacaaattcactgttattttgagtttatgtgttgagatcagtgactgctggatagtctcccagtctgatcaatgaagcattcgattagtttttgattttttgcaacatcta

SEQ ID NO: 80931 - DNA, 2359 bp, Artificial Sequence
  derived and/or modified sequence
ggcacagacacagataggagaagggcaccggctggagccacttgcaggactgagggtttttgcaacaaaaccctagcagcctgaagaactctaagccagatggggtggctggacgagagcagctcttggctcagcaaagaatgcacagtatgatcagctcagtggatgtgaagtcagaagttcctgtgggcctggagcccatctcacctttagacctaaggacagacctcaggatgatgatgcccgtggtggaccctgttgtccgtgagaagcaattgcagcaggaattacttcttatccagcagcagcaacaaatccagaagcagcttctgatagcagagtttcagaaacagcatgagaacttgacacggcagcaccaggctcagcttcaggagcatatcaaggaacttctagccataaaacagcaacaagaactcctagaaaaggagcagaaactggagcagcagaggcaagaacaggaagtagagaggcatcgcagagaacagcagcttcctcctctcagaggcaaagatagaggacgagaaagggcagtggcaagtacagaagtaaagcagaagcttcaagagttcctactgagtaaatcagcaacgaaagacactccaactaatggaaaaaatcattccgtgagccgccatcccaagctctggtacacggctgcccaccacacatcattggatcaaagctctccaccccttagtggaacatctccatcctacaagtacacattaccaggagcacaagatgcaaaggatgatttcccccttcgaaaaactgaatcctcagtcagtagcagttctccaggctctggtcccagttcaccaaacaatgggccaactggaagtgttactgaaaatgagacttcggttttgccccctacccctcatgccgagcaaatggtttcacagcaacgcattctaattcatgaagattccatgaacctgctaagtctttatacctctccttctttgcccaacattaccttggggcttcccgcagtgccatcccagctcaatgcttcgaattcactcaaagaaaagcagaagtgtgagacgcagacgcttaggcaaggtgttcctctgcctgggcagtatggaggcagcatcccggcatcttccagccaccctcatgttactttagagggaaagccacccaacagcagccaccaggctctcctgcagcatttattattgaaagaacaaatgcgacagcaaaagcttcttgtagctggtggagttcccttacatcctcagtctcccttggcaacaaaagagagaatttcacctggcattagaggtacccacaaattgccccgtcacagacccctgaaccgaacccagtctgcacctttgcctcagagcacgttggctcagctggtcattcaacagcaacaccagcaattcttggagaagcagaagcaataccagcagcagatccacatgaacaaactgctttcgaaatctattgaacaactgaagcaaccaggcagtcaccttgaggaagcagaggaagagcttcagggggaccaggcgatgcaggaagacagagcgccctctagtggcaacagcactaggagcgacagcagtgcttgtgtggatgacacactgggacaagttggggctgtgaaggtcaaggaggaaccagtggacagtgatgaagatgctcagatccaggaaatggaatctggggagcaggctgcttttatgcaacaggtaataggcaaagatttagctccaggatttgtaattaaagtcattatctgaacatgaaatgcattgcaggtttggtaaatggatatgatttcctatcagtttatatttctctatgatttgagttcagtgtttaaggattctacctaatgcagatatatgtatatatctatatagaggtctttctatatactgatctctatatagatatcaatgtttcattgaaaatccactggtaaggaaatacctgttatactaaaattatgatacataatatctgagcagttaataggctttaaatttatcccaaagcctgctacaccaattacttctaaagaaaacaaattcactgttattttgagtttatgtgttgagatcagtgactgctggatagtctcccagtctgatcaatgaagcattcgattagtttttgattttttgcaacatctagaatttaattttcacatcactgtacataatgtatcatactatagtcttgaacactgttaaaggtagtctgccccttccttcctctctctttttttagttaagtagaaatgttctggtcaccatgccagtagtcctaggttattgtgtaggttgcaattgaacatattaggaatacaggtggt

SEQ ID NO: 80932 - DNA, 1776 bp, Artificial Sequence
  derived and/or modified sequence
atgatgagcagccctgcccagagccgcagcccagacctgatgtggaacctggtgccctgggtgctcttctgtggctgctgccgcatcttcccagatggagtggccggccgggagcagctgctggcccagcagaggatgcacagcatgatcagctctgtggatgtgaagtctgaggtgcctgtgggcctggagcccatcagccccctggacctgaggacagacctgaggatgatgatgcctgtggtggaccctgtggtgcgggagaagcagctgcagcaggagctgctgctgatccagcagcagcagcagatccagaagcagctgctgattgctgagttccagaagcagcacgagaacctgacccggcagcaccaggcccagctgcaggagcacatcaaggagctgctggccatcaagcagcagcaggagctgctggagaaggagcagaagctggagcagcagaggcaggagcaggaggtggagcggcaccggcgggagcagcagctgccccccctgcggggcaaggaccggggccgggagagagctgtggccagcacagaggtgaagcagaagctgcaggagttcctgctgagcaagagcgccaccaaggacacccccaccaacgggaagaaccacagcgtgagccgccaccccaagctgtggtacacagctgcccaccacaccagcctggaccagagcagcccccccctgagcggcaccagccccagctacaagtacaccctgcccggggcccaggatgccaaggatgacttccccctgaggaagacagagagctctgtgagcagcagcagccctggcagcggccccagcagccccaacaacggccccaccggctctgtgacagaaaatgagacctctgtgctgccccccacccctcatgctgagcagatggtgtcccagcagaggatcctgattcatgaggacagcatgaacctgctgagcctgtacaccagccccagcctgcccaacatcaccctgggcctgcctgctgtgcccagccagctgaatgccagcaacagcctgaaggagaagcagaagtgtgagacccagaccctgcggcagggcgtgcccctgcccggccagtatggaggcagcatcccagccagcagcagccacccccacgtgaccctggagggcaagccacccaacagcagccaccaggccctgctgcagcacctgctgctgaaggagcagatgaggcagcagaagctgctggtggccggcggcgtgcccctgcacccccagagccccctggccaccaaggagcgcatcagccctggcatccggggcacccacaagctgcccaggcaccggcccctgaacagaacccagagcgcccccctgccccagagcaccctggcccagctggtgatccagcagcagcaccagcagttcctggagaagcagaagcagtaccagcagcagatccacatgaacaagctgctgagcaagagcattgagcagctgaagcagcccggcagccacctggaggaggccgaggaggagctgcagggcgaccaggccatgcaggaggaccgggcccccagcagcggcaacagcaccaggagtgacagcagcgcctgtgtggatgacaccctgggccaggtgggcgctgtgaaggtgaaggaggagcctgtggacagtgatgaagatgcccagatccaggagatggagagcggggagcaggccgccttcatgcagcaggtgattggcaaggacctggcccctggctttgtgatcaaggtgatcatctag

SEQ ID NO: 80933 - DNA, 1734 bp, Artificial Sequence
  derived and/or modified sequence
atgctgcagaccatctatgaaagtgacagctgcttcagcagtgatggagtggccggccgggagcagctgctggcccagcagaggatgcacagcatgatcagctctgtggatgtgaagtctgaggtgcctgtgggcctggagcccatcagccccctggacctgaggacagacctgaggatgatgatgcctgtggtggaccctgtggtgcgggagaagcagctgcagcaggagctgctgctgatccagcagcagcagcagatccagaagcagctgctgattgctgagttccagaagcagcacgagaacctgacccggcagcaccaggcccagctgcaggagcacatcaagctgcagcaggagctgctggccatcaagcagcagcaggagctgctggagaaggagcagaagctggagcagcagaggcaggagcaggaggtggagcggcaccggcgggagcagcagctgccccccctgcggggcaaggaccggggccgggagagagctgtggccagcacagaggtgaagcagaagctgcaggagttcctgctgagcaagagcgccaccaaggacacccccaccaacgggaagaaccacagcgtgagccgccaccccaagctgtggtacacagctgcccaccacaccagcctggaccagagcagcccccccctgagcggcaccagccccagctacaagtacaccctgcccggggcccaggatgccaaggatgacttccccctgaggaagacagagagctctgtgagcagcagcagccctggcagcggccccagcagccccaacaacggccccaccggctctgtgacagaaaatgagacctctgtgctgccccccacccctcatgctgagcagatggtgtcccagcagaggatcctgattcatgaggacagcatgaacctgctgagcctgtacaccagccccagcctgcccaacatcaccctgggcctgcctgctgtgcccagccagctgaatgccagcaacagcctgaaggagaagcagaagtgtgagacccagaccctgcggcagggcgtgcccctgcccggccagtatggaggcagcatcccagccagcagcagccacccccacgtgaccctggagggcaagccacccaacagcagccaccaggccctgctgcagcacctgctgctgaaggagcagatgaggcagcagaagctgctggtggccggcggcgtgcccctgcacccccagagccccctggccaccaaggagcgcatcagccctggcatccggggcacccacaagctgcccaggcaccggcccctgaacagaacccagagcgcccccctgccccagagcaccctggcccagctggtgatccagcagcagcaccagcagttcctggagaagcagaagcagtaccagcagcagatccacatgaacaagctgctgagcaagagcattgagcagctgaagcagcccggcagccacctggaggaggccgaggaggagctgcagggcgaccaggccatgcaggaggaccgggcccccagcagcggcaacagcaccaggagtgacagcagcgcctgtgtggatgacaccctgggccaggtgggcgctgtgaaggtgaaggaggagcctgtggacagtgatgaagatgcccagatccaggagatggagagcggggagcaggccgccttcatgcagcaggtgattggcaaggacctggcccctggctttgtgatcaaggtgatcatctag

SEQ ID NO: 80934 - DNA, 1767 bp, Artificial Sequence
  derived and/or modified sequence
atgatgagcagccctgcccagcctgacctgatgtggaacctggtgccctgggtgctcttctgtggctgctgccgcatcttcccagatggagtggccggccgggagcagctgctggcccagcagaggatgcacagcatgatcagctctgtggatgtgaagtctgaggtgcctgtgggcctggagcccatcagccccctggacctgaggacagacctgaggatgatgatgcctgtggtggaccctgtggtgcgggagaagcagctgcagcaggagctgctgctgatccagcagcagcagcagatccagaagcagctgctgattgctgagttccagaagcagcacgagaacctgacccggcagcaccaggcccagctgcaggagcacatcaaggagctgctggccatcaagcagcagcaggagctgctggagaaggagcagaagctggagcagcagaggcaggagcaggaggtggagcggcacagaagagagcagcagctgccccccctgcggggcaaggaccggggccgggagagagctgtggccagcacagaggtgaagcagaagctgcaggagttcctgctgagcaagagcgccaccaaggacacccccaccaacgggaagaaccacagcgtgagccgccaccccaagctgtggtacacagctgcccaccacaccagcctggaccagagcagcccccccctgagcggcaccagccccagctacaagtacaccctgcccggggcccaggatgccaaggatgacttccccctgaggaagacagagagctctgtgagcagcagcagccctggcagcggccccagcagccccaacaacggccccactggatctgtgacagaaaatgagacctctgtgctgccccccacccctcatgctgagcagatggtgtcccagcagaggatcctgattcatgaagattccatgaacctgctgagcctgtacaccagccccagcctgcccaacatcaccctgggcctgcctgctgtgcccagccagctgaatgccagcaacagcctgaaggagaagcagaagtgtgagacccagaccctgcggcagggcgtgcccctgcccggccagtatggaggcagcatcccagccagcagcagccacccccacgtgaccctggagggcaagccacccaacagcagccaccaggccctgctgcagcacctgctgctgaaggagcagatgaggcagcagaagctgctggtggccggcggcgtgcccctgcacccccagagccccctggccaccaaggagcgcatcagccctggcatccggggcacccacaagctgcccaggcaccggcccctgaacagaacccagagcgcccccctgccccagagcaccctggcccagctggtgatccagcagcagcaccagcagttcctggagaagcagaagcagtaccagcagcagatccacatgaacaagctgctgagcaagagcattgagcagctgaagcagcccggcagccacctggaggaggccgaggaggagctgcagggcgaccaggccatgcaggaggaccgggcccccagcagcggcaacagcaccaggagtgacagcagcgcctgtgtggatgacaccctgggccaggtgggcgctgtgaaggtgaaggaggagcctgtggacagtgatgaagatgcccagatccaggagatggagagcggggagcaggccgccttcatgcagcaggtgattggcaaggacctggcccctggcttcgtcatcaaggtgatcatctag

SEQ ID NO: 80935 - DNA, 1776 bp, Artificial Sequence
  derived and/or modified sequence
atgatgagcagccccgcccagagccggagccccgacctgatgtggaacctcgtgccctgggttctgttttgcggctgctgtaggatcttccccgacggggtggccggaagagaacagctgctggctcagcagagaatgcactccatgatctcaagcgtggacgtgaagagtgaggtcccagtcggacttgagccgatctctccactggatcttcggacagatctgcgcatgatgatgccggtggtggatccagtggtgcgggaaaagcaattgcagcaagaacttctgttaattcagcaacagcaacaaattcagaagcagctgctaatcgccgaattccagaagcagcatgagaacctgactagacaacaccaggcccaattacaggagcacatcaaagaattgctcgccattaaacaacagcaggaactgcttgagaaggaacagaagcttgaacagcaacggcaggaacaagaagttgagcgccatagacgtgagcagcaacttccgcccctcagaggtaaggacaggggccgtgagcgtgcagtcgctagcactgaagttaagcagaagctccaagagtttctgttgagcaagtcagccacgaaagacacgccaacgaatggaaaaaaccactccgtgagccgccaccccaagttatggtatacagctgcccaccacacctctctcgatcagagctccccacccttgagtggtacatccccgagctacaagtacaccctgccaggggcccaagatgccaaggacgatttcccactcagaaaaacagagtcgagtgtatcctccagttcccccgggtccggcccttcatcgcccaacaatggcccaacaggtagtgtcacagagaatgaaaccagtgtactgcctccaaccccacatgcagaacagatggtctcccagcagagaattctgattcacgaggacagtatgaacttgctgtccctgtacaccagcccttccctgccgaatataactctcggcctgcctgccgtcccttcccaactgaatgcctctaattcgcttaaggaaaaacagaagtgcgaaacacagacccttcggcagggggtgcctctcccggggcaatacggcggcagcattcccgcatcatcgtcccacccccacgtgactctggaggggaagcctcctaatagttctcaccaggccctgctgcagcacctgctgttaaaggagcaaatgcggcagcagaagttactggtcgctggtggggtgcctctccatccccagtcccctctggcgacaaaggaacgcatctctccaggcataagaggcacccacaaattgccgcgccaccggccactcaatagaacacagtccgcgccacttccccagagcaccctcgcccaactggtgattcagcagcagcatcagcagtttctcgagaaacagaaacagtatcaacaacaaatccacatgaacaagctgctgtctaagtccattgaacagctgaagcagccaggttctcatctggaagaagccgaggaggaactccagggcgatcaggcaatgcaggaagatagggctcccagtagcggcaactctactcggtcagactcatccgcatgcgtcgacgatactctcggccaagttggggcagttaaagtcaaagaagagcccgtagattcggacgaagatgcccagatacaagagatggagagcggagaacaggcagcatttatgcagcaggtgattggcaaagacttggcgcccggctttgtgatcaaggtgatcatttag

SEQ ID NO: 80936 - DNA, 1734 bp, Artificial Sequence
  derived and/or modified sequence
atgctgcagaccatctacgagagcgacagctgcttcagcagcgacggagtggccggtagggagcagttgctggctcagcaacgcatgcacagcatgatctcctctgtcgatgttaagtccgaagtccccgtggggcttgagcccatatctcccctggatcttcggaccgatctcagaatgatgatgcctgtcgtggaccccgtggttcgggaaaaacagctgcagcaagaacttctcctgatacagcagcagcagcagatccagaagcagctccttatcgcggagttccagaagcagcatgaaaaccttactcgccaacatcaggctcagctccaggaacacatcaaactgcaacaagaattgctggccattaaacagcagcaggaactgctggagaaagagcagaagctcgaacagcagagacaggagcaagaggttgaacgacatcgacgcgagcagcagctgccacccttgagaggaaaagaccgcggaagggagcgcgccgttgcctcaaccgaagtaaagcaaaagctgcaggaatttctgctgagcaagtcggccactaaggatacgcctactaacggaaagaaccattccgtctctcgtcacccaaaactatggtataccgccgctcatcatacatctttagatcagtccagcccacctctgtcgggcacatccccctcttacaaatatacgctgcctggtgcccaggatgcaaaggacgattttcccctgagaaagactgaatcaagcgtaagctcttcatcccctgggtcgggtccctcgtcccccaacaatggccccactggaagcgtaacagagaacgagaccagcgtgctgccccctacgccccatgcagagcaaatggtgagtcagcaacggatcctaatacatgaggacagcatgaaccttctgagcctttatacatcaccctcattgccaaatatcactcttggcctgccagcagtgccttcacagctcaacgccagcaactcgctcaaagaaaagcagaaatgcgaaacccaaacactccgtcagggggtccctctgcccgggcagtacggtggatctataccagccagttctagccaccctcacgtgacactcgaaggaaagccacccaattcatctcatcaggctttgctgcaacacctcctactgaaggagcagatgcgtcaacagaagctgctcgtagcagggggtgttcccctgcacccccagtccccactggctacaaaggagcgaatcagccctggaattaggggaactcataagctgcctcgacacagacctcttaatagaactcaaagcgctcctctgccccagagcaccctggcccagttagtaattcagcagcagcaccaacagttcctcgagaagcaaaaacagtaccagcagcagatccatatgaacaaactgctgtcaaagagtatcgagcagttgaagcagcctggttcacacttggaggaagctgaggaagagttgcaaggtgaccaggccatgcaggaagatagagcacctagttcagggaattccacacggagcgatagtagcgcctgtgtggacgacactttaggccaggtcggagctgtgaaggttaaggaagaaccagttgactcagacgaggacgcacagattcaagagatggagtcaggtgagcaagcagccttcatgcaacaggtaattgggaaggatcttgcccccggatttgttatcaaggtgatcatatag

SEQ ID NO: 80937 - DNA, 1767 bp, Artificial Sequence
  derived and/or modified sequence
atgatgagcagccccgcccagcccgacctgatgtggaacctggtgccctgggtgctcttctgtgggtgttgccgcatcttcccagatggagtcgctggacgggaacagctcctggcccagcagagaatgcattcaatgattagttctgtggacgtgaagtctgaggtacccgtcggattagaacccatatcacccctcgatctccggacagatctgcgaatgatgatgccggtggtcgatcccgttgtgagggagaagcaactgcagcaagagctgttgctgattcagcagcaacagcagatacagaaacagttgctcattgcagaattccaaaaacagcatgagaacctgacaaggcagcatcaggcgcaattgcaagagcacataaaggagctgctggccattaaacaacaacaggagttactggaaaaggaacagaagttggagcaacagcgccaggaacaggaggtggagcgtcaccggcgagaacagcagctacctcctctgcggggtaaggatcgaggaagggagcgtgcagtcgcaagcaccgaggtcaagcagaagttacaggagttcctgctcagcaaatccgctaccaaggatactcctaccaacgggaagaatcactctgtgagccgccatcccaaactttggtacacagctgcccaccacacctctctggatcaatcttccccaccgctgagtggcacatctccatcttataaatacacactgcccggagcccaggacgccaaggatgactttcctctgcggaaaaccgaaagctctgtgtcttcttcttctcctggcagtggcccaagtagtcccaataacggaccgactggttctgtgactgagaacgagacatctgtgctgcccccgacaccacacgccgaacaaatggtaagtcagcagcggatcctgatccacgaggattcaatgaacttactctcactttatacaagtccgtcacttccaaacatcacactcggattgccagcagttccatctcagctcaacgcctcaaatagtttaaaagagaagcagaagtgcgagactcagaccttgcgacagggagtccccttaccaggtcaatacgggggcagcataccggccagctcaagtcacccccacgtcacactagagggtaagccaccaaatagtagtcaccaggccctcctgcagcacttgctgctaaaagaacagatgagacagcagaagctgctcgttgccggcggggtgcccctccatccacagtcaccactggctactaaggagcgtatctcccctggcattagagggactcacaagcttccacgccaccgacctcttaatagaacacagagcgctcctcttccccagtccactctggcccagttggtgatccagcagcagcaccagcagtttctggagaagcaaaagcaataccagcagcagattcacatgaataaactgctctctaagtctattgaacagctcaaacagcctgggagccatctggaggaggctgaagaggagcttcaaggcgaccaagccatgcaggaagaccgcgctccgagcagcggtaattccacgcggtccgactcttccgcatgcgtggatgacacccttggccaggttggcgccgtgaaggtgaaggaggagccggtggattccgacgaagacgcccagatccaggagatggagtccggcgagcaggcggctttcatgcagcaggtaatcgggaaggacttagcgcctggattcgtgattaaggtaattatctag

SEQ ID NO: 80938 - DNA, 1776 bp, Artificial Sequence
  derived and/or modified sequence
atgatgtcctcacctgcccagagtaggagccctgacctgatgtggaacctggttccctgggtgctgttctgcggttgctgcagaatcttccctgatggggtggccggacgcgagcaacttcttgcacagcagaggatgcacagcatgatctcaagtgttgatgttaagtcggaagtccccgtgggtctcgagcccatcagccccctggacctgcggactgatcttagaatgatgatgcccgttgtcgaccccgtagttagagaaaagcagctccagcaggaactcctgctcatccagcaacagcagcagatccagaagcaattactgatcgccgagtttcaaaagcagcacgagaatttgactcgccaacaccaggctcagcttcaggagcatatcaaagagttgctagcgatcaagcagcagcaggaactccttgagaaagaacagaagctggaacagcagcgccaggaacaagaggtagagaggcataggagggagcagcagctgccaccacttcgtggcaaggatcgtggacgtgagcgagcggttgcttccacagaggtgaagcaaaaacttcaggagtttcttttgtccaaatctgccaccaaagatacccccacaaacggcaaaaaccactctgttagtagacatccgaaactctggtatacagccgcacaccacacaagtttggaccagagctccccacctttaagcggtaccagccccagttacaagtatacgctacctggggcacaggatgccaaagatgatttccccttgcggaaaacggagtccagtgtatcctcgtcctctcccggatctgggccttccagtccgaacaatggtcccacaggctcagtgaccgaaaatgagacatccgtcctccctcccaccccccacgctgaacagatggtctcccaacaacgaatcctcattcacgaggacagcatgaacctcctaagcctgtatactagcccctcccttcctaatatcacccttgggctgccagcagtcccttctcaactaaatgcaagcaacagtctcaaggagaaacagaagtgtgaaacacagaccctgcggcaaggggtgcccttaccgggacaatacggcggatccatccccgcttcttccagccacccacatgtcaccctggagggcaagccgcctaactcttcccatcaagctctcttacaacacctcctcttgaaggagcaaatgcgccagcagaagctgttagtggcaggcggagtgcctctacaccctcagtctcccctagcgacaaaagaacggatcagccccggaatccggggtacccataagcttcccaggcaccggcctctgaaccgaacccagtcagcccctctcccccagtcgactctcgcccagctcgtgatccagcaacagcatcagcagtttttagaaaaacagaagcagtatcagcagcaaatccacatgaacaaattgctgtctaagagtattgagcagttgaaacaacccggtagtcacctcgaggaggccgaggaagagctgcagggagaccaggccatgcaggaagatcgagcacccagcagcgggaactcaacgcggagcgattcttctgcttgcgtggatgataccctggggcaggttggcgctgtgaaagtgaaggaagagccagtggattcagacgaggacgctcagatccaggagatggagtccggcgaacaggccgcattcatgcaacaggtgatcgggaaagaccttgctcctggctttgtgatcaaggtgataatctag

SEQ ID NO: 80939 - DNA, 1734 bp, Artificial Sequence
  derived and/or modified sequence
atgctgcaaacgatctacgagtcagactcttgcttttctagcgatggcgtcgcgggaagagaacagctacttgcccaacagcgcatgcacagtatgatctcaagtgtggatgtgaagtccgaggtgccagttggtctcgagccaatctcccctttagacctgagaacggacctaaggatgatgatgccggtagttgatcctgtcgtgcgcgaaaaacagctgcaacaggaactattactcatccaacagcagcagcagatacaaaagcaacttctgatagccgaatttcagaaacagcacgagaatctaacccggcagcaccaggctcagttgcaggagcacattaaactgcaacaggagctgctggctatcaaacagcaacaggagcttctggagaaggaacaaaagctagaacaacagagacaggaacaggaggttgaaagacatcgccgtgagcagcaacttcccccactccgaggcaaggacagaggtagggaaagggccgtcgcttctacagaggtcaagcagaagttacaggaattcctgctgtctaagtcagcaaccaaagacacaccgaccaatggtaagaaccactccgtgtcgagacaccccaagttgtggtacaccgcggctcatcacacctcattggaccagtcctccccacccttatcagggacgtctccgagctacaaatacaccttacccggtgctcaggatgccaaagatgatttccctctacggaagactgaatccagcgtcagttctagctctcctggatccgggcctagctcccctaataacgggccaacaggctctgtgactgaaaacgaaacatcagtgttgcctccaacaccccatgcagaacagatggtcagccagcaaagaatcctgatccacgaagatagcatgaacctgctatccctttacacgtcccccagcctacccaacattactctgggcctccccgcagtcccaagccagctgaatgccagcaattctctcaaagaaaagcaaaaatgtgagacccaaacattacgacagggtgtgccattaccaggtcaatatggcggaagcatccctgccagctctagtcatccacatgttacactggagggtaaaccacccaatagctctcatcaggctttattgcaacacctcctcctaaaggaacagatgcgacagcagaaactactggttgccggtggggtacccttacacccacagtcccctcttgcaactaaggagagaatctcccctggaatcaggggaacccacaagctacccaggcaccgccctctcaacagaacccagtctgcacctttgcctcaatctaccttagctcagctggtgatccagcagcagcatcaacagtttctggagaagcagaagcagtatcagcagcaaattcacatgaataaattgctctccaaaagcatcgagcagttaaagcaacctggcagtcacctagaggaagctgaggaagagcttcagggcgaccaggctatgcaagaagaccgggctcccagctctgggaatagcacccgctctgattcgagtgcctgtgtagacgatactttgggtcaagtcggcgctgtcaaagtcaaagaggaaccggtcgatagcgacgaggacgcccaaatacaggaaatggagtctggggagcaggctgcatttatgcagcaggtgattggaaaagatctggctcccggtttcgttattaaggtcatcatttag

SEQ ID NO: 80940 - DNA, 1767 bp, Artificial Sequence
  derived and/or modified sequence
atgatgtcgtcaccagcgcagccagaccttatgtggaatttggtcccgtgggtacttttttgcgggtgttgccgaattttccctgatggggtcgccggacgagaacaactgctggcacagcaaagaatgcatagtatgatcagctcagtggatgtcaagtctgaagtgccagtggggctggaacctatatcccctctagatctgcgcaccgacctgagaatgatgatgccggttgtagaccctgtcgtgagggagaaacagctccagcaggaattgctgctgatacagcagcaacagcaaatacagaagcagctgttaatagctgagttccaaaagcagcacgagaatctaacaagacagcatcaggcacaactgcaggaacacattaaagaactgctggctatcaagcagcagcaggagcttctagagaaggagcagaagctggaacagcagcgtcaggagcaggaggtggagcggcatcggcgagagcagcagctgccaccgctgagagggaaagacaggggcagagaacgagctgtggcaagcaccgaggttaaacagaagctgcaggagtttctgctgtctaaaagcgcaacaaaggatacaccgacaaacggcaagaaccattccgtctcaagacaccctaagttatggtacaccgccgcacatcataccagcttggaccaaagcagtcccccactctcaggaactagcccaagttacaaatacactctgccgggagcccaggacgcaaaagatgatttccctctcagaaagaccgagagcagcgttagcagttccagccctggctccggcccatccagcccgaataatggccctacaggcagcgtaaccgagaacgagacatccgtgctaccacccaccccccatgccgagcagatggtcagtcaacaaagaatcctgatacatgaggactccatgaatttacttagtctttatacctcaccttccctccctaacatcacactggggctgcctgctgtgccgtctcagttgaatgcttctaacagtctgaaagagaaacagaagtgcgagactcagaccttgagacagggcgtccctctaccaggccaatacggcggatccattccagcctcctcttcgcatcctcatgtgactctggaaggcaaacctccaaactccagtcatcaggccctgcttcagcaccttctgttgaaggagcagatgcggcagcagaaactgctcgtggcaggcggagtgccactgcacccacagagccctctggctactaaggagcggatatcacctggcatccgtggtacgcacaagctgccccgacaccgtccgctaaaccgaacccagtctgctcccttgccccagagtacactggcacagctcgtcattcaacaacagcaccagcaatttttagaaaaacagaaacagtatcagcagcagattcatatgaacaaactcctgtctaagtccattgagcagctcaagcagcccggatcgcatctggaagaggcagaggaggaactacagggcgatcaggccatgcaggaagatagggctccgagttccggcaattccacccgctcggactccagtgcctgcgtcgacgacacgttgggacaggtgggggctgtgaaggtgaaagaggagcccgtcgatagcgacgaagacgcccagattcaggaaatggagagtggagaacaagcagcgttcatgcaacaggttatcggcaaggatcttgccccaggctttgtgataaaggttataatttag

SEQ ID NO: 80941 - DNA, 1776 bp, Artificial Sequence
  derived and/or modified sequence
atgatgagcagccccgcccagagcagaagccccgacctgatgtggaacctggtgccctgggtgctgttctgcggctgctgcagaatcttccccgacggcgtggccggcagagagcagctgctggcccagcagagaatgcacagcatgatcagcagcgtggacgtgaagagcgaggtgcccgtgggcctggagcccatcagccccctggacctgagaaccgacctgagaatgatgatgcccgtggtggaccccgtggtgagagagaagcagctgcagcaggagctgctgctgatccagcagcagcagcagatccagaagcagctgctgatcgccgagttccagaagcagcacgagaacctgaccagacagcaccaggcccagctgcaggagcacatcaaggagctgctggccatcaagcagcagcaggagctgctggagaaggagcagaagctggagcagcagagacaggagcaggaggtggagagacacagaagagagcagcagctgccccccctgagaggcaaggacagaggcagagagagagccgtggccagcaccgaggtgaagcagaagctgcaggagttcctgctgagcaagagcgccaccaaggacacccccaccaacggcaagaaccacagcgtgagcagacaccccaagctgtggtacaccgccgcccaccacaccagcctggaccagagcagcccccccctgagcggcaccagccccagctacaagtacaccctgcccggcgcccaggacgccaaggacgacttccccctgagaaagaccgagagcagcgtgagcagcagcagccccggcagcggccccagcagccccaacaacggccccaccggcagcgtgaccgagaacgagaccagcgtgctgccccccaccccccacgccgagcagatggtgagccagcagagaatcctgatccacgaggacagcatgaacctgctgagcctgtacaccagccccagcctgcccaacatcaccctgggcctgcccgccgtgcccagccagctgaacgccagcaacagcctgaaggagaagcagaagtgcgagacccagaccctgagacagggcgtgcccctgcccggccagtacggcggcagcatccccgccagcagcagccacccccacgtgaccctggagggcaagccccccaacagcagccaccaggccctgctgcagcacctgctgctgaaggagcagatgagacagcagaagctgctggtggccggcggcgtgcccctgcacccccagagccccctggccaccaaggagagaatcagccccggcatcagaggcacccacaagctgcccagacacagacccctgaacagaacccagagcgcccccctgccccagagcaccctggcccagctggtgatccagcagcagcaccagcagttcctggagaagcagaagcagtaccagcagcagatccacatgaacaagctgctgagcaagagcatcgagcagctgaagcagcccggcagccacctggaggaggccgaggaggagctgcagggcgaccaggccatgcaggaggacagagcccccagcagcggcaacagcaccagaagcgacagcagcgcctgcgtggacgacaccctgggccaggtgggcgccgtgaaggtgaaggaggagcccgtggacagcgacgaggacgcccagatccaggagatggagagcggcgagcaggccgccttcatgcagcaggtgatcggcaaggacctggcccccggcttcgtgatcaaggtgatcatctag

SEQ ID NO: 80942 - DNA, 1734 bp, Artificial Sequence
  derived and/or modified sequence
atgctgcagaccatctacgagagcgacagctgcttcagcagcgacggcgtggccggcagagagcagctgctggcccagcagagaatgcacagcatgatcagcagcgtggacgtgaagagcgaggtgcccgtgggcctggagcccatcagccccctggacctgagaaccgacctgagaatgatgatgcccgtggtggaccccgtggtgagagagaagcagctgcagcaggagctgctgctgatccagcagcagcagcagatccagaagcagctgctgatcgccgagttccagaagcagcacgagaacctgaccagacagcaccaggcccagctgcaggagcacatcaagctgcagcaggagctgctggccatcaagcagcagcaggagctgctggagaaggagcagaagctggagcagcagagacaggagcaggaggtggagagacacagaagagagcagcagctgccccccctgagaggcaaggacagaggcagagagagagccgtggccagcaccgaggtgaagcagaagctgcaggagttcctgctgagcaagagcgccaccaaggacacccccaccaacggcaagaaccacagcgtgagcagacaccccaagctgtggtacaccgccgcccaccacaccagcctggaccagagcagcccccccctgagcggcaccagccccagctacaagtacaccctgcccggcgcccaggacgccaaggacgacttccccctgagaaagaccgagagcagcgtgagcagcagcagccccggcagcggccccagcagccccaacaacggccccaccggcagcgtgaccgagaacgagaccagcgtgctgccccccaccccccacgccgagcagatggtgagccagcagagaatcctgatccacgaggacagcatgaacctgctgagcctgtacaccagccccagcctgcccaacatcaccctgggcctgcccgccgtgcccagccagctgaacgccagcaacagcctgaaggagaagcagaagtgcgagacccagaccctgagacagggcgtgcccctgcccggccagtacggcggcagcatccccgccagcagcagccacccccacgtgaccctggagggcaagccccccaacagcagccaccaggccctgctgcagcacctgctgctgaaggagcagatgagacagcagaagctgctggtggccggcggcgtgcccctgcacccccagagccccctggccaccaaggagagaatcagccccggcatcagaggcacccacaagctgcccagacacagacccctgaacagaacccagagcgcccccctgccccagagcaccctggcccagctggtgatccagcagcagcaccagcagttcctggagaagcagaagcagtaccagcagcagatccacatgaacaagctgctgagcaagagcatcgagcagctgaagcagcccggcagccacctggaggaggccgaggaggagctgcagggcgaccaggccatgcaggaggacagagcccccagcagcggcaacagcaccagaagcgacagcagcgcctgcgtggacgacaccctgggccaggtgggcgccgtgaaggtgaaggaggagcccgtggacagcgacgaggacgcccagatccaggagatggagagcggcgagcaggccgccttcatgcagcaggtgatcggcaaggacctggcccccggcttcgtgatcaaggtgatcatctag

SEQ ID NO: 80943 - DNA, 1767 bp, Artificial Sequence
  derived and/or modified sequence
atgatgagcagccccgcccagcccgacctgatgtggaacctggtgccctgggtgctgttctgcggctgctgcagaatcttccccgacggcgtggccggcagagagcagctgctggcccagcagagaatgcacagcatgatcagcagcgtggacgtgaagagcgaggtgcccgtgggcctggagcccatcagccccctggacctgagaaccgacctgagaatgatgatgcccgtggtggaccccgtggtgagagagaagcagctgcagcaggagctgctgctgatccagcagcagcagcagatccagaagcagctgctgatcgccgagttccagaagcagcacgagaacctgaccagacagcaccaggcccagctgcaggagcacatcaaggagctgctggccatcaagcagcagcaggagctgctggagaaggagcagaagctggagcagcagagacaggagcaggaggtggagagacacagaagagagcagcagctgccccccctgagaggcaaggacagaggcagagagagagccgtggccagcaccgaggtgaagcagaagctgcaggagttcctgctgagcaagagcgccaccaaggacacccccaccaacggcaagaaccacagcgtgagcagacaccccaagctgtggtacaccgccgcccaccacaccagcctggaccagagcagcccccccctgagcggcaccagccccagctacaagtacaccctgcccggcgcccaggacgccaaggacgacttccccctgagaaagaccgagagcagcgtgagcagcagcagccccggcagcggccccagcagccccaacaacggccccaccggcagcgtgaccgagaacgagaccagcgtgctgccccccaccccccacgccgagcagatggtgagccagcagagaatcctgatccacgaggacagcatgaacctgctgagcctgtacaccagccccagcctgcccaacatcaccctgggcctgcccgccgtgcccagccagctgaacgccagcaacagcctgaaggagaagcagaagtgcgagacccagaccctgagacagggcgtgcccctgcccggccagtacggcggcagcatccccgccagcagcagccacccccacgtgaccctggagggcaagccccccaacagcagccaccaggccctgctgcagcacctgctgctgaaggagcagatgagacagcagaagctgctggtggccggcggcgtgcccctgcacccccagagccccctggccaccaaggagagaatcagccccggcatcagaggcacccacaagctgcccagacacagacccctgaacagaacccagagcgcccccctgccccagagcaccctggcccagctggtgatccagcagcagcaccagcagttcctggagaagcagaagcagtaccagcagcagatccacatgaacaagctgctgagcaagagcatcgagcagctgaagcagcccggcagccacctggaggaggccgaggaggagctgcagggcgaccaggccatgcaggaggacagagcccccagcagcggcaacagcaccagaagcgacagcagcgcctgcgtggacgacaccctgggccaggtgggcgccgtgaaggtgaaggaggagcccgtggacagcgacgaggacgcccagatccaggagatggagagcggcgagcaggccgccttcatgcagcaggtgatcggcaaggacctggcccccggcttcgtgatcaaggtgatcatctag

SEQ ID NO: 80944 - protein, 591 aa, Artificial Sequence
  derived and/or modified sequence
MMSSPAQSRSPDLMWNLVPWVLFCGCCRIFPDGVAGREQLLAQQRMHSMISSVDVKSEVPVGLEPISPLDLRTDLRMMMPVVDPVVREKQLQQELLLIQQQQQIQKQLLIAEFQKQHENLTRQHQAQLQEHIKELLAIKQQQELLEKEQKLEQQRQEQEVERHRREQQLPPLRGKDRGRERAVASTEVKQKLQEFLLSKSATKDTPTNGKNHSVSRHPKLWYTAAHHTSLDQSSPPLSGTSPSYKYTLPGAQDAKDDFPLRKTESSVSSSSPGSGPSSPNNGPTGSVTENETSVLPPTPHAEQMVSQQRILIHEDSMNLLSLYTSPSLPNITLGLPAVPSQLNASNSLKEKQKCETQTLRQGVPLPGQYGGSIPASSSHPHVTLEGKPPNSSHQALLQHLLLKEQMRQQKLLVAGGVPLHPQSPLATKERISPGIRGTHKLPRHRPLNRTQSAPLPQSTLAQLVIQQQHQQFLEKQKQYQQQIHMNKLLSKSIEQLKQPGSHLEEAEEELQGDQAMQEDRAPSSGNSTRSDSSACVDDTLGQVGAVKVKEEPVDSDEDAQIQEMESGEQAAFMQQVIGKDLAPGFVIKVII

SEQ ID NO: 80945 - protein, 546 aa, Artificial Sequence
  derived and/or modified sequence
MHSMISSVDVKSEVPVGLEPISPLDLRTDLRMMMPVVDPVVREKQLQQELLLIQQQQQIQKQLLIAEFQKQHENLTRQHQAQLQEHIKELLAIKQQQELLEKEQKLEQQRQEQEVERHRREQQLPPLRGKDRGRERAVASTEVKQKLQEFLLSKSATKDTPTNGKNHSVSRHPKLWYTAAHHTSLDQSSPPLSGTSPSYKYTLPGAQDAKDDFPLRKTESSVSSSSPGSGPSSPNNGPTGSVTENETSVLPPTPHAEQMVSQQRILIHEDSMNLLSLYTSPSLPNITLGLPAVPSQLNASNSLKEKQKCETQTLRQGVPLPGQYGGSIPASSSHPHVTLEGKPPNSSHQALLQHLLLKEQMRQQKLLVAGGVPLHPQSPLATKERISPGIRGTHKLPRHRPLNRTQSAPLPQSTLAQLVIQQQHQQFLEKQKQYQQQIHMNKLLSKSIEQLKQPGSHLEEAEEELQGDQAMQEDRAPSSGNSTRSDSSACVDDTLGQVGAVKVKEEPVDSDEDAQIQEMESGEQAAFMQQVIGKDLAPGFVIKVII

SEQ ID NO: 80946 - DNA, 1641 bp, Artificial Sequence
  derived and/or modified sequence
atgcattctatgatttcatcagtggacgttaaatcagaagtgcctgtagggctagaaccaataagccctctagacctgagaaccgacctgcgaatgatgatgccggtggttgaccccgtggtgcgcgaaaaacagctgcagcaagaactcctgctcatccagcagcagcaacagatacaaaagcagctgttgatagctgaatttcaaaaacagcacgagaacctcacccgccaacatcaggcccaactccaagaacatataaaggagttactggcgatcaaacagcaacaagagctcctggaaaaagagcagaagttggagcagcagaggcaggaacaggaggtcgagcgacataggcgggagcagcaactgcctcccttgagagggaaagatcgaggccgcgagcgggctgtggcctctaccgaagtgaagcagaagttgcaggaatttctactgtctaagtcggctactaaggatacccctacgaatggcaagaatcattcggtaagtcgacatccaaagctctggtatactgccgctcatcacacgagcctcgatcagtccagccctccactgagtgggacctctccctcttacaaatacacactgcctggcgcccaggatgctaaggacgatttccctctgcgaaagaccgagagttccgtctcatctagttctcctggctccgggccgtcatcacccaacaatgggcccactggttccgtgactgagaacgagacaagtgtgctgccgccgactccccacgcggagcagatggtaagccagcagcgaatcctgatccacgaagatagtatgaacctgttgtcgctgtatacctccccctctttacctaacattacgctgggattacccgccgtcccaagtcagcttaatgctagcaactccctcaaagagaaacagaagtgcgagacccagaccctcaggcagggagtgcccttgccgggccagtacggcggttccatcccggcctcatcttcccacccgcatgtgaccctggaaggcaagccaccaaactcttcgcaccaagctctgctacagcacttactcctgaaggagcagatgcgacaacaaaaattactggtcgctggcggcgtacccctgcatccgcagagccccctggccacaaaagagaggattagccctggcatacgcggcactcataaactccctcgacataggccactgaatcgtacacagtcagcccctcttccccagtcaacccttgcacagctggtgattcagcaacagcatcaacagttcctggagaagcagaagcagtatcaacagcagatacatatgaacaaactgctctctaagagtatcgaacagttgaagcagccagggagccatctggaggaagccgaagaggaactgcaaggagaccaggccatgcaggaggatagggctccttcctctgggaattctactcggtctgactcctcagcctgcgtggatgacactttaggtcaagttggggccgtgaaggtaaaagaggaacctgtggactcagacgaggatgcgcagatacaggaaatggagagtggcgagcaggcagctttcatgcaacaagtgattggcaaggacctggcacccgggttcgttatcaaagttatcatatag

SEQ ID NO: 80947 - DNA, 1641 bp, Artificial Sequence
  derived and/or modified sequence
atgcacagcatgatcagctctgtggatgtgaagtctgaggtgcctgtgggcctggagcccatcagccccctggacctgaggacagacctgaggatgatgatgcctgtggtggaccctgtggtgcgggagaagcagctgcagcaggagctgctgctgatccagcagcagcagcagatccagaagcagctgctgattgctgagttccagaagcagcacgagaacctgacccggcagcaccaggcccagctgcaggagcacatcaaggagctgctggccatcaagcagcagcaggagctgctggagaaggagcagaagctggagcagcagaggcaggagcaggaggtggagcggcacagaagagagcagcagctgccccccctgcggggcaaggaccggggccgggagagagctgtggccagcacagaggtgaagcagaagctgcaggagttcctgctgagcaagagcgccaccaaggacacccccaccaacgggaagaaccacagcgtgagccgccaccccaagctgtggtacacagctgcccaccacaccagcctggaccagagcagcccccccctgagcggcaccagccccagctacaagtacaccctgcccggggcccaggatgccaaggatgacttccccctgaggaagacagagagctctgtgagcagcagcagccctggcagcggccccagcagccccaacaacggccccactggatctgtgacagaaaatgagacctctgtgctgccccccacccctcatgctgagcagatggtgtcccagcagaggatcctgattcatgaagattccatgaacctgctgagcctgtacaccagccccagcctgcccaacatcaccctgggcctgcctgctgtgcccagccagctgaatgccagcaacagcctgaaggagaagcagaagtgtgagacccagaccctgcggcagggcgtgcccctgcccggccagtatggaggcagcatcccagccagcagcagccacccccacgtgaccctggagggcaagccacccaacagcagccaccaggccctgctgcagcacctgctgctgaaggagcagatgaggcagcagaagctgctggtggccggcggcgtgcccctgcacccccagagccccctggccaccaaggagcgcatcagccctggcatccggggcacccacaagctgcccaggcaccggcccctgaacagaacccagagcgcccccctgccccagagcaccctggcccagctggtgatccagcagcagcaccagcagttcctggagaagcagaagcagtaccagcagcagatccacatgaacaagctgctgagcaagagcattgagcagctgaagcagcccggcagccacctggaggaggccgaggaggagctgcagggcgaccaggccatgcaggaggaccgggcccccagcagcggcaacagcaccaggagtgacagcagcgcctgtgtggatgacaccctgggccaggtgggcgctgtgaaggtgaaggaggagcctgtggacagtgatgaagatgcccagatccaggagatggagagcggggagcaggccgccttcatgcagcaggtgattggcaaggacctggcccctggcttcgtcatcaaggtgatcatctag

SEQ ID NO: 80948 - DNA, 1641 bp, Artificial Sequence
  derived and/or modified sequence
atgcacagcatgatcagcagcgtggacgtgaagagcgaggtgcccgtggggttagagcctatctccccactcgatctccggacggatctcagaatgatgatgcctgtagttgaccctgttgtgagagaaaaacaactgcagcaggagctgctcctgattcaacaacagcagcagatacagaagcaactgctgatcgccgagtttcagaaacagcatgagaatcttaccaggcagcatcaagctcagctacaggaacacatcaaggagctgctggccattaaacagcagcaggagctgttagagaaagaacaaaaattggagcagcagagacaggaacaggaggtcgagcggcatcgtcgcgagcagcagctacctccgctaaggggcaaggaccggggccgcgaaagggctgtcgcctctactgaggtgaagcagaagttgcaggagtttttgcttagcaagtccgcaacaaaagacactccgactaacggcaagaatcattccgtttccaggcaccctaagctctggtacacagcagctcaccacaccagcctcgatcagagctcaccccccctgagcggcacttctccaagttacaaatataccctgccgggcgctcaagacgccaaagacgattttccactcaggaagactgagtcttctgttagcagctctagcccagggagcggcccatcaagtcctaataacgggccaactggatccgttaccgagaacgagaccagtgtgctgcctccaactccgcacgcagagcagatggtcagtcagcagcgcatcttgattcatgaggattctatgaatcttctgagcctatacacctcgccaagtctaccgaacatcactctcgggctgcccgctgttccttcgcagctaaatgccagcaacagtttgaaggagaagcaaaagtgcgaaacccagacactgcgacaaggagtgccactgcctggacagtatggcggctccattccagcatccagctctcatccacacgtgacactggaggggaaaccacccaattcatctcatcaggcacttctgcagcacctgctcctgaaggagcagatgaggcagcagaaattgttggtggctggaggcgtcccactgcatccccaatcccctcttgctactaaggaacgtatcagccccgggattagggggactcataagttgccacggcacagacctctgaacagaacccaatctgcacctttgcctcagtcaacactcgcccagctggtgatacaacagcagcatcaacagttccttgagaaacagaagcagtaccagcagcagatacacatgaacaaactcctgtccaagagtattgaacagctgaagcagcccggcagccatttagaagaggcagaggaagaactgcagggagaccaggccatgcaggaagaccgcgccccgtctagcggcaattccacacggtcggattcatctgcatgtgtggatgacacacttggacaggtcggagccgtcaaggtaaaggaggaaccggttgattccgacgaagacgcccagattcaggagatggagagcggtgagcaggccgcatttatgcagcaggtcatagggaaggacttagcgcccgggttcgttattaaggtcatcatctag

SEQ ID NO: 80949 - DNA, 1641 bp, Artificial Sequence
  derived and/or modified sequence
atgcactccatgatctcctccgttgatgtgaagagcgaagtccccgtgggattagaaccaatctctccccttgacctccgaaccgaccttcggatgatgatgccggtggtcgatcctgtggtgcgggaaaagcagctgcagcaggaactcttattaatccagcagcagcagcagatccagaagcagcttcttatcgccgaattccagaaacagcacgagaacctcacaaggcagcaccaggcccagctgcaagaacatataaaggaactcctcgctattaagcagcaacaggaactgctcgaaaaagaacagaagctggaacagcagcgccaggaacaggaagtagagagacatagaagggaacaacagctgccgcctcttcgcggaaaggacagagggagagagcgagcagtggccagtaccgaagtgaaacagaagctgcaagaattcctcctgtctaagtccgcaacaaaggacacccctaccaacggcaagaatcacagtgtgtctcgccacccgaagttgtggtacactgccgcacaccacacttccctcgaccaatcctcaccacccttaagtgggaccagcccttcttacaaatatacgctgccaggtgcgcaggatgcaaaggacgactttccactgcgcaagacggagtcttccgtctcttcctccagtcccggaagcggaccttcttctcctaataacggcccaacgggaagcgtcaccgagaatgagacctctgtcctcccccctacaccgcacgctgaacagatggtgtcccaacagaggatcctgatccatgaagacagtatgaaccttctgtccttgtatacgtcgcccagcttgcctaacattacattgggtctgcctgcggtacctagtcagctgaatgcctccaactccctgaaagagaagcagaagtgcgaaacccagactctgcgacaaggtgtccctctccctggtcaatacggaggatccatcccagcgtccagttcccacccacacgtgacacttgaagggaaacctcctaacagtagccaccaggctttgctccagcatctattgcttaaggagcagatgcgacagcaaaagctgcttgttgcagggggtgtgcccttgcatccacagagccctctggctaccaaagaaagaataagcccaggcatcagaggtacacataaactacctagacacagaccgctcaaccgtacccagagcgccccactgccacaaagcacactcgctcagttagtgatccaacagcagcaccagcagtttctggagaagcaaaaacagtatcagcagcaaatccatatgaataagctcctgtctaaatccattgagcagctgaagcagccaggctcccatctggaggaggctgaggaggagttacagggagatcaggcaatgcaagaagatcgggctccaagttctggaaacagcactcgctctgactcatccgcttgcgtggatgacacgctggggcaggtgggcgctgtaaaagtcaaagaagaacccgttgacagcgacgaggacgcgcagattcaggagatggagagtggagagcaagctgcatttatgcagcaggtcatcggaaaagatctcgcgccaggttttgtgataaaagtgatcatttag

SEQ ID NO: 80950 - DNA, 1641 bp, Artificial Sequence
  derived and/or modified sequence
atgcacagcatgatcagcagcgtggacgtgaagagcgaggtgcccgtgggcctggagcccatcagccccctggacctgagaaccgacctgagaatgatgatgcccgtggtggaccccgtggtgagagagaagcagctgcagcaggagctgctgctgatccagcagcagcagcagatccagaagcagctgctgatcgccgagttccagaagcagcacgagaacctgaccagacagcaccaggcccagctgcaggagcacatcaaggagctgctggccatcaagcagcagcaggagctgctggagaaggagcagaagctggagcagcagagacaggagcaggaggtggagagacacagaagagagcagcagctgccccccctgagaggcaaggacagaggcagagagagagccgtggccagcaccgaggtgaagcagaagctgcaggagttcctgctgagcaagagcgccaccaaggacacccccaccaacggcaagaaccacagcgtgagcagacaccccaagctgtggtacaccgccgcccaccacaccagcctggaccagagcagcccccccctgagcggcaccagccccagctacaagtacaccctgcccggcgcccaggacgccaaggacgacttccccctgagaaagaccgagagcagcgtgagcagcagcagccccggcagcggccccagcagccccaacaacggccccaccggcagcgtgaccgagaacgagaccagcgtgctgccccccaccccccacgccgagcagatggtgagccagcagagaatcctgatccacgaggacagcatgaacctgctgagcctgtacaccagccccagcctgcccaacatcaccctgggcctgcccgccgtgcccagccagctgaacgccagcaacagcctgaaggagaagcagaagtgcgagacccagaccctgagacagggcgtgcccctgcccggccagtacggcggcagcatccccgccagcagcagccacccccacgtgaccctggagggcaagccccccaacagcagccaccaggccctgctgcagcacctgctgctgaaggagcagatgagacagcagaagctgctggtggccggcggcgtgcccctgcacccccagagccccctggccaccaaggagagaatcagccccggcatcagaggcacccacaagctgcccagacacagacccctgaacagaacccagagcgcccccctgccccagagcaccctggcccagctggtgatccagcagcagcaccagcagttcctggagaagcagaagcagtaccagcagcagatccacatgaacaagctgctgagcaagagcatcgagcagctgaagcagcccggcagccacctggaggaggccgaggaggagctgcagggcgaccaggccatgcaggaggacagagcccccagcagcggcaacagcaccagaagcgacagcagcgcctgcgtggacgacaccctgggccaggtgggcgccgtgaaggtgaaggaggagcccgtggacagcgacgaggacgcccagatccaggagatggagagcggcgagcaggccgccttcatgcagcaggtgatcggcaaggacctggcccccggcttcgtgatcaaggtgatcatctag

SEQ ID NO: 80951 - protein, 577 aa, Artificial Sequence
  derived and/or modified sequence
MLQTIYESDSCFSSDGVAGREQLLAQQRMHSMISSVDVKSEVPVGLEPISPLDLRTDLRMMMPVVDPVVREKQLQQELLLIQQQQQIQKQLLIAEFQKQHENLTRQHQAQLQEHIKLQQELLAIKQQQELLEKEQKLEQQRQEQEVERHRREQQLPPLRGKDRGRERAVASTEVKQKLQEFLLSKSATKDTPTNGKNHSVSRHPKLWYTAAHHTSLDQSSPPLSGTSPSYKYTLPGAQDAKDDFPLRKTESSVSSSSPGSGPSSPNNGPTGSVTENETSVLPPTPHAEQMVSQQRILIHEDSMNLLSLYTSPSLPNITLGLPAVPSQLNASNSLKEKQKCETQTLRQGVPLPGQYGGSIPASSSHPHVTLEGKPPNSSHQALLQHLLLKEQMRQQKLLVAGGVPLHPQSPLATKERISPGIRGTHKLPRHRPLNRTQSAPLPQSTLAQLVIQQQHQQFLEKQKQYQQQIHMNKLLSKSIEQLKQPGSHLEEAEEELQGDQAMQEDRAPSSGNSTRSDSSACVDDTLGQVGAVKVKEEPVDSDEDAQIQEMESGEQAAFMQQVIGKDLAPGFVIKVII

SEQ ID NO: 80952 - DNA, 447 bp, Artificial Sequence
  derived and/or modified sequence
atgcactccatgatctcaagtgtagatgttaaaagtgaggtgcctgtgggccttgagcccatctcccccctagatttacgaactgatctaaggatgatgatgcctgtggtcgatccagtggtccgggaaaaacagctgcagcaggagttgctgctcatccaacaacaacaacagatccagaagcaacttcttattgccgagtttcagaagcaacatgagaatttaacccgtcagcaccaagcccagctgcaggagcacatcaagctgcagcaggaactgctagcaattaagcagcagcaagagctgctcgaaaaggaacagaagttagagcaacagcggcaggagcaggaagtggagaggcacagaagagagcagcagctgccacctctgcgcggtaaagaccgcggccgagaaagagccgtggcatccacagaagtcaagcaatag

SEQ ID NO: 80953 - DNA, 417 bp, Artificial Sequence
  derived and/or modified sequence
atgcattcaatgatctctagcgtggacgttaaatccgaagtgcccgttggccttgagccaatatccccattagacttacgtactgacctcagaatgatgatgcccgtggtcgacccagtcgttcgcgagaagcagctgcagcaggagcttctgctgatccagcagcagcagcagattcaaaaacagctcctgatcgcagaatttcagaagcagcatgaaaaccttacaagacagcaccaagcccagttgcaggagcacattaagctgcagcaggaactcctcgccatcaaacagcagcaggaactactggaaaaagaacaaaaactcgaacagcagcgtcaggaacaggaggtagagcgccatagacgggagcaacagctcccgccacttcgcggcaaagacagaggcagagaatag

SEQ ID NO: 80954 - DNA, 447 bp, Artificial Sequence
  derived and/or modified sequence
atgcacagcatgatcagctctgtggatgtgaagtctgaggtgcctgtgggcctggagcccatcagccccctggacctgaggacagacctgaggatgatgatgcctgtggtggaccctgtggtgcgggagaagcagctgcagcaggagctgctgctgatccagcagcagcagcagatccagaagcagctgctgattgctgagttccagaagcagcacgagaacctgacccggcagcaccaggcccagctgcaggagcacatcaagctgcagcaggagctgctggccatcaagcagcagcaggagctgctggagaaggagcagaagctggagcagcagaggcaggagcaggaggtggagcggcaccggcgggagcagcagctgccccccctgcggggcaaggaccggggccgggagagagctgtggccagcacagaggtgaagcagtag

SEQ ID NO: 80955 - DNA, 417 bp, Artificial Sequence
  derived and/or modified sequence
atgcacagcatgatcagctctgtggatgtgaagtctgaggtgcctgtgggcctggagcccatcagccccctggacctgaggacagacctgaggatgatgatgcctgtggtggaccctgtggtgcgggagaagcagctgcagcaggagctgctgctgatccagcagcagcagcagatccagaagcagctgctgattgctgagttccagaagcagcacgagaacctgacccggcagcaccaggcccagctgcaggagcacatcaagctgcagcaggagctgctggccatcaagcagcagcaggagctgctggagaaggagcagaagctggagcagcagaggcaggagcaggaggtggagcggcaccggcgggagcagcagctgccccccctgcggggcaaggaccggggccgggagtag

SEQ ID NO: 80956 - DNA, 447 bp, Artificial Sequence
  derived and/or modified sequence
atgcacagcatgatcagcagcgtggacgtgaagagcgaggtgcccgtgggtcttgaacctatctctccactggacctccgaacggacctgaggatgatgatgccagtggtcgacccggtcgtgcgcgagaaacaactgcaacaggaactgctgcttattcagcagcaacaacagatccaaaagcagctgctgattgcagagttccagaagcagcacgagaatctgactcggcagcatcaggcccagcttcaggagcatataaagctccagcaggaactgttagctatcaagcagcagcaggagttactagagaaagagcagaaactggagcagcagaggcaggaacaagaggtcgaaagacacagacgggagcaacagttgcccccactgcggggcaaggatcgaggacgagaaagggcagtcgcctctacagaagtaaagcagtag

SEQ ID NO: 80957 - DNA, 417 bp, Artificial Sequence
  derived and/or modified sequence
atgcacagcatgatcagcagcgtggacgtgaagagcgaggtgcccgtcggcctcgaaccaatcagtccactggacctccggactgatctccgcatgatgatgcctgtagttgatccagtggttagagagaagcagctccaacaagaactgctgctgattcagcagcagcagcagatacaaaaacaactgctgattgctgaattccagaagcaacacgagaatctgacacggcagcatcaggctcagcttcaggaacacatcaaactgcagcaggaactgttggctattaagcagcagcaggaactgctggaaaaagaacagaagcttgaacagcaacgtcaggagcaggaggttgagaggcaccggagagagcaacagctaccacctctcagagggaaagacagaggaagagaatag

SEQ ID NO: 80958 - DNA, 447 bp, Artificial Sequence
  derived and/or modified sequence
atgcattcaatgatcagctctgtcgacgtcaaaagcgaagtgcccgtcggccttgagcccattagccctctggacttaaggacagacctaaggatgatgatgccagtcgttgatccggtggtcagggagaagcaactacagcaagagttattgctcattcaacagcaacagcagatacagaagcagctgctgatcgctgaattccagaagcagcatgaaaacttaacacgccagcatcaggcgcagttgcaggagcacattaagctgcaacaggaactccttgccataaagcagcagcaggagctcctcgaaaaagaacaaaagctagaacagcaacggcaagagcaggaggttgagcgacatagaagagagcagcagctccctccactgcggggaaaagacaggggccgagagcgtgctgtcgcatccacagaggtgaagcagtag

SEQ ID NO: 80959 - DNA, 417 bp, Artificial Sequence
  derived and/or modified sequence
atgcatagcatgatttccagcgtggacgtaaaatccgaggtgcctgttgggctggaacccattagccctctggacctgagaactgacttgaggatgatgatgcctgttgtggacccggtcgtgagagaaaagcagcttcagcaggaactcctgctgattcagcaacagcagcagattcagaaacagctcctgatcgccgaatttcagaagcagcatgaaaacttgacacggcagcaccaggcacagttacaggagcatattaagctccagcaggaattattagctattaagcaacagcaagaattgctcgaaaaggaacagaagctggagcagcaacggcaggagcaagaggtcgagcgccaccggagagagcagcaactgcctcctctgaggggcaaagatcggggacgtgagtag

SEQ ID NO: 80960 - DNA, 447 bp, Artificial Sequence
  derived and/or modified sequence
atgcacagcatgatcagcagcgtggacgtgaagagcgaggtgcccgtgggcctggagcccatcagccccctggacctgagaaccgacctgagaatgatgatgcccgtggtggaccccgtggtgagagagaagcagctgcagcaggagctgctgctgatccagcagcagcagcagatccagaagcagctgctgatcgccgagttccagaagcagcacgagaacctgaccagacagcaccaggcccagctgcaggagcacatcaagctgcagcaggagctgctggccatcaagcagcagcaggagctgctggagaaggagcagaagctggagcagcagagacaggagcaggaggtggagagacacagaagagagcagcagctgccccccctgagaggcaaggacagaggcagagagagagccgtggccagcaccgaggtgaagcagtag

SEQ ID NO: 80961 - DNA, 417 bp, Artificial Sequence
  derived and/or modified sequence
atgcacagcatgatcagcagcgtggacgtgaagagcgaggtgcccgtgggcctggagcccatcagccccctggacctgagaaccgacctgagaatgatgatgcccgtggtggaccccgtggtgagagagaagcagctgcagcaggagctgctgctgatccagcagcagcagcagatccagaagcagctgctgatcgccgagttccagaagcagcacgagaacctgaccagacagcaccaggcccagctgcaggagcacatcaagctgcagcaggagctgctggccatcaagcagcagcaggagctgctggagaaggagcagaagctggagcagcagagacaggagcaggaggtggagagacacagaagagagcagcagctgccccccctgagaggcaaggacagaggcagagagtag

SEQ ID NO: 80962 - DNA, 1542 bp, Artificial Sequence
  derived and/or modified sequence
atgatgatgccagtagtggacccggtggtccgagaaaagcagttgcagcaagagctgctgctgattcaacagcagcagcagatccagaaacagttactgatcgctgagttccagaagcagcacgaaaacctgactcggcagcaccaagcccagttgcaggaacatatcaaagagttgttggcaataaagcagcagcaggaattgctcgagaaagagcaaaagctagaacagcaaagacaagaacaagaggtggagcgccatcggagggaacagcaattgccgcccctgcgaggtaaggaccggggcagggagcgcgctgtggcgtccactgaggtgaagcaaaagctgcaggaattcctattatctaagtcagccactaaggacactccgaccaatggtaagaatcactctgtaagccgacatccaaagctgtgggccgcccaccacactagcttggaccagagcagtccccccctctcaggaacatctccgagctataaatacaccctacctggggcccaggacgcaaaagacgatttccccctgcgcaagaccgagtctagcgtttcgtcttcatctcccggatcaggcccctcatccccaaataacggtcccacgggaagtgtgacagagaatgagacaagcgttttgccacccacaccccacgccgagcagatggtgagtcaacagagaattctcattcacgaagattccatgaatctgctgtctctgtatacttctcccagcttacccaacataactttgggtttaccagcagtcccctctcagctcaacgcaagcaactccctgaaggaaaagcagaagtgcgaaactcagacgttgaggcagggtgtgcccctgccgggacagtatgggggctcaattcctgccagtagctcacacccacatgtcaccctggagggtaaacctcctaattcttctcatcaggcgctgctgcaacacctgctgctgaaggaacagatgcgacagcagaaattgctcgttgctggtggagtcccccttcatccacagagccccctggcaactaaagagaggataagtcccggaattcgcgggactcataagcttccccgccaccgccccctcaaccgcacgcagagtgccccgttgcctcagagtactctcgctcagctggtgattcaacagcagcatcagcagtttctcgagaagcaaaagcagtatcaacagcagatacacatgaataaactgctgtctaaatccatagagcagttaaagcagcctggcagccatttggaggaagctgaggaagagttgcagggcgatcaagctatgcaggaggaccgggccccgtcaagcggaaattctacacgcagcgactcaagtgcttgcgtggatgacaccttagggcaggtcggggctgtgaaagttaaagaggaaccagtcgacagcgacgaggacgcccaaattcaagagatggaatctggtgaacaagcggcctttatgcagcaggtaataggcaaggatttggctcccggatttgtgatcaaggtgattatatag

SEQ ID NO: 80963 - DNA, 1542 bp, Artificial Sequence
  derived and/or modified sequence
atgatgatgcctgtggtggaccctgtggtgcgggagaagcagctgcagcaggagctgctgctgatccagcagcagcagcagatccagaagcagctgctgattgctgagttccagaagcagcacgagaacctgacccggcagcaccaggcccagctgcaggagcacatcaaggagctgctggccatcaagcagcagcaggagctgctggagaaggagcagaagctggagcagcagaggcaggagcaggaggtggagcggcaccggcgggagcagcagctgccccccctgcggggcaaggaccggggccgggagagagctgtggccagcacagaggtgaagcagaagctgcaggagttcctgctgagcaagagcgccaccaaggacacccccaccaacgggaagaaccacagcgtgagccgccaccccaagctgtgggccgcccaccacaccagcctggaccagagcagcccccccctgagcggcaccagccccagctacaagtacaccctgcccggggcccaggatgccaaggatgacttccccctgaggaagacagagagctctgtgagcagcagcagccctggcagcggccccagcagccccaacaacggccccaccggctctgtgacagaaaatgagacctctgtgctgccccccacccctcatgctgagcagatggtgtcccagcagaggatcctgattcatgaggacagcatgaacctgctgagcctgtacaccagccccagcctgcccaacatcaccctgggcctgcctgctgtgcccagccagctgaatgccagcaacagcctgaaggagaagcagaagtgtgagacccagaccctgcggcagggcgtgcccctgcccggccagtatggaggcagcatcccagccagcagcagccacccccacgtgaccctggagggcaagccacccaacagcagccaccaggccctgctgcagcacctgctgctgaaggagcagatgaggcagcagaagctgctggtggccggcggcgtgcccctgcacccccagagccccctggccaccaaggagcgcatcagccctggcatccggggcacccacaagctgcccaggcaccggcccctgaacagaacccagagcgcccccctgccccagagcaccctggcccagctggtgatccagcagcagcaccagcagttcctggagaagcagaagcagtaccagcagcagatccacatgaacaagctgctgagcaagagcattgagcagctgaagcagcccggcagccacctggaggaggccgaggaggagctgcagggcgaccaggccatgcaggaggaccgggcccccagcagcggcaacagcaccaggagtgacagcagcgcctgtgtggatgacaccctgggccaggtgggcgctgtgaaggtgaaggaggagcctgtggacagtgatgaagatgcccagatccaggagatggagagcggggagcaggccgccttcatgcagcaggtgattggcaaggacctggcccctggctttgtgatcaaggtgatcatctag

SEQ ID NO: 80964 - DNA, 1542 bp, Artificial Sequence
  derived and/or modified sequence
atgatgatgcccgtggtggaccccgtggtgcgggagaagcagctgcaacaagagctgctgctcatccagcaacaacagcaaattcagaaacagctcttgattgcagaatttcaaaaacagcacgaaaatttgacacgccagcatcaggcgcagcttcaggagcacatcaaggaactgctggccataaagcagcagcaagaactcctcgagaaagaacaaaaactggagcagcagcggcaggagcaggaggtcgaaaggcaccggcgtgagcagcagctccccccacttcggggaaaggaccggggccgggagagggccgtggcaagtacagaggtaaaacagaagctgcaggagtttttactgagcaagagcgctactaaggatacacctaccaacgggaagaatcattccgtatcccgacacccaaaactgtgggccgcgcaccatacctcgcttgaccagtcatctccgcctctctccgggacaagtccatcatacaagtatactctgcctggtgcacaggatgcaaaagatgattttcccctgcgcaaaaccgagtctagcgtctcctcttcctcccccggctctggcccttcaagtccaaacaatggccccacgggatctgtgacagagaacgaaacatcagttttacccccgacccctcacgcagagcagatggtgtctcaacagaggatcctgattcacgaggattcaatgaatttgctgtccttgtacactagcccttcccttccaaatatcaccctaggcttgccggccgtaccctcacagctgaacgcctccaacagtcttaaggagaaacagaaatgcgaaacccagaccctgaggcagggagtgcctctcccagggcagtacggcggaagcatacctgcctcgagctcacacccgcacgtaacgttagaaggtaagccaccaaactcttcccaccaggcgctgctccagcacctcctcctgaaagagcagatgagacagcagaaattacttgtggcaggtggcgtgcccctgcaccctcagagccctctcgccacgaaagagcggatttcgcctggcataagaggcactcataagctgcctcgtcaccggcctctgaatcgcacgcaatccgctccactgccccagtctaccttagcccagcttgtaatccaacagcagcaccagcagttcttggagaagcagaagcaatatcagcaacagatccacatgaataagttgctgtcaaagagcatcgagcagcttaagcaaccgggaagccaccttgaggaagcagaagaggaattgcagggtgaccaggctatgcaggaagacagggcaccttccagcgggaatagcacaaggagcgactcatcagcatgtgtggacgacaccctcgggcaggttggtgccgtcaaggtaaaggaagagcctgtagattccgacgaagacgcccagatacaagagatggagtctggagaacaggctgccttcatgcaacaggtcatcggtaaggacttggccccgggatttgtgataaaagtgattatatag

SEQ ID NO: 80965 - DNA, 1542 bp, Artificial Sequence
  derived and/or modified sequence
atgatgatgccagtggtggatccagtggtaagggagaagcagctccaacaggaactgctgctgattcaacagcaacagcaaatacagaaacagctcctgatcgcagagttccaaaagcagcatgaaaacttgactcgtcagcatcaggcccaactccaagagcatataaaggagttgcttgccattaagcagcaacaggagctgctcgaaaaagagcagaagctggagcagcagcgacaggagcaggaagtggagcgccatcggagagaacagcagctgccaccgctgcggggaaaggaccggggacgcgaacgtgcagtggccagcacagaagtgaagcagaaactccaggagtttcttctatctaagtcagcaacaaaggacacacctactaacggtaagaaccactcggtgtccagacaccccaagctctgggccgctcaccatacctctctggaccagagcagccctcccttgagtggtacctcacccagctacaaatacactttgccgggagcccaggacgcgaaggatgacttccctctgagaaaaacggagagcagcgtgtcaagttcatcacccggatcgggaccttcaagcccgaacaatgggcctaccggatccgtaaccgagaacgagacttcagtgcttccacctacccctcacgcagagcagatggtctcacagcagcgcattctgatccatgaagacagcatgaatctgttgagcctctacactagtccaagcttacccaacatcaccctgggcttacctgccgtgccaagtcagcttaacgcctccaattcacttaaagagaaacaaaagtgcgaaacgcaaacacttcgccaaggggtacctcttccgggacagtacggcggatcaattcctgctagttcatcgcacccccatgtcaccctagagggcaaacctcccaatagcagtcatcaggctttgctgcagcatctgctgctgaaggagcagatgcgtcagcaaaaactgctggtggccggtggcgtccccctgcatccacagtcccctctcgccaccaaagaacgcatcagccctggcattaggggaacacataagctccctcggcacaggcctctgaaccgcacgcaatctgcgcctctcccacaatctacccttgcacagcttgtaattcagcagcagcaccagcagttcctcgagaagcaaaagcagtaccagcagcagattcacatgaacaagctgctgagcaagtccattgaacaactcaaacagcccggttcccacctggaagaagctgaagaagaactgcagggagatcaggcaatgcaggaagaccgcgctccatcttcggggaacagcactaggtccgattcgtcagcatgcgtcgatgacaccttgggtcaagtgggcgcagtaaaggttaaggaagagccagtggattccgacgaggatgcacaaatacaggagatggagagcggggagcaggctgccttcatgcagcaagtcataggtaaggatctggcgccaggatttgttatcaaggtaataatctag

SEQ ID NO: 80966 - DNA, 1542 bp, Artificial Sequence
  derived and/or modified sequence
atgatgatgcccgtggtggaccccgtggtgagagagaagcagctgcagcaggagctgctgctgatccagcagcagcagcagatccagaagcagctgctgatcgccgagttccagaagcagcacgagaacctgaccagacagcaccaggcccagctgcaggagcacatcaaggagctgctggccatcaagcagcagcaggagctgctggagaaggagcagaagctggagcagcagagacaggagcaggaggtggagagacacagaagagagcagcagctgccccccctgagaggcaaggacagaggcagagagagagccgtggccagcaccgaggtgaagcagaagctgcaggagttcctgctgagcaagagcgccaccaaggacacccccaccaacggcaagaaccacagcgtgagcagacaccccaagctgtgggccgcccaccacaccagcctggaccagagcagcccccccctgagcggcaccagccccagctacaagtacaccctgcccggcgcccaggacgccaaggacgacttccccctgagaaagaccgagagcagcgtgagcagcagcagccccggcagcggccccagcagccccaacaacggccccaccggcagcgtgaccgagaacgagaccagcgtgctgccccccaccccccacgccgagcagatggtgagccagcagagaatcctgatccacgaggacagcatgaacctgctgagcctgtacaccagccccagcctgcccaacatcaccctgggcctgcccgccgtgcccagccagctgaacgccagcaacagcctgaaggagaagcagaagtgcgagacccagaccctgagacagggcgtgcccctgcccggccagtacggcggcagcatccccgccagcagcagccacccccacgtgaccctggagggcaagccccccaacagcagccaccaggccctgctgcagcacctgctgctgaaggagcagatgagacagcagaagctgctggtggccggcggcgtgcccctgcacccccagagccccctggccaccaaggagagaatcagccccggcatcagaggcacccacaagctgcccagacacagacccctgaacagaacccagagcgcccccctgccccagagcaccctggcccagctggtgatccagcagcagcaccagcagttcctggagaagcagaagcagtaccagcagcagatccacatgaacaagctgctgagcaagagcatcgagcagctgaagcagcccggcagccacctggaggaggccgaggaggagctgcagggcgaccaggccatgcaggaggacagagcccccagcagcggcaacagcaccagaagcgacagcagcgcctgcgtggacgacaccctgggccaggtgggcgccgtgaaggtgaaggaggagcccgtggacagcgacgaggacgcccagatccaggagatggagagcggcgagcaggccgccttcatgcagcaggtgatcggcaaggacctggcccccggcttcgtgatcaaggtgatcatctag

SEQ ID NO: 80967 - protein, 562 aa, Artificial Sequence
  derived and/or modified sequence
MMMPVVDPVVREKQLQQELLLIQQQQQIQKQLLIAEFQKQHENLTRQHQAQLQEHIKLQQELLAIKQQQELLEKEQKLEQQRQEQEVERHRREQQLPPLRGKDRGRERAVASTEVKQKLQEFLLSKSATKDTPTNGKNHSVSRHPKLWYTAAHHTSLDQSSPPLSGTSPSYKYTLPGAQDAKDDFPLRKTASEPNLKVRSRLKQKVAERRSSPLLRRKDGNVVTSFKKRMFEVTESSVSSSSPGSGPSSPNNGPTGSVTENETSVLPPTPHAEQMVSQQRILIHEDSMNLLSLYTSPSLPNITLGLPAVPSQLNASNSLKEKQKCETQTLRQGVPLPGQYGGSIPASSSHPHVTLEGKPPNSSHQALLQHLLLKEQMRQQKLLVAGGVPLHPQSPLATKERISPGIRGTHKLPRHRPLNRTQSAPLPQSTLAQLVIQQQHQQFLEKQKQYQQQIHMNKLLSKSIEQLKQPGSHLEEAEEELQGDQAMQEDRAPSSGNSTRSDSSACVDDTLGQVGAVKVKEEPVDSDEDAQIQEMESGEQAAFMQQVIGKDLAPGFVIKVII

SEQ ID NO: 80968 - DNA, 1689 bp, Artificial Sequence
  derived and/or modified sequence
atgatgatgccagtcgtcgatccagtcgttcgcgaaaagcagctgcagcaggaactgctgctgatccaacagcagcagcagattcagaagcagttactcattgcagaattccagaagcagcacgaaaacctaacccggcaacaccaggcgcaattgcaagagcacatcaaattacaacaggagctgttggccatcaagcaacagcaggaactgctggagaaggagcagaaattggagcagcagaggcaggagcaggaagtcgaacggcaccggagagagcaacaactgccaccacttcgcggcaaggaccgtggcagagagagggccgtggcttctaccgaggtgaagcagaaactgcaggagttcttactatcgaagtccgcgaccaaggacacccccaccaacggcaagaatcactcagtgtcaagacaccctaagctgtggtataccgccgctcaccacaccagcttggatcagagttctcctccactgagtggcacctcaccctcatataagtacaccctccccggagctcaggatgccaaggacgactttcctctgcggaaaaccgcctccgagccaaatcttaaagtgcgcagtaggctaaagcagaaagtggctgagcgaagatcctctcctttgctcagacgcaaagatggaaacgtggtgacatcgtttaaaaagaggatgtttgaagtgacagaaagttctgtgtccagttcatcacccggatcaggaccctcctcccctaataacggcccaaccggctccgtaactgaaaacgagactagcgtgcttcctccgaccccccatgcagaacaaatggtgtcccagcagcggattctgatccatgaggactcgatgaatctcttgtccttatacacctcgcccagtctccctaacataactctgggcctgccagccgtcccaagccaattaaacgccagtaattctttgaaggagaaacagaaatgcgaaacacagacacttagacagggtgttcctctgcctggccagtacgggggcagcattcctgctagtagcagtcacccacacgtgaccctggagggaaagcctcctaactctagtcaccaggccttacttcagcacctgctcctgaaggaacagatgcgccagcagaagcttttggtcgctgggggcgtaccgctgcatccacagagcccgctggccaccaaggagcgcataagcccagggatcaggggtacccacaagttacccagacaccggcctctgaacaggacccaatcggcgcctctgccccagtctaccctggctcaactagtgatccaacagcagcatcagcagttcctggaaaagcagaagcagtatcagcaacagatacacatgaacaaattactgagtaagagtatagagcagctcaagcagccagggagccatctcgaggaggcagaggaggaactgcagggagatcaggcaatgcaggaggatcgcgcacccagcagcgggaactcaacgcgcagcgatagcagcgcttgtgttgatgacacgctcggacaggtaggtgccgtgaaggtgaaggaggagcctgtagactctgacgaagatgctcaaattcaagaaatggagtcaggtgagcaagcggccttcatgcagcaggtcataggcaaagatttagctccaggattcgtcatcaaggttatcatctag

SEQ ID NO: 80969 - DNA, 1689 bp, Artificial Sequence
  derived and/or modified sequence
atgatgatgcctgtggtggaccctgtggtgcgggagaagcagctgcagcaggagctgctgctgatccagcagcagcagcagatccagaagcagctgctgattgctgagttccagaagcagcacgagaacctgacccggcagcaccaggcccagctgcaggagcacatcaagctgcagcaggagctgctggccatcaagcagcagcaggagctgctggagaaggagcagaagctggagcagcagaggcaggagcaggaggtggagcggcacagaagagagcagcagctgccccccctgcggggcaaggaccggggccgggagagagctgtggccagcacagaggtgaagcagaagctgcaggagttcctgctgagcaagagcgccaccaaggacacccccaccaacgggaagaaccacagcgtgagccgccaccccaagctgtggtacacagctgcccaccacaccagcctggaccagagcagcccccccctgagcggcaccagccccagctacaagtacaccctgcccggggcccaggatgccaaggatgacttccccctgaggaagacagccagcgagcccaacctgaaggtgcgcagccggctgaagcagaaggtggccgagaggaggagcagccccctgctgcggaggaaggatggaaatgtggtgaccagcttcaagaagaggatgtttgaggtgacagagagctctgtgagcagcagcagccctggcagcggccccagcagccccaacaacggccccactggatctgtgacagaaaatgagacctctgtgctgccccccacccctcatgctgagcagatggtgtcccagcagaggatcctgattcatgaagattccatgaacctgctgagcctgtacaccagccccagcctgcccaacatcaccctgggcctgcctgctgtgcccagccagctgaatgccagcaacagcctgaaggagaagcagaagtgtgagacccagaccctgcggcagggcgtgcccctgcccggccagtatggaggcagcatcccagccagcagcagccacccccacgtgaccctggagggcaagccacccaacagcagccaccaggccctgctgcagcacctgctgctgaaggagcagatgaggcagcagaagctgctggtggccggcggcgtgcccctgcacccccagagccccctggccaccaaggagcgcatcagccctggcatccggggcacccacaagctgcccaggcaccggcccctgaacagaacccagagcgcccccctgccccagagcaccctggcccagctggtgatccagcagcagcaccagcagttcctggagaagcagaagcagtaccagcagcagatccacatgaacaagctgctgagcaagagcattgagcagctgaagcagcccggcagccacctggaggaggccgaggaggagctgcagggcgaccaggccatgcaggaggaccgggcccccagcagcggcaacagcaccaggagtgacagcagcgcctgtgtggatgacaccctgggccaggtgggcgctgtgaaggtgaaggaggagcctgtggacagtgatgaagatgcccagatccaggagatggagagcggggagcaggccgccttcatgcagcaggtgattggcaaggacctggcccctggcttcgtcatcaaggtgatcatctag

SEQ ID NO: 80970 - DNA, 1689 bp, Artificial Sequence
  derived and/or modified sequence
atgatgatgcccgtggtggaccccgtggtgcgggagaagcagctgcagcaggaacttctgctgatccaacagcagcaacaaatacagaagcagctgttaatagccgagtttcaaaaacagcacgagaaccttacgcgccagcatcaggctcagctgcaggagcacatcaagttacaacaggaactactggcaataaaacaacagcaggagctgctcgagaaggagcagaaactggaacagcaaaggcaggagcaggaggtagaaaggcacaggagagaacagcagttgccaccactgaggggcaaagatcgaggtcgagaacgtgcagtcgcatcaacagaagtcaagcagaaactgcaggagtttctgctgtctaaaagcgctaccaaggataccccaactaacgggaagaaccattccgtgtcaagacaccctaagctgtggtacactgccgctcaccacaccagcctcgaccagagttcacctcccttgtccggcacgagtccatcttacaagtacactttaccaggtgctcaagacgcaaaagacgattttccactgcgcaagactgcatccgagccaaatcttaaagtgcgaagtaggttaaagcagaaagtggccgaaagaagaagttcaccacttctacggcgcaaggatggcaacgtggtgacttccttcaagaagaggatgttcgaggttacagaaagtagtgtgtcttcttctagtcccggatccggaccatcctcacctaacaatggacccactgggtcagttaccgagaatgaaacctctgtgctgccgcccactcctcatgctgagcagatggtatcacagcagagaattctcatccacgaggattcgatgaatctgctcagcctgtacacatcaccgtctctgcctaacataacattgggcctccccgctgtgcctagccaactgaacgccagcaactctcttaaagaaaagcagaaatgtgagacgcagacgctccggcagggagtccctttaccaggtcagtatggaggcagcatcccggcatcaagttctcatccacatgtgacactcgagggaaagccacctaactcttcccatcaggcactgttgcagcacctgctccttaaggaacagatgcgtcaacagaagcttctggtggccggaggcgttcctctccatccccaatcaccactcgctaccaaggagcgaataagtccaggaatacggggcactcacaagctgccgcgacacagaccactaaatcgaacacagagcgcccctcttccccagtccaccctagcacaattagttatccagcagcaacatcagcaattcctagaaaagcagaaacagtaccagcagcagatccatatgaacaaattgcttagcaagtccatcgaacagcttaaacagccaggctcacatctggaggaggctgaggaagaactccaaggagaccaagctatgcaggaggatagggccccttcgtccgggaactcaacacgcagtgatagctcagcctgcgtcgacgatacgctgggacaagttggcgccgtcaaggtcaaggaggagcccgtggatagcgacgaggacgcccaaatccaggaaatggaatccggcgagcaggcggccttcatgcagcaagtgattggtaaagatctggcccccggttttgtgattaaagtcattatctag

SEQ ID NO: 80971 - DNA, 1689 bp, Artificial Sequence
  derived and/or modified sequence
atgatgatgcccgtggtagacccggtcgtgcgagaaaaacaattgcagcaagagctgttacttatacagcaacagcagcaaatccagaagcaactgctgatagccgagttccaaaagcagcatgagaatctgacaagacagcatcaggcgcagctccaggagcatatcaagctgcagcaagaattgcttgctattaaacagcaacaggagctgctggagaaggaacagaagctggagcagcaacggcaagaacaggaggtcgaaagacatcggagagaacaacagctacccccactgcgcggtaaggacagagggcgtgagcgtgctgtggcttctacggaggtgaagcagaaactacaggaatttctgctgagtaaatccgccacaaaggatacgcctacaaatgggaagaatcattcagtgagtagacaccccaagttgtggtacactgctgctcaccatacgtctcttgatcagtcttcgcccccactgtcgggtacttcaccttcttacaagtatacactgcccggtgcccaggacgctaaagatgattttcccctcaggaagacggcctccgaacctaacttaaaggtgcgcagccggctcaagcagaaggttgcagagaggaggagcagccccctgttgaggaggaaggacggcaacgtggttacctctttcaagaagcgaatgtttgaagttaccgaatcttccgtgtccagttctagcccgggatcagggccatcttcgccaaacaatggtcccactggtagtgtcaccgagaatgaaacatccgtgctgccaccaacacctcacgcagagcaaatggtttctcagcagcgcattctgatacatgaggacagcatgaacctgctcagcctgtacacatctccgagcttaccaaacattactcttggattacctgccgtgccctcccagttaaatgcaagcaatagccttaaggagaaacagaaatgtgagacccaaactctgaggcagggcgtgccactccccggacagtatgggggaagcatcccagcctcctcatcccacccgcacgtcacactcgaaggcaagcccccaaattcgtcgcaccaagcattgcttcagcatttattattaaaagaacaaatgaggcagcaaaaacttctggttgctggcggtgtgcctctccaccctcagagccccctcgctactaaagaacgcatttcacccggaattagaggaactcacaaactgcctaggcacaggcctctgaatcggacgcaatctgcccctttgccacagtccaccctggctcaactcgtcattcagcaacaacaccaacagttcctggagaaacagaaacagtatcagcaacagatccatatgaataagctcctgtccaagtcgattgagcagttaaaacagccaggttcacaccttgaagaagcagaagaagaacttcagggagaccaagccatgcaggaggacagagctccatccagcgggaactcaacacggagtgactccagcgcatgcgtcgatgacacccttgggcaggttggcgctgtgaaagttaaggaggaaccggtggatagcgatgaagacgctcagatccaggaaatggaatccggcgagcaggctgcattcatgcagcaggtgatcggtaaggacctcgctcctggattcgtcattaaagtcatcatatag

SEQ ID NO: 80972 - DNA, 1689 bp, Artificial Sequence
  derived and/or modified sequence
atgatgatgcccgtggtggaccccgtggtgagagagaagcagctgcagcaggagctgctgctgatccagcagcagcagcagatccagaagcagctgctgatcgccgagttccagaagcagcacgagaacctgaccagacagcaccaggcccagctgcaggagcacatcaagctgcagcaggagctgctggccatcaagcagcagcaggagctgctggagaaggagcagaagctggagcagcagagacaggagcaggaggtggagagacacagaagagagcagcagctgccccccctgagaggcaaggacagaggcagagagagagccgtggccagcaccgaggtgaagcagaagctgcaggagttcctgctgagcaagagcgccaccaaggacacccccaccaacggcaagaaccacagcgtgagcagacaccccaagctgtggtacaccgccgcccaccacaccagcctggaccagagcagcccccccctgagcggcaccagccccagctacaagtacaccctgcccggcgcccaggacgccaaggacgacttccccctgagaaagaccgccagcgagcccaacctgaaggtgagaagcagactgaagcagaaggtggccgagagaagaagcagccccctgctgagaagaaaggacggcaacgtggtgaccagcttcaagaagagaatgttcgaggtgaccgagagcagcgtgagcagcagcagccccggcagcggccccagcagccccaacaacggccccaccggcagcgtgaccgagaacgagaccagcgtgctgccccccaccccccacgccgagcagatggtgagccagcagagaatcctgatccacgaggacagcatgaacctgctgagcctgtacaccagccccagcctgcccaacatcaccctgggcctgcccgccgtgcccagccagctgaacgccagcaacagcctgaaggagaagcagaagtgcgagacccagaccctgagacagggcgtgcccctgcccggccagtacggcggcagcatccccgccagcagcagccacccccacgtgaccctggagggcaagccccccaacagcagccaccaggccctgctgcagcacctgctgctgaaggagcagatgagacagcagaagctgctggtggccggcggcgtgcccctgcacccccagagccccctggccaccaaggagagaatcagccccggcatcagaggcacccacaagctgcccagacacagacccctgaacagaacccagagcgcccccctgccccagagcaccctggcccagctggtgatccagcagcagcaccagcagttcctggagaagcagaagcagtaccagcagcagatccacatgaacaagctgctgagcaagagcatcgagcagctgaagcagcccggcagccacctggaggaggccgaggaggagctgcagggcgaccaggccatgcaggaggacagagcccccagcagcggcaacagcaccagaagcgacagcagcgcctgcgtggacgacaccctgggccaggtgggcgccgtgaaggtgaaggaggagcccgtggacagcgacgaggacgcccagatccaggagatggagagcggcgagcaggccgccttcatgcagcaggtgatcggcaaggacctggcccccggcttcgtgatcaaggtgatcatctag

SEQ ID NO: 80973 - protein, 536 aa, Artificial Sequence
  derived and/or modified sequence
MAEDWLDCPALGPGWKRREVFRKSGATCGRSDTYYQSPTGDRIRSKVELTRYLGPACDLTLFDFKQGILCYPAPKAHPVAVASKKRKKPSRPAKTRKRQVGPQSGEVRKEAPRDETKADTDTAPASFPAPGCCENCGISFSGDGTQRQRLKTLCKDCRAQRIAFNREQRMFKRVGCGECAACQVTEDCGACSTCLLQLPHDVASGLFCKCERRRCLRIVERSRGCGVCRGCQTQEDCGHCPICLRPPRPGLRRQWKCVQRRCLRGKHARRKGGCDSKMAARRRPGAQPLPPPPPSQSPEPTEPQPYTNRRQNRKCGACAACLRRMDCGRCDFCCDKPKFGGSNQKRQKCRWRQCLQFAMKRLLPSVWSESEDGAGSPPPYRRRKRPSSARRHHLGPTLKPTLATRTAQPDHTQAPTKQEAGGGFVLPPPGTDLVFLREGASSPVQVPGPVAASTEALLQAVDPGLPSVKQEPPDPEEDKEENKDDSASKLAPEEEAGGAGTPVITEIFSLGGTRFRDTAVWLPRSKDLKKPGARKQ

SEQ ID NO: 80974 - DNA, 1611 bp, Artificial Sequence
  derived and/or modified sequence
atggccgaagactggctcgattgcccagctttagggcccgggtggaagcgacgcgaggtgttcagaaagtcaggggccacctgcggaagatccgatacgtactatcagtcacccacaggagacagaatacggtccaaggtcgagttgacccgttacctcggacctgcctgcgatctaaccctgttcgacttcaaacaaggaattttatgctacccagccccaaaggcccaccccgtggccgtggcctccaagaagcgcaagaagccatctcgccctgcaaagacacgtaaacggcaggtggggcctcagtcgggggaggttaggaaggaagcgcctagggatgaaacaaaagctgacaccgatactgccccagctagctttcccgctccaggctgttgcgaaaactgcggtatcagtttctctggcgatgggactcagcgccagagattaaagacgctgtgcaaggactgtcgcgcacagagaatcgcctttaaccgcgagcagcggatgttcaaaagggtcggttgtggggaatgcgccgcctgccaagttacggaagactgcggagcctgctctacttgcctgctccagctcccacacgatgtcgcctctgggctgttctgcaagtgcgagaggcggcgatgtttgcgaattgtcgagcgctctcggggttgcggtgtctgcagaggctgtcagacacaagaagactgtgggcactgcccaatctgcttgagaccccccagacccgggcttaggcggcaatggaaatgcgtccaacggcgatgtctgcggggtaagcacgcaagaaggaagggaggatgcgattccaaaatggctgcccggcggcggcccggggctcagccgttaccacctccgccccccagccagtcccctgaacctaccgagccacagccctacaccaatcgacggcagaaccgcaagtgcggcgcctgcgccgcatgtctccggaggatggactgtggtcgatgcgatttctgctgcgataaacccaagttcgggggcagcaaccagaagcggcagaagtgtagatggcggcagtgccttcagtttgcaatgaaaagacttctgccatcagtttggtcagagagcgaggacggggcaggtagtcctcctccataccgtagacggaaaaggccttctagcgcacgccgccaccatttggggccaaccctgaagccaactctggctaccagaactgcgcaacctgaccatacccaagctcccacaaaacaggaagccggtggggggtttgtgttaccgccacccggcacggatttagtgtttttgagagagggggctagtagtccggttcaggtgcctggaccagtcgcagcctccacggaagctctattgcaagccgtagaccctggtctcccttctgtgaaacaggagccaccagacccagaagaagataaagaggagaacaaggacgacagtgcctctaagttagcccctgaggaagaggccggcggcgcgggtactcctgtaattactgaaatcttttcactcggtggcacaaggtttcgcgataccgcggtgtggttacctaggtccaaagacctgaaaaagcccggcgctcgaaaacagtag

SEQ ID NO: 80975 - DNA, 1611 bp, Artificial Sequence
  derived and/or modified sequence
atggccgaggactggctggactgcccagccctgggccctggctggaagagaagagaggtgttcaggaagagcggggccacctgtggccgcagtgacacctactaccagagccccactggagaccgcatccgcagcaaggtggagctgacccgctacctgggccctgcctgtgacctgaccctgtttgacttcaagcagggcatcctgtgctacccagcccccaaggcccaccctgtggccgtggccagcaagaagaggaagaagcccagcaggcctgccaagaccaggaagaggcaggtgggcccccagagcggggaggtgaggaaggaggcccccagagatgagaccaaggctgacacagacacagccccagccagcttccctgcccctggctgctgtgagaactgtggcatctccttctctggagatggcacccagaggcagaggctgaagaccctgtgcaaggactgccgggcccagagaattgccttcaaccgggagcagaggatgttcaagagggtgggctgtggggagtgtgccgcctgccaggtgacagaggactgtggggcctgcagcacctgcctgctgcagctgccccatgatgtggccagcggcctcttctgcaagtgtgagcggcggcgctgcctgcgcatcgtggagaggagccggggctgcggcgtgtgccggggctgccagacccaggaggactgtggccactgccccatctgcctgcggccccccaggcctggcctgcggcggcagtggaagtgtgtgcagaggcgctgcctgcggggcaagcacgcccggaggaaaggaggctgtgacagcaagatggccgcccggcggcggcctggggcccagcccctgcccccacctccacccagccagagccctgagcccacagagccccagccctacaccaacagacggcagaacagaaaatgtggggcctgtgccgcctgcctgcggaggatggactgtggccgctgtgacttctgctgtgacaagcccaagtttggaggcagcaaccagaagaggcagaagtgccgctggaggcagtgcctgcagtttgccatgaagaggctgctgcccagcgtgtggagcgagagtgaagatggagctggcagccccccaccctacagaagaaggaagaggcccagcagcgcccggcggcaccacctgggccccaccctgaagcccaccctggccaccaggacagcccagcctgaccacacccaggcccccaccaagcaggaggccggcggcggctttgtgctgcccccacctggaacagacctggtgttcctgcgggagggcgccagcagccctgtgcaggtgcccggccctgtggccgccagcacagaggccctgctgcaggccgtggaccccggcctgcccagcgtgaagcaggagcccccagaccctgaggaggacaaggaggagaacaaggatgacagcgccagcaagctggcccctgaggaggaggccggcggggccggcacccctgtgatcacagagatcttcagcctgggcggcacccgcttccgggacacagctgtgtggctgcccaggagcaaggacctgaagaagccaggggccaggaagcagtag

SEQ ID NO: 80976 - DNA, 1611 bp, Artificial Sequence
  derived and/or modified sequence
atggccgaggactggctggactgccccgccctgggccccggctggaaaagacgggaagtatttagaaaatccggagctacatgtggtagaagtgacacctattaccagagccccaccggggatcgcatcaggtctaaggtcgagctcacaagatatctcggcccggcttgcgacctcaccctgttcgacttcaagcaggggatcttatgctatcctgcacctaaagctcatccggtggcagtcgccagtaaaaagcgcaaaaagccgtcccgcccggccaaaactcggaagcggcaagtcggccctcagagtggagaagtgcgcaaagaggctcctagggatgaaactaaagccgacacagacaccgcccccgcctctttccctgcaccagggtgctgtgagaactgcggcatttcctttagtggcgatgggacacagcgccaaaggctcaagacattatgcaaagactgccgtgcacagcgaatcgcgttcaacagggagcaaagaatgtttaagcgagttggatgcggcgaatgtgctgcatgccaggtgactgaagactgcggagcttgttcgacatgtctgctccaactgcctcacgacgtagcctctggactgttttgcaaatgcgaacgacgacggtgtcttcgcattgtagagcgtagtagagggtgtggcgtttgccggggttgtcagacacaggaagattgtgggcattgtcctatttgcctacggccaccgcgccccggtttgcgaaggcaatggaagtgcgtacagcgaaggtgcctgcgcggcaaacatgcacgaagaaaaggtggatgcgactccaaaatggctgcccggaggagaccaggagcacagccactcccacccccaccgccatcacaaagcccagagccaaccgaaccacagccctataccaacaggagacagaaccggaagtgcggtgcttgcgcagcttgtctgagacggatggattgcggacgctgcgatttctgttgcgacaagcctaaattcggggggtccaaccagaagcgacagaagtgtaggtggagacagtgcctacagttcgccatgaaacggctcttgcctagcgtttggtccgagtccgaagatggcgctgggtcccctcctccttaccgaaggcggaaaagacccagtagtgcccgaaggcatcacttggggcccacactgaaaccaacactggctactcgcactgctcagccagatcacactcaagcccctaccaagcaagaagctgggggcggattcgtgctgcctcctcctgggaccgacctggtgttcctgcgcgagggggcgagttcacctgtgcaagttcctggacctgttgcagcctccactgaagctctgctacaggctgtagacccaggcttgccatctgtcaaacaagaacctccagacccagaggaagataaggaagagaataaagacgactctgcctctaagctcgcacccgaagaagaagctggcggcgcgggcacccctgtcatcacagagatcttctcacttgggggaacccgctttcgggacacagcagtgtggctgccgcgatcaaaagaccttaaaaaaccaggtgcaagaaagcagtag

SEQ ID NO: 80977 - DNA, 1611 bp, Artificial Sequence
  derived and/or modified sequence
atggccgaggactggcttgattgcccagcacttggacccggttggaagcggagggaagtctttcgtaaatccggcgcaacgtgcggacggtcagatacgtactatcagagccctacaggcgacagaatccggtctaaagtggagctaaccaggtatctgggacccgcttgtgacctcaccctgttcgactttaaacagggcattctgtgttacccagccccaaaggctcaccccgtggccgtggccagtaaaaagcgcaaaaagccatcccgtcccgctaaaacacggaaacgtcaggtcggacctcagagtggggaggtcagaaaggaggccccacgcgatgagacaaaagcagatactgatactgcccctgccagttttcccgcacccggttgttgcgaaaactgtggcattagcttctccggagacgggacccaacgtcaaagactgaagacactatgcaaagactgcagagcccagcggatcgcttttaatagggaacagcggatgttcaagcgagtgggctgtggcgagtgcgccgcttgtcaggtgaccgaagactgcggagcttgctccacttgtttactgcaactcccccacgacgttgcctcaggattgttctgcaaatgtgaacggaggcgctgcctccgaatagtggagcgctctagggggtgcggagtgtgcagaggatgccagacgcaggaggactgtggccattgtccaatttgcttacgcccaccgaggcccggacttcggaggcagtggaaatgtgttcaaaggaggtgcctgagaggaaagcacgccagaagaaagggagggtgtgacagcaagatggccgctcgtcgcaggcctggagcccagccactacctccgcctcccccttctcagtctcctgagcccacagagccccagccctacaccaaccggcgacagaacagaaagtgcggagcttgtgccgcatgtctcaggcgcatggactgtggccgttgtgacttttgttgtgataaacccaagttcggcggtagcaatcagaagcggcagaagtgcagatggcgtcaatgcctgcaattcgccatgaaacgcttactcccctcagtgtggagcgagtccgaggatggggctggaagcccccctccttaccggaggcgcaaacgcccttccagtgcacgccgacaccaccttgggccaacacttaagccaacacttgccacgcgaaccgcccagcccgaccacactcaagcgcctaccaagcaggaggcaggagggggtttcgttctgccgccacctgggacagacctcgtgttcctgagagaaggcgcaagcagtcctgtacaggtacctgggcctgtggccgcttccaccgaagcattgctgcaggctgtggaccccggtctccctagcgtgaaacaagagcctccggatcctgaagaggataaagaagaaaacaaagacgactccgcgtctaagttagcccctgaggaagaggccggaggtgccggtacacccgtcatcactgagattttctcactcggtggcaccagatttagggacactgcagtatggctgccgagatccaaagacctgaaaaagcccggtgcacggaaacaatag

SEQ ID NO: 80978 - DNA, 1611 bp, Artificial Sequence
  derived and/or modified sequence
atggccgaggactggctggactgccccgccctgggccccggctggaagagaagagaggtgttcagaaagagcggcgccacctgcggcagaagcgacacctactaccagagccccaccggcgacagaatcagaagcaaggtggagctgaccagatacctgggccccgcctgcgacctgaccctgttcgacttcaagcagggcatcctgtgctaccccgcccccaaggcccaccccgtggccgtggccagcaagaagagaaagaagcccagcagacccgccaagaccagaaagagacaggtgggcccccagagcggcgaggtgagaaaggaggcccccagagacgagaccaaggccgacaccgacaccgcccccgccagcttccccgcccccggctgctgcgagaactgcggcatcagcttcagcggcgacggcacccagagacagagactgaagaccctgtgcaaggactgcagagcccagagaatcgccttcaacagagagcagagaatgttcaagagagtgggctgcggcgagtgcgccgcctgccaggtgaccgaggactgcggcgcctgcagcacctgcctgctgcagctgccccacgacgtggccagcggcctgttctgcaagtgcgagagaagaagatgcctgagaatcgtggagagaagcagaggctgcggcgtgtgcagaggctgccagacccaggaggactgcggccactgccccatctgcctgagaccccccagacccggcctgagaagacagtggaagtgcgtgcagagaagatgcctgagaggcaagcacgccagaagaaagggcggctgcgacagcaagatggccgccagaagaagacccggcgcccagcccctgcccccccccccccccagccagagccccgagcccaccgagccccagccctacaccaacagaagacagaacagaaagtgcggcgcctgcgccgcctgcctgagaagaatggactgcggcagatgcgacttctgctgcgacaagcccaagttcggcggcagcaaccagaagagacagaagtgcagatggagacagtgcctgcagttcgccatgaagagactgctgcccagcgtgtggagcgagagcgaggacggcgccggcagcccccccccctacagaagaagaaagagacccagcagcgccagaagacaccacctgggccccaccctgaagcccaccctggccaccagaaccgcccagcccgaccacacccaggcccccaccaagcaggaggccggcggcggcttcgtgctgcccccccccggcaccgacctggtgttcctgagagagggcgccagcagccccgtgcaggtgcccggccccgtggccgccagcaccgaggccctgctgcaggccgtggaccccggcctgcccagcgtgaagcaggagccccccgaccccgaggaggacaaggaggagaacaaggacgacagcgccagcaagctggcccccgaggaggaggccggcggcgccggcacccccgtgatcaccgagatcttcagcctgggcggcaccagattcagagacaccgccgtgtggctgcccagaagcaaggacctgaagaagcccggcgccagaaagcagtag

SEQ ID NO: 80979 - DNA, 1493 bp, Artificial Sequence
  derived and/or modified sequence
atgaatggacaccttgaagcagaggagcagcaggaccagagatcacccctgacctgctacctcggccgccccggttgcttctattggtcaatccctttgggggtcggggcctggcctggcagtggtgtaagaaccacgtgcttcccatgatctctgaagctgggctgtccttcaacctcatccagacagaacgacagaaccacgcccgggagctggtccaggggctgagcctgagtgagtgggatggcatcgtcacggtctcgggagacgggctgctccatgaggtgctgaacgggctcctagatcgccctgactgggaggaagctgtgaagatgcctgtgggcatcctcccctgcggctcgggcaacgcgctggccggagcagtgaaccagcacgggggatttgagccagccctgggcctcgacctgttgctcaactgctcactgttgctgtgccggggtggtggccacccactggacctgctctccgtgacgctggcctcgggctcccgctgtttctccttcctgtctgtggcctggggcttcgtgtcagatgtggatatccagagcgagcgcttcagggccttgggcagtgcccgcttcacactgggcacggtgctgggcctcgccacactgcacacctaccgcggacgcctctcctacctccccgccactgtggaacctgcctcgcccacccctgcccatagcctgcctcgtgccaagtcggagctgaccctaaccccagacccagccccgcccatggcccactcacccctgcatcgttctgtgtctgacctgcctcttcccctgccccagcctgccctggcctctcctggctcgccagaacccctgcccatcctgtccctcaacggtgggggcccagagctggctggggactggggtggggctggggatgctccgctgtccccggacccactgctgtcttcacctcctggctctcccaaggcagctctacactcacccgtctccgaaggggcccccgtaattcccccatcctctgggctcccacttcccacccctgatgcccgggtaggggcctccacctgcggcccgcccgaccacctgctgcctccgctgggcaccccgctgcccccagactgggtgacgctggagggggactttgtgctcatgttggccatctcgcccagccacctaggcgctgacctggtggcagctccgcatgcgcgcttcgacgacggcctggtgcacctgtgctgggtgcgtagcggcatctcgcgggctgcgctgctgcgccttttcttggccatggagcgtggtagccacttcagcctgggctgtccgcagctgggctacgccgcggcccgtgccttccgcctagagccgctcacaccacgcggcgtgctcacagtggacggggagcaggtggagtatgggccgctacaggcacagatgcaccctggcatcggtacactgctcactgggcctcctggctgcccggggcgggagccctga

SEQ ID NO: 80980 - protein, 171 aa, Artificial Sequence
  derived and/or modified sequence
DLIENLAQDETSRLDLGFEEWDVAGLPWWFLGNLRSNYTPRSNGSTDLQTNQVIEVGKNDDLEDSKSLSDDTDVEVTSEDEWQCTECKKFNSPSKRYCFRCWALRKDWYSDCSKLTHSLSTSDITAIPEKENEGNDVPDCRRTISAPVVRPKDAYIKKENSKLFDPCNSVE

SEQ ID NO: 80981 - protein, 440 aa, Artificial Sequence
  derived and/or modified sequence
MTSFSTSAQCSTSDSACRISPGQINQVRPKLPLLKILHAAGAQGEMFTVKEVMHYLGQYIMVKQLYDQQEQHMVYCGGDLLGELLGRQSFSVKDPSPLYDMLRKNLVTLATATTDAAQTLALAQDHSMDIPSQDQLKQSAEESSTSRKRTTEDDIPTLPTSEHKCIHSREDEDLIENLAQDETSRLDLGFEEWDVAGLPWWFLGNLRSNYTPRSNGSTDLQTNQVIEVGKNDDLEDSKSLSDDTDVEVTSEDEWQCTECKKFNSPSKRYCFRCWALRKDWYSDCSKLTHSLSTSDITAIPEKENEGNDVPDCRRTISAPVVRPKDAYIKKENSKLFDPCNSVEFLDLAHSSESQETISSMGEQLDNLSEQRTDTENMEDCQNLLKPCSLCEKRPRDGNIIHGRTGHLVTCFHCARRLKKAGASCPICKKEIQLVIKVFIA

SEQ ID NO: 80982 - DNA, 516 bp, Artificial Sequence
  derived and/or modified sequence
gacctgatcgagaacctggcccaggacgagaccagcagactggacctgggcttcgaggagtgggacgtggccggcctgccctggtggttcctgggcaacctgagaagcaactacacccccagaagcaacggcagcaccgacctgcagaccaaccaggtgatcgaggtgggcaagaacgacgacctggaggacagcaagagcctgagcgacgacaccgacgtggaggtgaccagcgaggacgagtggcagtgcaccgagtgcaagaagttcaacagccccagcaagagatactgcttcagatgctgggccctgagaaaggactggtacagcgactgcagcaagctgacccacagcctgagcaccagcgacatcaccgccatccccgagaaggagaacgagggcaacgacgtgcccgactgcagaagaaccatcagcgcccccgtggtgagacccaaggacgcctacatcaagaaggagaacagcaagctgttcgacccctgcaacagcgtggagtag

SEQ ID NO: 80983 - DNA, 1323 bp, Artificial Sequence
  derived and/or modified sequence
atgaccagcttcagcaccagcgcccagtgcagcaccagcgacagcgcctgcagaatcagccccggccagatcaaccaggtgagacccaagctgcccctgctgaagatcctgcacgccgccggcgcccagggcgagatgttcaccgtgaaggaggtgatgcactacctgggccagtacatcatggtgaagcagctgtacgaccagcaggagcagcacatggtgtactgcggcggcgacctgctgggcgagctgctgggcagacagagcttcagcgtgaaggaccccagccccctgtacgacatgctgagaaagaacctggtgaccctggccaccgccaccaccgacgccgcccagaccctggccctggcccaggaccacagcatggacatccccagccaggaccagctgaagcagagcgccgaggagagcagcaccagcagaaagagaaccaccgaggacgacatccccaccctgcccaccagcgagcacaagtgcatccacagcagagaggacgaggacctgatcgagaacctggcccaggacgagaccagcagactggacctgggcttcgaggagtgggacgtggccggcctgccctggtggttcctgggcaacctgagaagcaactacacccccagaagcaacggcagcaccgacctgcagaccaaccaggtgatcgaggtgggcaagaacgacgacctggaggacagcaagagcctgagcgacgacaccgacgtggaggtgaccagcgaggacgagtggcagtgcaccgagtgcaagaagttcaacagccccagcaagagatactgcttcagatgctgggccctgagaaaggactggtacagcgactgcagcaagctgacccacagcctgagcaccagcgacatcaccgccatccccgagaaggagaacgagggcaacgacgtgcccgactgcagaagaaccatcagcgcccccgtggtgagacccaaggacgcctacatcaagaaggagaacagcaagctgttcgacccctgcaacagcgtggagttcctggacctggcccacagcagcgagagccaggagaccatcagcagcatgggcgagcagctggacaacctgagcgagcagagaaccgacaccgagaacatggaggactgccagaacctgctgaagccctgcagcctgtgcgagaagagacccagagacggcaacatcatccacggcagaaccggccacctggtgacctgcttccactgcgccagaagactgaagaaggccggcgccagctgccccatctgcaagaaggagatccagctggtgatcaaggtgttcatcgcctag

SEQ ID NO: 80984 - DNA, 516 bp, Artificial Sequence
  derived and/or modified sequence
gacttaattgagaatctcgctcaggacgagacgtccaggctggacttaggatttgaagaatgggacgtggccggcctgccctggtggtttcttggtaacctgagatctaattacactccgcgctctaacggctcaacagatctgcaaaccaaccaggtgattgaggtcggaaaaaacgatgaccttgaggactccaaaagcctatccgatgacacggacgtggaggtgacaagcgaggacgaatggcagtgcacagagtgcaagaaatttaacagcccgagcaagaggtattgctttagatgctgggcgcttagaaaagattggtattccgactgtagcaaacttacacacagcttgagcacatccgatataactgccataccagagaaagaaaacgagggaaacgacgtcccggactgtcggaggacgatctctgcccctgtggtacgacctaaagatgcttatatcaaaaaggaaaattctaagctattcgatccatgtaattcagttgagtag

SEQ ID NO: 80985 - DNA, 1323 bp, Artificial Sequence
  derived and/or modified sequence
atgacaagcttctccacttccgcgcagtgttctacctctgattcagcttgcagaatctcacccggccagataaatcaggtgcgacctaaactacccctgctaaagatcctccacgcggccggcgctcagggagaaatgttcacagtcaaagaagttatgcattatctcggccaatacatcatggtgaagcaactctacgaccagcaggagcaacacatggtctactgcgggggcgatctgctcggtgaactcctcggccgccagtccttctcagtgaaagacccttctcccctgtatgacatgctccgtaaaaacttagttactcttgctaccgcaaccactgacgctgctcagactttggccctggcccaagatcactccatggacatccctagtcaagaccaactgaaacaatcagccgaggaatccagtacttctagaaaaagaactactgaagacgatattcccaccctgcctacctcagagcacaagtgcatccactctcgagaggatgaggatctgatcgagaatctggctcaggatgagacatcgaggctggatttgggctttgaagagtgggatgttgcgggacttccgtggtggttcttgggaaacctgcgaagcaactacactccacgaagcaatggctccacagatcttcagacaaaccaggtgatcgaggttggaaagaacgacgatctggaagacagtaagtccctgtccgacgacactgacgttgaggtcacttccgaagatgagtggcagtgcacagagtgtaagaaatttaactcccctagcaagcgctattgtttcagatgttgggcccttcgtaaggattggtatagcgactgttccaaactgactcacagtctgtcgaccagcgacatcaccgcaatccccgaaaaagaaaatgaaggaaacgacgttccagactgcaggaggactattagtgcaccggtggtaagaccaaaagacgcatacatcaagaaggaaaactctaaactttttgacccatgcaatagcgttgagtttctagacctcgcccattcaagcgagagtcaggagactattagctccatgggagagcaactcgacaatctgtcagagcagcgaactgacactgaaaatatggaggattgccagaacctgctgaaaccctgctccctgtgtgaaaagcgtccaagagatggaaatataattcatgggcgcactggccacctcgtgacgtgctttcactgtgcgaggagactgaagaaagcgggggcctcctgtcctatttgcaagaaggaaatccagctggtgatcaaagtattcatcgcctag

SEQ ID NO: 80986 - DNA, 516 bp, Artificial Sequence
  derived and/or modified sequence
gacctgattgagaacctggcccaggatgagaccagccggctggacctgggctttgaggagtgggatgtggccggcctgccctggtggttcctgggcaacctgcggagcaactacacccccaggagcaatggcagcacagacctgcagaccaaccaggtgattgaggtgggcaagaatgatgacctggaggacagcaagagcctgagtgatgacacagatgtggaggtgaccagtgaagatgagtggcagtgcacagagtgcaagaagttcaacagccccagcaagcgctactgcttccgctgctgggccctgaggaaggactggtacagcgactgcagcaagctgacccacagcctgagcaccagtgacatcacagccatccctgagaaggaaaatgaaggaaatgatgtgcctgactgcaggaggaccatcagcgcccctgtggtgcggcccaaggatgcctacatcaagaaggagaacagcaagctgtttgacccctgcaacagcgtggagtag

SEQ ID NO: 80987 - DNA, 1323 bp, Artificial Sequence
  derived and/or modified sequence
atgaccagcttcagcaccagcgcccagtgcagcaccagtgacagcgcctgccgcatcagccctggccagatcaaccaggtgcggcccaagctgcccctgctgaagatcctgcatgctgctggggcccagggcgagatgttcaccgtgaaggaggtgatgcactacctgggccagtacatcatggtgaagcagctgtatgaccagcaggagcagcacatggtgtactgcggcggggacctgctgggggagctgctgggccggcagagcttctctgtgaaggaccccagccccctgtatgacatgctgaggaagaacctggtgaccctggccacagccaccacagatgctgcccagaccctggccctggcccaggaccacagcatggacatccccagccaggaccagctgaagcagagcgctgaggagagcagcaccagcaggaagaggaccacagaagatgacatccccaccctgcccaccagcgagcacaagtgcatccacagccgggaggatgaggacctgattgagaacctggcccaggatgagaccagccggctggacctgggctttgaggagtgggatgtggccggcctgccctggtggttcctgggcaacctgcggagcaactacacccccaggagcaatggcagcacagacctgcagaccaaccaggtgattgaggtgggcaagaatgatgacctggaggacagcaagagcctgagtgatgacacagatgtggaggtgaccagtgaagatgagtggcagtgcacagagtgcaagaagttcaacagccccagcaagcgctactgcttccgctgctgggccctgaggaaggactggtacagcgactgcagcaagctgacccacagcctgagcaccagtgacatcacagccatccctgagaaggaaaatgaaggaaatgatgtgcctgactgcaggaggaccatcagcgcccctgtggtgcggcccaaggatgcctacatcaagaaggagaacagcaagctgtttgacccctgcaacagcgtggagttcctggacctggcccacagcagcgagagccaggagaccatcagctccatgggagagcagctggacaacctgtctgagcagaggacagacacagagaacatggaggactgccagaacctgctgaagccctgcagcctgtgtgagaagaggcccagagatggcaacatcatccacggccgcacaggccacctggtgacctgcttccactgtgcccggcggctgaagaaggccggggccagctgccccatctgcaagaaggagatccagctggtgatcaaggtgttcatcgcctag

SEQ ID NO: 80988 - DNA, 513 bp, Artificial Sequence
  derived and/or modified sequence
gacttaattgaaaatttagcccaagatgaaacatctaggctggaccttggatttgaggagtgggatgtagctggcctgccttggtggtttttaggaaacttgagaagcaactatacacctagaagtaatggctcaactgatttacagacaaatcaggtgattgaagtgggaaaaaatgatgacctggaggactctaagtccttaagtgatgataccgatgtagaggttacctctgaggatgagtggcagtgtactgaatgcaagaaatttaactctccaagcaagaggtactgttttcgttgttgggccttgaggaaggattggtattcagattgttcaaagttaacccattctctctccacgtctgatatcactgccatacctgaaaaggaaaatgaaggaaatgatgtccctgattgtcgaagaaccatttcggctcctgtcgttagacctaaagatgcgtatataaagaaagaaaactccaaactttttgatccctgcaactcagtggaa

SEQ ID NO: 80989 - DNA, 1477 bp, Artificial Sequence
  derived and/or modified sequence
agcgactcatggagctgccgtaagttttaccaacagactgcagtttcttcactaccaaaatgacatcattttccacctctgctcagtgttcaacatctgacagtgcttgcaggatctctcctggacaaatcaatcaggtacgaccaaaactgccgcttttgaagattttgcatgcagcaggtgcgcaaggtgaaatgttcactgttaaagaggtcatgcactatttaggtcagtacataatggtgaagcaactttatgatcagcaggagcagcatatggtatattgtggtggagatcttttgggagaactactgggacgtcagagcttctccgtgaaagacccaagccctctctatgatatgctaagaaagaatcttgtcactttagccactgctactacagatgctgctcagactctcgctctcgcacaggatcacagtatggatattccaagtcaagaccaactgaagcaaagtgcagaggaaagttccacttccagaaaaagaactacagaagacgatatccccacactgcctacctcagagcataaatgcatacattctagagaagatgaagacttaattgaaaatttagcccaagatgaaacatctaggctggaccttggatttgaggagtgggatgtagctggcctgccttggtggtttttaggaaacttgagaagcaactatacacctagaagtaatggctcaactgatttacagacaaatcaggtgattgaagtgggaaaaaatgatgacctggaggactctaagtccttaagtgatgataccgatgtagaggttacctctgaggatgagtggcagtgtactgaatgcaagaaatttaactctccaagcaagaggtactgttttcgttgttgggccttgaggaaggattggtattcagattgttcaaagttaacccattctctctccacgtctgatatcactgccatacctgaaaaggaaaatgaaggaaatgatgtccctgattgtcgaagaaccatttcggctcctgtcgttagacctaaagatgcgtatataaagaaagaaaactccaaactttttgatccctgcaactcagtggaattcttggatttggctcacagttctgaaagccaagagaccatctcaagcatgggagaacagttagataacctttctgaacagagaacagatacagaaaacatggaggattgccagaatctcttgaagccatgtagcttatgtgagaaaagaccacgagacgggaacattattcatggaaggacgggccatcttgtcacttgttttcactgtgccagaagactaaagaaggctggggcttcatgccctatttgcaagaaagagattcagctggttattaaggtttttatagcataatggtagtacgaacataaaaatgcatttattccgttcacttaccacattatttgaaaatcaatcctttatttaattttatttccaacctgtcagag

SEQ ID NO: 80990 - DNA, 516 bp, Artificial Sequence
  derived and/or modified sequence
gacctgatcgagaacctggcccaggacgagaccagccggctggacctgggcttcgaggagtgggatgtggccgggctgccttggtggtttttaggtaacttacggagtaattacacaccaaggtccaatggctctacagatctgcagacaaaccaggtcatcgaggtggggaaaaacgacgatctcgaagacagcaagagcctgtccgatgatacagacgtcgaggtcacatctgaagacgaatggcagtgcacagaatgtaagaaattcaactcgcctagcaagcggtattgctttagatgctgggctctaaggaaggactggtattctgattgtagcaaactcacacatagcctgtccacaagcgatattacggctatccccgaaaaggagaacgaaggaaatgacgtccctgactgtcgaaggactatttccgctcctgtggtgaggcctaaagatgcgtatattaagaaagagaattctaagttgttcgatccctgcaactcagtcgagtag

SEQ ID NO: 80991 - DNA, 1323 bp, Artificial Sequence
  derived and/or modified sequence
atgaccagcttcagcaccagcgcccagtgcagcaccagcgacagcgcttgcagaatttcccctggacagatcaaccaggtgaggcccaaactcccattgctcaagatcctgcatgcagccggcgctcagggtgaaatgttcactgtgaaggaggtgatgcattacctgggacagtatatcatggtaaaacaactgtacgaccagcaagaacaacatatggtctactgtggtggtgacctgttgggagagctgctcggtcgccagtcgttctcggtgaaggacccatcccctttgtacgatatgctcaggaaaaatctggtgactttggcgacggccacgaccgacgctgcacagaccctcgctctggcacaggatcactctatggatatcccctcccaggatcagctgaagcaatccgctgaagaaagttccacatctagaaagcgcactacggaagatgatattcctaccctgccaacatcagagcataagtgtattcacagcagggaggatgaagatctgatagagaatcttgcacaggacgaaacttcgcggttggatctcggctttgaagaatgggacgtggccggcctgccatggtggttcctagggaatttgaggagcaactataccccaaggagcaacggtagcacggacctgcaaactaatcaagtgatagaagtgggcaaaaacgatgatcttgaggactcaaagtctctttccgacgataccgacgtggaggttacctctgaggacgaatggcagtgcaccgagtgtaagaagtttaacagtccaagtaagcgatactgctttcggtgttgggccctgcggaaagattggtacagcgactgcagcaagcttacgcatagcctttccacatctgatattactgctatcccagaaaaggagaacgagggtaatgatgtacctgattgccgccggactatatccgccccagtcgtacgtcccaaggacgcgtatattaaaaaggaaaacagcaaactgtttgacccgtgtaactctgttgaatttctggatcttgcccattcctcggagagtcaagaaactatctccagtatgggagaacagttggacaatctgtcggagcagaggacagatactgaaaacatggaagattgtcagaatctgctgaagccttgtagcctgtgtgagaagcggccacgcgatggaaacatcattcacggccgaaccgggcatttagtgacttgctttcactgcgcacgtcgtctgaaaaaggccggcgcaagctgtccgatctgcaaaaaggagattcagcttgtgataaaggtgtttatcgcttag

SEQ ID NO: 80992 - DNA, 516 bp, Artificial Sequence
  derived and/or modified sequence
gatctgatagagaaccttgcgcaggatgaaacgagcagactggaccttggcttcgaggagtgggatgttgcagggttaccatggtggtttctaggcaacttgaggtcgaactacactccccgaagtaacggaagcaccgatttacagaccaaccaggtgatcgaagtgggcaagaatgacgacctggaagatagtaaaagcctttccgacgatactgacgtagaggtgacttcagaagatgaatggcagtgtacagagtgtaagaaatttaattccccatccaaaaggtactgttttcgctgctgggcactgcgcaaggattggtacagcgactgtagcaagctcacccactctctgagcacatcagatattaccgccattcctgaaaaggagaacgagggtaacgatgtacccgactgtcgacgtaccatctcggctcctgttgttcggcctaaggacgcatacataaagaaagaaaacagtaagctgttcgacccgtgtaactccgttgaatag

SEQ ID NO: 80993 - DNA, 1323 bp, Artificial Sequence
  derived and/or modified sequence
atgacatcattctccactagcgcacagtgcagtacttctgatagcgcctgtaggatcagccctggacagataaaccaagtgaggccaaaactcccattgctcaagatcctgcatgcagcgggagcccagggcgagatgtttactgtgaaggaagtgatgcactacctaggacagtacataatggtgaagcagctgtatgaccagcaagagcaacacatggtgtattgcggtggcgatttgctgggtgagctcctcgggagacagagcttttccgttaaggatcctagcccgctatatgacatgcttagaaagaatctggtgaccctcgcaactgccaccactgacgcggcacagactctggcgctggctcaagaccattccatggatatacctagccaggatcagcttaagcagtctgcggaggagagcagtacaagtcggaaacggacaactgaagacgatatccctactctgcctacgtcagagcacaagtgcatacattcccgggaggatgaggatctcatcgaaaacctggcccaggacgaaactagtagacttgacctcgggttcgaagagtgggacgtggccggtctgccttggtggttcctcggcaacctccggtccaactacaccccaaggtcaaacggctccactgacctccaaaccaatcaggttattgaagtgggcaaaaatgatgatctggaagattcaaagagcctgagcgacgacacagacgtggaagtgacctctgaagacgagtggcagtgcaccgagtgcaaaaagtttaattcaccgagtaagagatactgctttaggtgctgggccctgaggaaagattggtactcagactgctctaagcttacacattctctgagcacatctgacatcacagccatccccgaaaaggaaaacgaagggaatgacgtacccgactgtaggcgcacgataagcgccccagttgtgaggccgaaggatgcatacattaagaaggaaaacagcaaactgtttgatccctgcaactcagtagagttcctggatcttgcacacagttccgagagccaggagactatctcctccatgggtgagcagctggacaacctcagtgaacagaggaccgacactgaaaatatggaagattgccagaatctgcttaagccatgttctttgtgcgagaaacggcctcgcgatggaaacatcatccatggaagaacagggcacttagtaacgtgtttccactgtgctcgaagactcaaaaaggcaggcgcatcatgccccatctgcaaaaaggagattcagctggtcattaaagtgtttatcgcttag

SEQ ID NO: 80994 - protein, 164 aa, Artificial Sequence
  derived and/or modified sequence
MTSFSTSAQCSTSDSACRISPGQINQENEGNDVPDCRRTISAPVVRPKDAYIKKENSKLFDPCNSVEFLDLAHSSESQETISSMGEQLDNLSEQRTDTENMEDCQNLLKPCSLCEKRPRDGNIIHGRTGHLVTCFHCARRLKKAGASCPICKKEIQLVIKVFIA

SEQ ID NO: 80995 - DNA, 495 bp, Artificial Sequence
  derived and/or modified sequence
atgaccagcttcagcaccagcgcccagtgcagcaccagcgacagcgcctgcagaatcagccccggccagatcaaccaggagaacgagggcaacgacgtgcccgactgcagaagaaccatcagcgcccccgtggtgagacccaaggacgcctacatcaagaaggagaacagcaagctgttcgacccctgcaacagcgtggagttcctggacctggcccacagcagcgagagccaggagaccatcagcagcatgggcgagcagctggacaacctgagcgagcagagaaccgacaccgagaacatggaggactgccagaacctgctgaagccctgcagcctgtgcgagaagagacccagagacggcaacatcatccacggcagaaccggccacctggtgacctgcttccactgcgccagaagactgaagaaggccggcgccagctgccccatctgcaagaaggagatccagctggtgatcaaggtgttcatcgcctag

SEQ ID NO: 80996 - DNA, 495 bp, Artificial Sequence
  derived and/or modified sequence
atgacatccttctctacttcagcacagtgctcaacgtcagacagcgcctgtaggatatctcccggacaaatcaatcaggagaatgaggggaatgacgtgcccgattgtaggaggacaatttcagctccagtggtgcgacccaaagatgcatacattaaaaaagagaactctaaactgttcgacccgtgcaacagcgtggaattcctggatctggcccacagctcagaatcccaagaaaccatcagttcgatgggagagcaactagacaacctgtccgagcaaaggactgacactgagaatatggaggactgtcaaaaccttttgaaaccatgttccctgtgtgagaagcgcccccgagatgggaacatcatacacggaaggacaggccacctcgtgacatgctttcattgcgcccggagacttaagaaggcgggtgcgagctgtccgatctgcaagaaagaaatacaactcgttattaaagtctttattgcctag

SEQ ID NO: 80997 - DNA, 495 bp, Artificial Sequence
  derived and/or modified sequence
atgaccagcttcagcaccagcgcccagtgcagcaccagtgacagcgcctgccgcatcagccctggccagatcaaccaggagaatgaaggaaatgatgtgcctgactgcaggaggaccatcagcgcccctgtggtgcggcccaaggatgcctacatcaagaaggagaacagcaagctgtttgacccctgcaacagcgtggagttcctggacctggcccacagcagcgagagccaggagaccatcagctccatgggagagcagctggacaacctgtctgagcagaggacagacacagagaacatggaggactgccagaacctgctgaagccctgcagcctgtgtgagaagaggcccagagatggcaacatcatccacggccgcacaggccacctggtgacctgcttccactgtgcccggcggctgaagaaggccggggccagctgccccatctgcaagaaggagatccagctggtgatcaaggtgttcatcgcctag

SEQ ID NO: 80998 - DNA, 646 bp, Artificial Sequence
  derived and/or modified sequence
ctcatggagctgccgtaagttttaccaacagactgcagtttcttcactaccaaaatgacatcattttccacctctgctcagtgttcaacatctgacagtgcttgcaggatctctcctggacaaatcaatcaggaaaatgaaggaaatgatgtccctgattgtcgaagaaccatttcggctcctgtcgttagacctaaagatgcgtatataaagaaagaaaactccaaactttttgatccctgcaactcagtggaattcttggatttggctcacagttctgaaagccaagagaccatctcaagcatgggagaacagttagataacctttctgaacagagaacagatacagaaaacatggaggattgccagaatctcttgaagccatgtagcttatgtgagaaaagaccacgagacgggaacattattcatggaaggacgggccatcttgtcacttgttttcactgtgccagaagactaaagaaggctggggcttcatgccctatttgcaagaaagagattcagctggttattaaggtttttatagcataatggtagtacgaacataaaaatgcatttattccgttcacttaccacattatttgaaaatcaatcctttatttaattttatttccaacctgtcagagaa

SEQ ID NO: 80999 - DNA, 495 bp, Artificial Sequence
  derived and/or modified sequence
atgaccagcttcagcaccagcgcccagtgcagcaccagcgacagcgcgtgccgtattagccctggtcagatcaatcaggagaacgaaggtaacgacgtgcctgactgtcggcgtacgattagcgcacccgtcgtcagaccaaaagacgcttacatcaagaaagaaaattcgaagctgttcgacccttgcaatagtgtagagttcctcgaccttgctcacagctctgaatcgcaggagactatttctagcatgggggagcagctggacaacctgtctgagcaaaggactgacaccgaaaatatggaggactgtcagaatctgctcaagccttgtagcctctgtgagaagagacctagggacgggaacattattcacggaaggaccggccatctggtaacatgcttccactgtgccagaagactgaaaaaggctggtgcctcatgccccatttgcaagaaggaaatccaattagtgatcaaggttttcattgcttag

SEQ ID NO: 81000 - DNA, 495 bp, Artificial Sequence
  derived and/or modified sequence
atgaccagtttctccacgtcagcccagtgtagcacttcagactctgcctgtcgaataagcccgggtcagatcaatcaggaaaatgagggaaacgacgtccctgactgcaggcggaccatctccgctccagtggtccgaccaaaagatgcctacattaagaaggagaacagcaagctatttgacccctgcaatagtgtcgaattccttgatcttgcacactcgagcgagtcccaggaaacgatcagctccatgggagaacagctggacaatctgagcgagcagcgcaccgacaccgaaaacatggaggactgccaaaacttgcttaagccatgctctctatgtgagaagcggcctagagacgggaacataattcacgggcgtacgggccacctggttacctgctttcactgcgcacgccgactcaagaaagcaggcgcttcctgtcccatctgtaaaaaggagattcagctcgttatcaaagtgttcatagcatag

SEQ ID NO: 81001 - protein, 254 aa, Artificial Sequence
  derived and/or modified sequence
MTAGSAHSQKVCFADFKHPCYKMAYFHELSSRVSFQEARLACESEGGVLLSLENEAEQKLIESMLQNLTKPGTGISDGDFWIGLWRNGDGQTSGACPDLYQWSDGSNSQYRNWYTDEPSCGSEKCVVMYHQPTANPGLGGPYLYQWNDDRCNMKHNYICKYEPEINPTAPVEKPYLTNQPGDTHQNVVVTEAGIIPNLIYVVIPTIPLLLLILVAFGTCCFQMLHKSKGRTKTSPNQSTLWISKSTRKESGMEV

SEQ ID NO: 81002 - DNA, 2239 bp, Artificial Sequence
  derived and/or modified sequence
gcttgaagatggcagatcgtgggacttctcagcctccataattgagtgagccaattccctgaatacaacaagaagatgcccatctgtagaccaggaggtggtccctccccagaaactggatgggccagcacgttgattctgaacttctagcctccagaactgccaaaaggtgtgttttgctgacttcaagcatccctgctacaaaatggcctacttccatgaactgtccagccgagtgagctttcaggaggcacgcctggcttgtgagagtgagggaggagtcctcctcagccttgagaatgaagcagaacagaagttaatagagagcatgttgcaaaacctgacaaaacccgggacagggatttctgatggtgatttctggatagggctttggaggaatggagatgggcaaacatctggtgcctgcccagatctctaccagtggtctgatggaagcaattcccagtaccgaaactggtacacagatgaaccttcctgcggaagtgaaaagtgtgttgtgatgtatcaccaaccaactgccaatcctggccttgggggtccctacctttaccagtggaatgatgacaggtgtaacatgaagcacaattatatttgcaagtatgaaccagagattaatccaacagcccctgtagaaaagccttatcttacaaatcaaccaggagacacccatcagaatgtggttgttactgaagcaggtataattcccaatctaatttatgttgttataccaacaatacccctgctcttactgatactggttgcttttggaacctgttgtttccagatgctgcataaaagtaaaggaagaacaaaaactagtccaaaccagtctacactgtggatttcaaagagtaccagaaaagaaagtggcatggaagtataataactcattgacttggttccagaattttgtaattctggatctgtataaggaatggcatcagaacaatagcttggaatggcttgaaatcacaaaggatctgcaagatgaactgtaagctcccccttgaggcaaatattaaagtaatttttatatgtctattatttcatttaaagaatatgctgtgctaataatggagtgagacatgcttattttgctaaaggatgcacccaaacttcaaacttcaagcaaatgaaatggacaatgcagataaagttgttatcaacacgtcgggagtatgtgtgttagaagcaattccttttatttctttcacctttcataagttgttatctagtcaatgtaatgtatattgtattgaaatttacagtgtgcaaaagtattttacctttgcataagtgtttgataaaaatgaactgttctaatatttatttttatggcatctcatttttcaatacatgctcttttgattaaagaaacttattactgttgtcaactgaattcacacacacacaaatatagtaccatagaaaaagtttgttttctcgaaataattcatctttcagcttctctgcttttggtcaatgtctaggaaatctcttcagaaataagaagctatttcattaagtgtgatataaacctcctcaaacattttacttagaggcaaggattgtctaatttcaattgtgcaagacatgtgccttataattatttttagcttaaaattaaacagattttgtaataatgtaactttgttaataggtgcataaacactaatgcagtcaatttgaacaaaagaagtgacatacacaatataaatcatatgtcttcacacgttgcctatataatgagaagcagctctctgagggttctgaaatcaatgtggtccctctcttgcccactaaacaaagatggttgttcggggtttgggattgacactggaggcagatagttgcaaagttagtctaaggtttccctagctgtatttagcctctgactatattagtatacaaagaggtcatgtggttgagaccaggtgaatagtcactatcagtgtggagacaagcacagcacacagacattttaggaaggaaaggaactacgaaatcgtgtgaaaatgggttggaacccatcagtgatcgcatattcattgatgagggtttgcttgagatagaaaatggtggctcctttctgtcttatctcctagtttcttcaatgcttacgccttgttcttctcaagagaaagttgtaactctctggtcttcatatgtccctgtgctccttttaaccaaataaagagttcttgtttctgaagaatga

SEQ ID NO: 81003 - DNA, 540 bp, Artificial Sequence
  derived and/or modified sequence
gttcttcagaagctgttcgatggcaacgtggcggacatggagctgtgaggccaaagaatctttttcttgcacttggacatcaggaccccaggttctctggtcttgggactctgagacttgcaccaggaatcctgcccaggctctcaggcctttggactcagactgagctacttcactggctttcctggttctccagcttgaagatggcagatcgtgggacttctcagcctccataattgagtgagccaattccctggagaatacaacaagaagatgcccatctgtagaccaggaggtggtccctccccagaaactggatgggccagcacgttgattctgaacttctagcctccagaactgccaaaaggtgtgttttgctgacttcaagcatccctgctacaaaatggcctacttccatgaactgtccagccgagtgagctttcaggaggcacgcctggcttgtgagagtgagggaggagtcctcctcagccttgagaatgaagcagaacagaagttaatagagagcatgttgcaaaacct

SEQ ID NO: 81004 - DNA, 1637 bp, Artificial Sequence
  derived and/or modified sequence
gcacactgcgttccaagttggggacttcccagaaaatgaagtcagctggagttgggccgaggtatacttggtaatgactgcaggttcggcacacagccaaaaggtgtgttttgctgacttcaagcatccctgctacaaaatggcctacttccatgaactgtccagccgagtgagctttcaggaggcacgcctggcttgtgagagtgagggaggagtcctcctcagccttgagaatgaagcagaacagaagttaatagagagcatgttgcaaaacctgacaaaacccgggacagggatttctgatggtgatttctggatagggctttggaggaatggagatgggcaaacatctggtgcctgcccagatctctaccagtggtctgatggaagcaattcccagtaccgaaactggtacacagatgaaccttcctgcggaagtgaaaagtgtgttgtgatgtatcaccaaccaactgccaatcctggccttgggggtccctacctttaccagtggaatgatgacaggtgtaacatgaagcacaattatatttgcaagtatgaaccagagattaatccaacagcccctgtagaaaagccttatcttacaaatcaaccaggagacacccatcagaatgtggttgttactgaagcaggtataattcccaatctaatttatgttgttataccaacaatacccctgctcttactgatactggttgcttttggaacctgttgtttccagatgctgcataaaagtaaaggaagaacaaaaactagtccaaaccagtctacactgtggatttcaaagagtaccagaaaagaaagtggcatggaagtataataactcattgacttggttccagaattttgtaattctggatctgtataaggaatggcatcagaacaatagcttggaatggcttgaaatcacaaaggatctgcaagatgaactgtaagctcccccttgaggcaaatattaaagtaatttttatatgtctattatttcatttaaagaatatgctgtgctaataatggagtgagacatgcttattttgctaaaggatgcacccaaacttcaaacttcaagcaaatgaaatggacaatgcagataaagttgttatcaacacgtcgggagtatgtgtgttagaagcaattccttttatttctttcacctttcataagttgttatctagtcaatgtaatgtatattgtattgaaatttacagtgtgcaaaagtattttacctttgcataagtgtttgataaaaatgaactgttctaatatttatttttatggcatctcatttttcaatacatgctcttttgattaaagaaacttattactgttgtcaactgaattcacacacacacaaatatagtaccatagaaaaagtttgttttctcgaaataattcatctttcagcttctctgcttttggtcaatgtctaggaaatctcttcagaaataagaagctatttcattaagtgtgatataaacctcctcaaacattttacttagaggcaaggattgtctaatttcaattgtgcaagacatgtgccttataattatttttagcttaaaattaaacagattttgtaataatgtaactttgttaataggtgcataaacactaatgcagtc

SEQ ID NO: 81005 - DNA, 765 bp, Artificial Sequence
  derived and/or modified sequence
atgaccgccggcagcgcccacagccagaaggtgtgcttcgccgacttcaagcacccctgctacaagatggcctacttccacgagctgagcagcagagtgagcttccaggaggccagactggcctgcgagagcgagggcggcgtgctgctgagcctggagaacgaggccgagcagaagctgatcgagagcatgctgcagaacctgaccaagcccggcaccggcatcagcgacggcgacttctggatcggcctgtggagaaacggcgacggccagaccagcggcgcctgccccgacctgtaccagtggagcgacggcagcaacagccagtacagaaactggtacaccgacgagcccagctgcggcagcgagaagtgcgtggtgatgtaccaccagcccaccgccaaccccggcctgggcggcccctacctgtaccagtggaacgacgacagatgcaacatgaagcacaactacatctgcaagtacgagcccgagatcaaccccaccgcccccgtggagaagccctacctgaccaaccagcccggcgacacccaccagaacgtggtggtgaccgaggccggcatcatccccaacctgatctacgtggtgatccccaccatccccctgctgctgctgatcctggtggccttcggcacctgctgcttccagatgctgcacaagagcaagggcagaaccaagaccagccccaaccagagcaccctgtggatcagcaagagcaccagaaaggagagcggcatggaggtgtag

SEQ ID NO: 81006 - DNA, 765 bp, Artificial Sequence
  derived and/or modified sequence
atgaccgccggcagtgctcacagccagaaggtctgctttgccgatttcaagcacccctgttataagatggcttacttccacgagctcagctcgcgcgtctcattccaggaagctagacttgcatgcgaaagcgaaggcggagttctcctctctctggagaacgaagctgagcagaaactcatcgaaagtatgctccagaatttgaccaagcccgggaccggcatctccgatggagacttttggattggcctgtggagaaacggggacgggcagacatctggcgcctgtcccgatctgtatcagtggagcgatggaagcaactcccaataccgcaattggtataccgatgagcctagctgcggcagcgaaaagtgcgtcgtgatgtaccatcagccaacagcgaaccccggtctgggtggaccttatctataccagtggaatgacgatagatgcaacatgaagcacaattacatctgcaagtacgagccagagatcaacccaacagcccctgttgagaaaccttacttgacaaatcagcccggcgacacccatcagaatgtggttgtgactgaagcaggcatcatcccaaaccttatttatgtcgtgataccgacgataccccttctcctgctgatactcgtggccttcggaacctgctgcttccagatgctacacaaatcaaaaggaagaaccaagacgtcccccaatcagagtacactctggatctcgaagtcgactagaaaggaaagcggaatggaggtatag

SEQ ID NO: 81007 - DNA, 765 bp, Artificial Sequence
  derived and/or modified sequence
atgacagctggcagcgcccacagccagaaggtgtgctttgctgacttcaagcacccctgctacaagatggcctacttccacgagctgagcagccgggtgtccttccaggaggcccggctggcctgtgagagcgagggcggcgtgctgctgagcctggagaatgaggccgagcagaagctgattgaatccatgctgcagaacctgaccaagccaggcaccggcatcagtgatggagacttctggattggcctgtggagaaatggagatggccagaccagcggggcctgcccagacctgtaccagtggagcgatggcagcaacagccagtacagaaactggtacacagatgagcccagctgtggcagcgagaagtgtgtggtgatgtaccaccagcccacagccaaccctggcctgggcggcccctacctgtaccagtggaatgatgaccgctgcaacatgaagcacaactacatctgcaagtatgagcctgagatcaaccccacagcccctgtggagaagccctacctgaccaaccagcccggggacacccaccagaatgtggtggtgacagaggccggcatcatccccaacctgatctacgtggtgatccccaccatccccctgctgctgctgatcctggtggccttcggcacctgctgcttccagatgctgcacaagagcaagggccgcaccaagaccagccccaaccagagcaccctgtggatcagcaagagcaccaggaaggagagcggcatggaggtgtag

SEQ ID NO: 81008 - DNA, 765 bp, Artificial Sequence
  derived and/or modified sequence
atgaccgccggcagcgcccacagccagaaggtgtgcttcgccgacttcaagcatccatgttataaaatggcatactttcacgaactgagctccagagtgagttttcaggaggcgcgtctcgcctgtgaatccgaagggggggtgctgctgtctttagagaacgaagccgagcagaagctcattgagtccatgttacaaaacctcacgaaacctggcactggcattagtgatggagatttttggattggcctgtggaggaacggcgatgggcagacatccggggcttgcccagacttataccaatggtctgatggatccaattcgcagtaccgcaactggtataccgatgaaccaagttgcgggagcgaaaagtgcgtggtgatgtatcaccagccaaccgccaatcccggattagggggaccctatttataccagtggaacgacgataggtgcaatatgaaacacaactatatatgtaaatacgagccagaaattaacccaacagctcccgtcgaaaagccctatctgaccaaccagcctggcgatacgcatcagaatgtggtggtgacagaggccgggattattcccaacctgatctatgtggtaatccctactattcccctccttttgctgatcctggtagcctttggaacctgttgctttcaaatgctgcataaaagtaagggacggaccaaaaccagcccgaaccagagcaccctgtggatcagcaaatctaccagaaaggagagtgggatggaggtgtag

SEQ ID NO: 81009 - DNA, 765 bp, Artificial Sequence
  derived and/or modified sequence
atgacagcaggctccgcacattcccagaaggtctgttttgccgattttaagcatccgtgctataaaatggcttactttcatgaactttcaagcagggtgagcttccaggaggctcgcttggcttgtgaaagcgagggcggagttctgctatcactcgagaatgaggctgagcagaagctgatcgaaagcatgctgcagaatctgactaagcccggaaccggcatctctgatggggatttttggatcggcctctggaggaatggagatggccagactagcggagcttgtcccgacctgtatcaatggagcgacggctctaactcccagtatcgtaattggtacactgatgagccaagctgtggttccgaaaagtgtgtagtgatgtatcatcagcctactgccaacccgggactgggaggaccctatctgtatcagtggaacgatgacagatgcaatatgaagcacaactacatctgcaagtacgaacctgagattaaccctactgctccagttgagaaaccatatttgactaatcaacccggtgacacacatcaaaacgtggtcgtaacggaggcaggaatcattcccaatctgatttatgtggtgattccaaccattccacttttactgctcatccttgtcgcatttggcacctgttgttttcagatgttgcataagagtaagggcaggactaagacaagcccgaatcagagtacactttggatctccaaatcaacacgcaaggagagtgggatggaggtctag

SEQ ID NO: 81010 - protein, 46 aa, Artificial Sequence
  derived and/or modified sequence
MAYFHELSSRVSFQEARLACESEGGVLLSLENEAEQKLIESMLQNL

SEQ ID NO: 81011 - DNA, 699 bp, Artificial Sequence
  derived and/or modified sequence
atggcctacttccacgagctgagcagcagagtgagcttccaggaggccagactggcctgcgagagcgagggcggcgtgctgctgagcctggagaacgaggccgagcagaagctgatcgagagcatgctgcagaacctgaccaagcccggcaccggcatcagcgacggcgacttctggatcggcctgtggagaaacggcgacggccagaccagcggcgcctgccccgacctgtaccagtggagcgacggcagcaacagccagtacagaaactggtacaccgacgagcccagctgcggcagcgagaagtgcgtggtgatgtaccaccagcccaccgccaaccccggcctgggcggcccctacctgtaccagtggaacgacgacagatgcaacatgaagcacaactacatctgcaagtacgagcccgagatcaaccccaccgcccccgtggagaagccctacctgaccaaccagcccggcgacacccaccagaacgtggtggtgaccgaggccggcatcatccccaacctgatctacgtggtgatccccaccatccccctgctgctgctgatcctggtggccttcggcacctgctgcttccagatgctgcacaagagcaagggcagaaccaagaccagccccaaccagagcaccctgtggatcagcaagagcaccagaaaggagagcggcatggaggtgtag

SEQ ID NO: 81012 - DNA, 141 bp, Artificial Sequence
  derived and/or modified sequence
atggcctacttccacgagctgagcagcagagtgagcttccaggaggccagactggcctgcgagagcgagggcggcgtgctgctgagcctggagaacgaggccgagcagaagctgatcgagagcatgctgcagaacctgtag

SEQ ID NO: 81013 - DNA, 699 bp, Artificial Sequence
  derived and/or modified sequence
atggcatactttcacgagctttcctcccgtgtgtcctttcaggaggcaaggctggcttgcgaaagcgaaggaggcgtcctgctgtctcttgaaaacgaggcggagcagaaactgatcgagagcatgctccaaaacttaaccaaaccaggaacgggtatttccgatggggatttttggattgggttgtggcgaaatggcgacggtcagacctcaggagcctgcccagatctgtatcagtggagtgacggatccaactcacagtaccgtaactggtatacggatgaaccttcatgcggctccgaaaagtgtgtggttatgtatcaccagcccacagccaaccccggactaggtgggccctatctgtatcagtggaacgatgatcgctgcaatatgaagcacaactacatttgcaagtacgagcccgagattaatcccaccgcgccagtggaaaagccttacctgactaatcagccaggggacactcaccagaacgtggttgtaacagaggccggcattatcccgaacctgatatacgtggtaatccctaccatcccactcctgctcctgatattagtagcctttggcacttgttgcttccaaatgttacacaagagtaaagggcggactaagacatcccctaaccagtccactttatggatcagcaagtctaccagaaaagagagcgggatggaagtgtag

SEQ ID NO: 81014 - DNA, 699 bp, Artificial Sequence
  derived and/or modified sequence
atggcctacttccatgagctctcgagtagggtctcattccaggaagctagactcgcgtgtgaatccgagggcggagtgctcctgagccttgaaaacgaggcagagcaaaaattaattgaatctatgctgcagaatctcacaaagccaggcaccgggatatcagatggggacttttggatagggctgtggcggaatggcgacgggcagacctctggagcgtgtcccgatctctaccaatggagtgatggaagcaactcacagtacaggaattggtatacggacgaacctagctgcggatcagaaaaatgcgtggtcatgtatcatcagccaactgccaaccctggactggggggtccctacctgtaccaatggaacgatgaccggtgcaatatgaaacataattacatatgcaagtacgagcccgagatcaacccaactgcacccgtggagaaaccatatcttaccaaccaacctggtgatactcatcagaacgtggtggtgaccgaggccgggattattccgaacctaatatatgttgtcatcccaaccattcctctcctgttgctcattctggtggccttcgggacatgctgttttcagatgctccacaagtcaaaaggccgcacaaagaccagcccaaaccagtccaccctgtggatatccaaatctactaggaaagaatccggcatggaggtttag

SEQ ID NO: 81015 - DNA, 141 bp, Artificial Sequence
  derived and/or modified sequence
atggcctacttccacgaactgtcctcacgcgtctcatttcaagaggccagactggcttgcgagtccgaaggcggtgtccttctatcactagagaatgaggccgagcaaaagttaattgaatccatgctgcaaaacctctag

SEQ ID NO: 81016 - DNA, 141 bp, Artificial Sequence
  derived and/or modified sequence
atggcttacttccacgagctgtcttcaagggtgagttttcaggaagcccgccttgcttgcgaaagtgagggaggcgttcttctttctctcgaaaatgaggctgagcagaagctcatcgagagcatgctgcagaacctgtag

SEQ ID NO: 81017 - DNA, 141 bp, Artificial Sequence
  derived and/or modified sequence
atggcttactttcatgagctgtcctcgagggtgtcctttcaggaggctcgtctcgcctgtgagtcagagggaggagtgctactttcccttgagaatgaagcggaacagaaactgatcgagtctatgctgcagaatctctag

SEQ ID NO: 81018 - DNA, 699 bp, Artificial Sequence
  derived and/or modified sequence
atggcctacttccacgagctgagcagccgggtgtccttccaggaggcccggctggcctgtgagagcgagggcggcgtgctgctgagcctggagaatgaggccgagcagaagctgattgaatccatgctgcagaacctgaccaagccaggcaccggcatcagtgatggagacttctggattggcctgtggagaaatggagatggccagaccagcggggcctgcccagacctgtaccagtggagcgatggcagcaacagccagtacagaaactggtacacagatgagcccagctgtggcagcgagaagtgtgtggtgatgtaccaccagcccacagccaaccctggcctgggcggcccctacctgtaccagtggaatgatgaccgctgcaacatgaagcacaactacatctgcaagtatgagcctgagatcaaccccacagcccctgtggagaagccctacctgaccaaccagcccggggacacccaccagaatgtggtggtgacagaggccggcatcatccccaacctgatctacgtggtgatccccaccatccccctgctgctgctgatcctggtggccttcggcacctgctgcttccagatgctgcacaagagcaagggccgcaccaagaccagccccaaccagagcaccctgtggatcagcaagagcaccaggaaggagagcggcatggaggtgtag

SEQ ID NO: 81019 - DNA, 141 bp, Artificial Sequence
  derived and/or modified sequence
atggcctacttccacgagctgagcagccgggtgtccttccaggaggcccggctggcctgtgagagcgagggcggcgtgctgctgagcctggagaatgaggccgagcagaagctgattgaatccatgctgcagaacctgtag

SEQ ID NO: 81020 - DNA, 699 bp, Artificial Sequence
  derived and/or modified sequence
atggcctacttccacgagctgagcagccgggtgagcttccaggaggcacggctggcatgcgagagtgaaggaggggtgctgttatctctggaaaacgaggccgagcagaagctgatcgagagcatgcttcagaatttaacaaaaccgggcacgggcatcagcgacggcgatttctggatcggactgtggcgcaacggtgatggccagaccagtggcgcttgtcctgacctctaccagtggagcgacggcagtaatagccaatatcgcaactggtacacagacgaaccttcctgcgggagtgagaaatgcgtggtcatgtaccaccaacctacagcaaaccctgggctgggaggtccgtacctgtaccaatggaatgatgatcgatgcaacatgaaacacaactacatttgtaaatacgagcccgagatcaatccgacggccccagttgaaaaaccctatttgaccaaccaaccgggtgacacacaccagaacgtggtagtgactgaagccggaattatccctaatttgatatacgtcgtcatccccacaatccctctgctattattgatactggtcgcctttggtacttgctgctttcagatgctccacaagtccaagggacggacgaaaacatcccctaatcagtctactctttggatatcaaagtccactcgcaaagaatcaggtatggaggtctag

SEQ ID NO: 81021 - DNA, 699 bp, Artificial Sequence
  derived and/or modified sequence
atggcctacttccacgagctgagcagccgggtgagcttccaggaggcccggcttgcttgtgaaagcgagggcggggtcctactttctcttgagaacgaagctgagcagaaattgatcgagtccatgctgcaaaacctgactaaacccgggactggcatcagcgacggcgatttctggattggcctctggcggaatggcgatggacagacctcaggtgcctgtcccgacctgtaccaatggagtgatggatccaattcacagtatcgcaactggtacaccgatgaaccgagttgtggctcagaaaagtgtgtcgtgatgtaccaccagcccaccgcaaaccccggcctggggggaccgtatctgtatcagtggaatgacgacagatgcaatatgaagcataactacatctgtaagtacgaacctgagattaacccgacagcccccgtggagaaaccttatcttaccaaccagccaggcgacacccatcagaatgtcgtggtgacagaggctggcataatccccaacctgatatacgtggtcattcctaccattccacttcttttgttgattttggtggctttcgggacatgctgcttccaaatgctccacaagtctaaaggcagaacgaagaccagcccaaatcagagtactctgtggattagtaagagcacgcgcaaagaatcaggtatggaagtgtag

SEQ ID NO: 81022 - DNA, 141 bp, Artificial Sequence
  derived and/or modified sequence
atggcctacttccacgagctgagcagccgggtgagcttccaggaggccaggctcgcctgtgagtctgaggggggtgtgctactgtctctggagaatgaggccgagcagaagctcattgaaagtatgctgcaaaatctttag

SEQ ID NO: 81023 - DNA, 141 bp, Artificial Sequence
  derived and/or modified sequence
atggcctacttccacgagctgagcagccgggtgagcttccaggaggcacgcctggcctgtgaaagcgaggggggagttctgctgagcctcgaaaacgaagcagagcagaaactgatcgaatcaatgctccaaaacctgtag

SEQ ID NO: 81024 - DNA, 141 bp, Artificial Sequence
  derived and/or modified sequence
atggcctacttccacgagctgagcagccgggtgagcttccaggaggctaggctagcttgtgagagcgagggaggcgttctgctgagcctggaaaacgaggctgaacagaagcttattgaaagcatgctgcagaacctgtag

SEQ ID NO: 81025 - DNA, 699 bp, Artificial Sequence
  derived and/or modified sequence
atggcttacttccacgaactgagctcgagagtgtcctttcaagaagcacggctcgcctgtgaatcagaagggggagtcctgctgagtcttgagaacgaggctgagcagaagctcatcgaatcaatgttgcagaatttgaccaagcccggtacaggcatttctgatggtgacttctggatcgggctatggcgcaacggagatggtcaaacttccggggcatgtcccgatttgtatcagtggagcgatggctctaactctcagtacagaaactggtacacggacgaaccttcctgcgggagcgagaagtgtgtggtcatgtaccatcagcctactgccaatcccggacttggtggaccttacctgtatcagtggaatgacgatagatgtaacatgaagcacaattatatatgtaagtatgaaccagagataaatcccactgcacctgtggagaagccttatctcactaaccaaccgggtgacacccatcagaatgttgtggtcaccgaggcaggtataatccctaaccttatatatgtggtgatacctactattcccttactgcttcttatcctcgttgccttcggcacttgttgcttccagatgctccataagtccaagggcagaacaaagacctctcccaatcaaagtacactgtggatctcaaagagcacgagaaaggagagtggaatggaagtgtag

SEQ ID NO: 81026 - DNA, 699 bp, Artificial Sequence
  derived and/or modified sequence
atggcttattttcatgaattgtcttctcgggtgagcttccaggaggcacggctggcttgcgaatcagagggtggtgtgcttttgtctcttgagaatgaagccgagcagaagctcattgaaagcatgttgcagaatttaaccaaaccaggcacaggcatttcagatggtgacttttggattggcctgtggcgaaacggagatggccagaccagcggtgcttgcccagatctgtaccagtggtctgatggcagcaattcacaatacaggaactggtatactgatgagccctcctgcggctctgaaaagtgtgttgtaatgtaccaccagcctacagccaatccagggctgggcggaccgtacctgtaccaatggaacgacgatagatgcaacatgaagcataattatatatgtaagtatgaacctgaaattaatcccacagcccctgtcgagaaaccctatttaacaaaccaacccggtgacactcatcagaacgttgtcgttactgaggctggcattattcctaatttaatttacgtggtgattccgacaattcccctgctcctcctgattctggtcgcctttggaacctgttgcttccagatgctgcacaagagtaagggacgcacaaagacatcaccaaaccagagcacattgtggatctctaagagtaccagaaaggaatcgggaatggaagtgtag

SEQ ID NO: 81027 - DNA, 141 bp, Artificial Sequence
  derived and/or modified sequence
atggcctacttccatgagctgtcttctcgggtgtcctttcaggaggctagactggcttgcgagagcgaggggggagtactgttgtctttagagaacgaagcagaacagaagctgatcgagtccatgctgcaaaacctctag

SEQ ID NO: 81028 - DNA, 141 bp, Artificial Sequence
  derived and/or modified sequence
atggcctactttcatgaactctccagtcgggttagcttccaagaggcccgactggcctgcgagtcagaaggtggagtactgctgtcactggaaaacgaggcagagcaaaaactgatagagtcaatgttgcaaaatctgtag

SEQ ID NO: 81029 - DNA, 141 bp, Artificial Sequence
  derived and/or modified sequence
atggcttacttccatgagttatcttcccgggtgtcctttcaggaagcgagactcgcttgcgaatccgaggggggagtgctcctctcccttgaaaatgaagcagagcagaagctgatagagagtatgctgcagaacttgtag

SEQ ID NO: 81030 - DNA, 711 bp, Artificial Sequence
  derived and/or modified sequence
atggcctacttccacgagctgagcagcagagtgagcttccaggaggccagactggcctgcgagagcgagggcggcgtgctgctgagcctggagaacgaggccgagcagaagctgatcgagagcatgctgcagaacctgaccaagcccggcaccggcatcagcgacggcgacttctggatcggcctgtggagaaacggcgacggccagaccagcggcgcctgccccgacctgtaccagtggagcgacggcagcaacagccagtacagaaactggtacaccgacgagcccagctgcggcagcgagaagtgcgtggtgatgtaccaccagcccaccgccaaccccggcctgggcggcccctacctgtaccagtggaacgacgacagatgcaacatgaagcacaactacatctgcaagtacgagcccgagatcaaccccaccgcccccgtggagaagccctacctgaccaaccagcccggcgacacccaccagaacgtggtggtgaccgaggccgtgaaggaggagcagaagctggtgcagaccagcctgcactgcggcttccagagagtgcccgagaagaaggtggcctggaagtacaacaacagcctgacctggttccagaacttcgtgatcctggacctgtacaaggagtggcaccagaacaacagcctggagtggctggagatcaccaaggacctgcaggacgagctgtag

SEQ ID NO: 81031 - DNA, 711 bp, Artificial Sequence
  derived and/or modified sequence
atggcctattttcacgagctatcaagtcgcgtatccttccaggaggctaggctggcctgtgagtcagaaggaggagtgctcctgtccctcgagaatgaggcggagcaaaaactcattgagtctatgctccagaatctgacaaagccaggcacaggcatcagcgacggggatttctggattggcctatggcgcaatggagacgggcaaacatcaggcgcatgtccggacctctaccagtggagcgacggaagcaattctcagtacagaaattggtatacagatgagccatcctgcggttctgagaaatgtgtagtgatgtaccaccagccaaccgcgaaccccggcttgggaggcccctatctctaccagtggaacgacgatcggtgtaatatgaaacacaattatatctgcaaatacgaacccgagatcaaccccacagctcccgtagaaaaaccttacctcacaaaccaaccaggcgatactcaccagaatgtcgtggtgacagaggcggttaaggaagaacaaaagctggtgcagacgagcctgcactgcggttttcagcgcgtgccagagaaaaaggtcgcgtggaaatataacaattccctgacatggttccagaacttcgtgatactggacctgtacaaagagtggcaccagaataacagccttgaatggctggaaatcactaaagacttacaggacgagctgtag

SEQ ID NO: 81032 - DNA, 711 bp, Artificial Sequence
  derived and/or modified sequence
atggcatacttccacgagctaagctcgcgtgtatcctttcaggaagctaggctcgcttgcgagtcagagggtggcgtattgctaagcctggaaaatgaggccgagcagaaactgatcgaaagcatgctccagaatctgactaaacccggaactggaattagcgatggggatttttggatcgggctttggagaaacggagatgggcaaacatccggcgcgtgccctgacctgtatcagtggagcgacggatccaactctcagtatagaaactggtatactgatgaaccctcctgtggttccgaaaagtgtgtagtgatgtaccatcaaccaaccgccaaccccggactaggaggaccttatctgtaccagtggaacgacgatagatgcaatatgaagcacaactatatatgcaagtacgagccagagatcaaccctactgcaccggtggaaaaaccgtatctgaccaatcaacctggcgacacacatcagaatgtcgtcgtcaccgaggcagtgaaggaggagcagaaattggtccagacatctctgcactgcggcttccagagggtcccagaaaaaaaggtggcatggaaatataacaacagcctaacatggttccagaatttcgtaatcttggacctctataaggaatggcatcagaataattccctggaatggctggagattacaaaagacctccaggatgaactgtag

SEQ ID NO: 81033 - DNA, 711 bp, Artificial Sequence
  derived and/or modified sequence
atggcgtacttccatgagctatcatcccgggtcagctttcaagaggcaaggctggcgtgtgagagcgaaggtggggttctgttgtctctagagaatgaggccgagcagaagcttattgagagcatgctgcaaaatttgacgaaacccggcaccggcataagcgacggcgacttctggataggtctttggcggaacggggacggccaaacatcaggagcctgccccgacttatatcagtggtctgacggttccaacagtcagtatcgcaactggtacactgatgagcccagctgtgggtctgaaaagtgcgtcgtcatgtaccaccagcccacagcaaatccaggcctgggcggaccgtacctgtatcaatggaacgacgatagatgcaatatgaagcacaattacatctgtaaatatgaaccagaaatcaatccaactgcccccgtcgaaaagccctacctgaccaatcaacccggagacacacaccagaacgtagttgtgaccgaggcggtgaaggaggaacagaaactggtccagaccagccttcattgtgggtttcagagagtacccgagaagaaggtggcctggaagtacaacaactcactcacctggtttcagaactttgtgatcctggatctgtataaggaatggcatcaaaacaactctcttgagtggctggaaattaccaaggatttgcaggacgaactctag

SEQ ID NO: 81034 - DNA, 711 bp, Artificial Sequence
  derived and/or modified sequence
atggcctacttccacgagctgagcagccgggtgtccttccaggaggcccggctggcctgtgagagcgagggcggcgtgctgctgagcctggagaatgaggccgagcagaagctgattgaatccatgctgcagaacctgaccaagccaggcaccggcatcagtgatggagacttctggattggcctgtggagaaatggagatggccagaccagcggggcctgcccagacctgtaccagtggagcgatggcagcaacagccagtacagaaactggtacacagatgagcccagctgtggcagcgagaagtgtgtggtgatgtaccaccagcccacagccaaccctggcctgggcggcccctacctgtaccagtggaatgatgaccgctgcaacatgaagcacaactacatctgcaagtatgagcctgagatcaaccccacagcccctgtggagaagccctacctgaccaaccagcccggggacacccaccagaatgtggtggtgacagaggccgtgaaggaggagcagaagctggtgcagaccagcctgcactgcggcttccagagggtgcctgagaagaaggtggcctggaagtacaacaacagcctgacctggttccagaacttcgtcatcctggacctgtacaaggagtggcaccagaacaacagcctggagtggctggagatcaccaaggacctgcaggatgagctgtag

SEQ ID NO: 81035 - DNA, 711 bp, Artificial Sequence
  derived and/or modified sequence
atggcctacttccacgagctgagcagccgggtgagcttccaggaggcgaggctggcatgtgagagcgagggcggagtacttctgtctctcgaaaacgaagccgagcagaaactgattgaatccatgcttcagaacctgacaaagcctggtacgggaatctctgacggggatttctggatcggcctgtggaggaacggtgatggacaaacctcgggcgcatgccccgacttgtaccagtggtccgacggcagcaattctcaatatcggaattggtatacagacgagccctcatgcggctccgagaagtgcgtggtgatgtaccaccagcctacagcgaacccggggcttgggggcccttacctgtaccagtggaatgatgataggtgcaatatgaaacataattatatctgtaaatacgagccagagatcaacccgactgccccagtggagaagccctatctgactaaccagcccggagacacacaccagaatgtggtggtcacagaggctgtcaaagaagagcaaaaactcgtacaaacaagtctccactgcggctttcagagagttcccgagaaaaaagtggcatggaaatacaataactccctcacctggttccagaattttgtgattctcgacctctataaggaatggcaccagaacaactcactggagtggttggaaatcacgaaggacttgcaggacgagctgtag

SEQ ID NO: 81036 - DNA, 711 bp, Artificial Sequence
  derived and/or modified sequence
atggcctacttccacgagctgagcagccgggtgagcttccaggaggctcgattggcttgcgagtcagaggggggagtgctgctgtcactagaaaacgaggcagagcagaaacttatcgagagcatgctccagaaccttacgaaacctgggaccgggattagcgacggggacttctggattggcctgtggagaaacggggacgggcaaacatcaggcgcctgtcccgacctctatcaatggagcgacgggtcaaattcccaatacagaaactggtatacggacgagccttcatgcgggtcagaaaagtgtgtcgtgatgtaccaccaaccgactgcaaaccctggcctggggggtccatatctgtaccagtggaatgacgaccggtgtaatatgaaacacaactatatttgcaagtacgagcccgagatcaacccaactgcacctgtggaaaagccttacctcacaaaccagcccggagatacccaccagaacgttgtggtgaccgaggcagtgaaagaggaacaaaagctcgtgcagacttcactccactgtggttttcaacgggtaccagaaaagaaggtggcatggaagtataataacagcttaacttggttccagaatttcgtaatcctggatctttacaaagagtggcaccagaataattctttggagtggctggagattacgaaggatctccaggatgagctgtag

SEQ ID NO: 81037 - DNA, 711 bp, Artificial Sequence
  derived and/or modified sequence
atggcctacttccacgagctgagcagccgggtgagcttccaggaggccaggttggcttgcgagagcgaaggcggtgtgctgctaagtctcgaaaacgaagccgaacagaagctcatcgagtccatgctgcaaaacctcacaaagccagggacaggcatctccgatggtgatttttggatcggcctgtggagaaatggcgatggtcagacaagcggagcgtgccctgacctgtaccagtggtccgacgggagcaattcccagtataggaattggtacacagatgagcccagttgtggctccgagaagtgcgtcgtcatgtatcaccagccaaccgctaacccaggactggggggaccatacctctaccagtggaacgacgacaggtgcaatatgaaacacaattacatttgcaaatatgaacctgaaatcaatccaacagccccggtcgaaaagccttatctcactaaccagcccggcgacacccatcagaatgtggtggtgacggaggccgtgaaagaggagcagaagcttgtccagacctcgttacactgtggtttccaaagggtgccagagaaaaaggtggcctggaagtacaacaattccttaacctggttccagaacttcgttattctcgacttatacaaagagtggcatcaaaataatagccttgaatggctagagattacaaaggatctgcaggatgaattatag

SEQ ID NO: 81038 - DNA, 711 bp, Artificial Sequence
  derived and/or modified sequence
atggcctactttcatgaattaagctctcgcgtgtcattccaggaggcaagattggcgtgcgaaagcgagggtggggtgctcctgtccctagaaaatgaagctgaacagaaacttattgaatccatgctgcagaatctgaccaagcccggaaccggcattagcgacggcgatttctggatcgggctgtggcggaatggggacgggcaaacatccggagcgtgtccagatttgtaccagtggtccgatggcagtaacagccaatatcggaactggtatactgatgagcctagttgtggaagcgagaagtgcgtggtgatgtaccatcagcccaccgcaaaccccggtctgggtggtccttatctgtaccagtggaacgatgaccggtgtaacatgaagcataattatatttgcaagtacgagccggagattaatcccaccgcgccagtagagaagccctacctgaccaaccaacctggagatacccatcaaaacgtggttgttacagaggccgtgaaggaagaacagaagctagtgcagaccagtctgcactgcgggttccaacgggtgccggagaagaaagttgcttggaaatataataactcactcacgtggttccagaatttcgtaatccttgacctgtataaagaatggcaccaaaataactcactcgagtggttagagatcactaaggacttgcaggacgagttgtag

SEQ ID NO: 81039 - DNA, 711 bp, Artificial Sequence
  derived and/or modified sequence
atggcttatttccatgaacttagcagcagagtcagttttcaagaggctcgcttagcttgtgagagtgaaggaggcgtgctcctgtccctggagaatgaggcggagcagaagttgatagagtctatgctccagaatctcaccaagcccggaaccggcatctctgatggtgatttctggattggtttatggaggaatggagatggccaaacttccggcgcatgtcccgacttgtaccagtggtcagatggctctaattcccagtatcgcaactggtatactgacgagccgtcctgtggaagcgaaaagtgcgtagtcatgtaccaccagcctacagcgaaccctggactaggtgggccatatctgtatcagtggaatgatgatcgctgtaacatgaagcacaattacatttgcaagtacgagcccgagataaatcctacggccccagttgagaagccctacctcactaaccagcccggtgatactcaccagaacgtcgtggtaaccgaggctgtcaaagaggagcaaaaacttgtccagacctccctccactgtgggtttcagcgcgtccccgaaaaaaaagtggcctggaagtataacaacagccttacttggtttcaaaatttcgttatacttgacctgtacaaagaatggcatcagaataactccctggaatggcttgagatcactaaggatctccaagacgagctatag

SEQ ID NO: 81040 - DNA, 711 bp, Artificial Sequence
  derived and/or modified sequence
atggcctattttcatgagctttcttccagggtgagcttccaagaagcccgactggcatgtgagtccgaagggggagtcctcttaagcctcgagaacgaggcagaacaaaagctgatcgagtccatgttgcagaacttaaccaagccaggtactggaattagcgacggagatttctggataggcctgtggagaaatggagacggccagactagtggtgcttgccccgacctgtatcagtggagcgatggtagcaactcccagtataggaactggtacacggatgagccgtcctgtggcagtgagaaatgtgtcgttatgtaccatcaacccacagcaaacccgggactgggcggtccttacctgtaccagtggaatgatgacagatgcaacatgaagcacaactacatctgtaaatacgagcctgagatcaatcctacagcgccagtcgagaagccatacctcaccaatcaacctggcgacacccaccaaaacgtggttgttaccgaggcagtgaaagaagaacagaaactggtacagacatccttgcattgtgggttccaaagggtacccgagaaaaaagtggcatggaagtataacaactctctcacctggtttcagaatttcgttatcctggacctctacaaagagtggcaccagaataactctcttgaatggttggaaattaccaaggatcttcaggatgagctgtag

SEQ ID NO: 81041 - protein, 384 aa, Artificial Sequence
  derived and/or modified sequence
MPSRAEDYEVLYTIGTGSYGRCQKIRRKSDGKILVWKELDYGSMTEAEKQMLVSEVNLLRELKHPNIVRYYDRIIDRTNTTLYIVMEYCEGGDLASVITKGTKERQYLDEEFVLRVMTQLTLALKECHRRSDGGHTVLHRDLKPANVFLDGKQNVKLGDFGLARILNHDTSFAKTFVGTPYYMSPEQMNRMSYNEKSDIWSLGCLLYELCALMPPFTAFSQKELAGKIREGKFRRIPYRYSDELNEIITRMLNLKDYHRPSVEEILENPLIADLVADEQRRNLERRGRQLGEPEKSQDSSPVLSELKLKEIQLQERERALKAREERLEQKEQELCVRERLAEDKLARAENLLKNYSLLKERKFLSLASNPGMRINLVNRSWCYK

SEQ ID NO: 81042 - DNA, 1155 bp, Artificial Sequence
  derived and/or modified sequence
atgccctctcgggctgaagattacgaagtgttatacactataggcactggcagctacggccggtgccagaagatacgacggaagtcggatggaaaaattcttgtgtggaaagaactagattatggctcgatgacggaagccgagaaacagatgcttgtgtccgaggtgaacctgctgcgcgaactaaagcaccccaatatagtcagatactatgatcgcattatcgatcgaacgaacacaaccctatacatcgtgatggaatactgcgaggggggggatctcgcaagtgtgattactaagggaaccaaagagagacagtatctagacgaggaattcgttcttcgagtgatgacacagcttacactggccctgaaagagtgtcaccggcgttctgacggcggacacactgtgcttcatcgggacctgaagccagcaaatgtatttctcgatggtaagcagaatgtgaagttaggtgactttggcctggccaggatcctcaatcacgacacctcctttgcgaagacattcgttggtaccccctactacatgtctccagaacagatgaataggatgtcatataatgagaaatccgatatatggagcttgggctgcctgctgtatgagttgtgtgccctcatgccgccgtttacagctttctctcagaaagaacttgccggaaagattcgtgaaggaaagttcagaaggatcccttatcgctactccgatgagttaaacgagattatcactaggatgctaaatctcaaagactaccaccggccgtccgttgaagaaatcctggagaacccactgattgccgatctcgtggcagatgagcagcggagaaacctggaaaggcggggcagacaacttggtgaacccgagaagagccaagatagctcacctgtgctatccgagcttaaattaaaagagatccagctacaagagcgcgagcgggctcttaaagcccgcgaggaaaggttagagcagaaggagcaggagctctgcgttagagagcggcttgccgaagacaagctggctagggcagaaaatctgttgaagaattatagcctgcttaaggagagaaagttcctctcgctggcatccaatccgggaatgagaataaacctcgtgaaccggagctggtgctataagtag

SEQ ID NO: 81043 - DNA, 1155 bp, Artificial Sequence
  derived and/or modified sequence
atgcccagcagagctgaggactatgaggtgctgtacaccatcggcaccggcagctatggccgctgccagaagatccggaggaagagtgatggcaagatcctggtgtggaaggagctggactatggctccatgacagaagctgagaagcagatgctggtgtctgaggtgaacctgctgcgggagctgaagcaccccaacatcgtgcgctactatgaccgcatcatcgacaggaccaacaccaccctgtacatcgtgatggagtactgtgagggcggggacctggccagcgtcatcaccaagggcaccaaggagcggcagtacctggatgaggagtttgtgctgcgggtgatgacccagctgaccctggccctgaaggagtgccacagaagaagtgatggcggccacacagtgctgcaccgggacctgaagccagccaacgtgttcctggatggcaagcagaatgtgaagctgggggactttggcctggcccgcatcctgaaccacgacaccagctttgccaagacctttgtgggcaccccctactacatgagccctgagcagatgaacaggatgagctacaatgagaagagtgacatctggagcctgggctgcctgctgtatgagctgtgtgccctgatgccacccttcaccgccttcagccagaaggagctggccggcaagatccgggagggcaagttccgccgcatcccctaccgctacagtgatgagctgaatgagatcatcaccaggatgctgaacctgaaggactaccaccggcccagcgtggaggagatcctggagaaccccctgattgctgacctggtggctgatgagcagaggaggaacctggagcggcggggccggcagctgggggagcctgagaagagccaggacagcagccctgtgctgtctgagctgaagctgaaggagatccagctgcaggagcgggagcgggccctgaaggcccgggaggagcggctggagcagaaggagcaggagctgtgtgtgcgggagcggctggccgaggacaagctggcccgggcagagaacctgctgaagaactacagcctgctgaaggagaggaagttcctgagcctggccagcaaccctggcatgaggatcaacctggtgaacagatcctggtgctacaagtag

SEQ ID NO: 81044 - DNA, 1155 bp, Artificial Sequence
  derived and/or modified sequence
atgcccagccgggccgaggactacgaggtgctgtacaccatcggcacaggttcttatggaagatgccagaaaattaggagaaaatccgatggcaagattctagtatggaaggagctggattacgggagcatgacagaggcagagaagcaaatgttggtgagtgaggtgaatctgctgcgagaacttaaacacccgaacatcgttagatactacgaccggatcatagacaggaccaatacaactctatatatcgtgatggagtactgcgagggcggggatctcgctagtgttataacaaagggtactaaagaacgccaatacctcgacgaggagtttgtgctcagggttatgacccaactgacactggccctcaaggagtgccaccggaggtcggatggtgggcacactgttctgcatagagatctgaagcccgcgaatgtgtttttggacggaaagcaaaacgttaaactgggcgacttcggactggcccgtatcctgaaccacgacactagcttcgccaaaacttttgtgggaactccatactacatgagcccggagcagatgaatcggatgagttacaatgaaaagtccgatatctggtctctcgggtgcttactctatgagctctgcgctttgatgcctcccttcactgccttctcccagaaggagctggcaggaaagattagagagggaaagttccgtagaataccatatcggtacagtgatgaactgaatgagattataactcgtatgttaaacctcaaggattatcacaggccttccgtggaagagattttggagaatcctcttattgcggacctcgtggctgatgaacagaggcgcaatttagagcgaagaggcaggcagctgggagaacctgaaaaaagccaggacagctctcctgtgctttcagagttgaaactcaaagagattcaactccaggagagggagcgtgccctgaaggcgcgcgaagagaggctcgagcagaaagagcaagagctctgcgtgagggagagactcgcagaggacaaactggctcgagccgaaaatctgttgaagaactattcccttctgaaggagcgtaaattcctcagcctcgcaagcaacccgggaatgcgcatcaacctggttaataggagctggtgttacaagtag

SEQ ID NO: 81045 - DNA, 1865 bp, Artificial Sequence
  derived and/or modified sequence
ggagttcctggtccctggagctccgcacttggcggcgcaacctgcgtgaggcagcgcgactctggcgactggccggccatgccttcccgggctgaggactatgaagtgttgtacaccattggcacaggctcctacggccgctgccagaagatccggaggaagagtgatggcaagatattagtttggaaagaacttgactatggctccatgacagaagctgagaaacagatgcttgtttctgaagtgaatttgcttcgtgaactgaaacatccaaacatcgttcgttactatgatcggattattgaccggaccaatacaacactgtacattgtaatggaatattgtgaaggaggggatctggctagtgtaattacaaagggaaccaaggaaaggcaatacttagatgaagagtttgttcttcgagtgatgactcagttgactctggccctgaaggaatgccacagacgaagtgatggtggtcataccgtattgcatcgggatctgaaaccagccaatgttttcctggatggcaagcaaaacgtcaagcttggagactttgggctagctagaatattaaaccatgacacgagttttgcaaaaacatttgttggcacaccttattacatgtctcctgaacaaatgaatcgcatgtcctacaatgagaaatcagatatctggtcattgggctgcttgctgtatgagttatgtgcattaatgcctccatttacagcttttagccagaaagaactcgctgggaaaatcagagaaggcaaattcaggcgaattccataccgttactctgatgaattgaatgaaattattacgaggatgttaaacttaaaggattaccatcgaccttctgttgaagaaattcttgagaaccctttaatagcagatttggttgcagacgagcaaagaagaaatcttgagagaagagggcgacaattaggagagccagaaaaatcgcaggattccagccctgtattgagtgagctgaaactgaaggaaattcagttacaggagcgagagcgagctctcaaagcaagagaagaaagattggagcagaaagaacaggagctttgtgttcgtgagagactagcagaggacaaactggctagagcagaaaatctgttgaagaactacagcttgctaaaggaacggaagttcctgtctctggcaagtaatccaggtatgagaatcaacttggtcaacagaagctggtgctacaaatgaagaaatgtgcaccagtgttgctcccaaagtggcttaggtagcccttttcatttacaaatctcaaattttaagatggatttcattgaatatatgcatttcaatggaaacaaaattctgttatagcaatgatttatttcctgggttcatagacctgaggcaatgagtcatagaatttcatgtttgattttctttaccttatcaaactacatgtttagtaattgatacttatttttattatcattatttatttttttattttttttgagatggagtctcactctgtagcccaggctggagtgcagtggcacaatctcggctcactgcaagctctgcctcccgggttcacgccattcttctgcctcagcctcccaagtagctgggactacagacacccgccaccaagcccggctaatttttgtatttttagtagagacggggtttcaccgtgttagccaggatggtctcgatttcctgacctcgtgatccgcctgcctcggcctcccaatgtgctgggattacaggcatgagacaccgtgcccagccgatacttatttttaaaaattagggcatttacaaaactattgtatgtttcagatttcagagagataaactgcatttcaagtaaaaataaa

SEQ ID NO: 81046 - DNA, 1155 bp, Artificial Sequence
  derived and/or modified sequence
atgcctagcagagccgaggactacgaggtcctctatactataggaacaggaagctacgggagatgtcaaaagatcaggcgcaagtctgacggaaagatcctggtgtggaaagagctggattatggtagcatgacggaagccgaaaaacagatgctagtttcggaggtcaacttgctccgggaacttaaacatcctaacattgtgcggtattacgacaggattatagacaggacaaacaccacactgtatatcgttatggaatattgcgagggcggagacctggcttccgtgataactaaaggcaccaaagagaggcaatacttggacgaggagttcgtgctgcgagtgatgactcagctaacccttgctcttaaagagtgccaccgaagaagcgacggaggtcatacagtgctacaccgggacctcaagcctgcgaatgtgttcctggacggcaaacagaacgtcaagctaggagactttggccttgcccgaatactcaatcatgatacatcctttgctaagacgttcgtcgggaccccgtattatatgtcacccgaacagatgaacaggatgtcctataacgaaaagtccgatatttggagtctggggtgtctcctctatgagctctgcgcactcatgcccccattcaccgcgttctcgcagaaagagttggccggtaagattcgggaaggcaagttcagacgcatcccctacagatatagcgacgaactgaatgagattattactagaatgctgaatctgaaggattaccaccggccttctgtggaggagattctggaaaaccccctcattgcagacctcgtggctgacgaacaacgaagaaacctggaacggcgaggcagacagttaggtgaacccgaaaagtctcaggactcttccccagtgctcagtgaactgaaacttaaggagatacagctccaagagcgggaacgtgcactgaaggccagggaagagcggctggagcagaaggagcaggaactatgcgtccgtgaaaggctagccgaggacaagctggcccgagctgaaaaccttctgaagaattactctctgttgaaagagaggaaattcttgtcacttgcgagcaacccaggcatgagaatcaaccttgtgaacaggagctggtgttataagtag

SEQ ID NO: 81047 - DNA, 1155 bp, Artificial Sequence
  derived and/or modified sequence
atgcccagcagagccgaggactacgaggtgctgtacaccatcggcaccggcagctacggcagatgccagaagatcagaagaaagagcgacggcaagatcctggtgtggaaggagctggactacggcagcatgaccgaggccgagaagcagatgctggtgagcgaggtgaacctgctgagagagctgaagcaccccaacatcgtgagatactacgacagaatcatcgacagaaccaacaccaccctgtacatcgtgatggagtactgcgagggcggcgacctggccagcgtgatcaccaagggcaccaaggagagacagtacctggacgaggagttcgtgctgagagtgatgacccagctgaccctggccctgaaggagtgccacagaagaagcgacggcggccacaccgtgctgcacagagacctgaagcccgccaacgtgttcctggacggcaagcagaacgtgaagctgggcgacttcggcctggccagaatcctgaaccacgacaccagcttcgccaagaccttcgtgggcaccccctactacatgagccccgagcagatgaacagaatgagctacaacgagaagagcgacatctggagcctgggctgcctgctgtacgagctgtgcgccctgatgccccccttcaccgccttcagccagaaggagctggccggcaagatcagagagggcaagttcagaagaatcccctacagatacagcgacgagctgaacgagatcatcaccagaatgctgaacctgaaggactaccacagacccagcgtggaggagatcctggagaaccccctgatcgccgacctggtggccgacgagcagagaagaaacctggagagaagaggcagacagctgggcgagcccgagaagagccaggacagcagccccgtgctgagcgagctgaagctgaaggagatccagctgcaggagagagagagagccctgaaggccagagaggagagactggagcagaaggagcaggagctgtgcgtgagagagagactggccgaggacaagctggccagagccgagaacctgctgaagaactacagcctgctgaaggagagaaagttcctgagcctggccagcaaccccggcatgagaatcaacctggtgaacagaagctggtgctacaagtag

SEQ ID NO: 81048 - protein, 110 aa, Artificial Sequence
  derived and/or modified sequence
MACAAARSPADQDRFICIYPAYLNNKKTIAEGRRIPISKAVENPTATEIQDVCSAVGLNVFLEKNKMYSREWNRDVQYRGRVRVQLKQEDGSLCLVQFPSHYTLSLTSGS

SEQ ID NO: 81049 - DNA, 333 bp, Artificial Sequence
  derived and/or modified sequence
atggcatgtgcggctgccaggagtccagcagaccaggatagattcatctgcatttaccctgcttatctgaataacaaaaaaacaatcgccgaaggtagacgcatccccattagtaaggccgtggaaaaccccactgcgacggaaattcaggacgtctgttccgcggtaggcctgaatgttttcctcgaaaaaaacaaaatgtattctagagagtggaatagggacgttcagtaccgtggtcgtgttcgagtacagctaaaacaagaggacgggagcctgtgcctggtgcagttcccatcacactacacactctctttaactagcggctcatag

SEQ ID NO: 81050 - DNA, 333 bp, Artificial Sequence
  derived and/or modified sequence
atggcctgtgccgccgcccggagccctgctgaccaggaccgcttcatctgcatctacccagcctacctgaacaacaagaagaccatcgccgagggccgccgcatccccatcagcaaggctgtggagaaccccacagccacagagatccaggatgtgtgcagcgctgtgggcctgaatgtgttcctggagaagaacaagatgtacagccgggagtggaacagagatgtgcagtaccggggccgggtgcgggtgcagctgaagcaggaggatggcagcctgtgcctggtgcagttccccagccactacaccctgagcctgaccagcggcagctag

SEQ ID NO: 81051 - DNA, 333 bp, Artificial Sequence
  derived and/or modified sequence
atggcctgcgccgccgcccggagccccgccgaccaggaccggttcatttgcatctaccccgcctacctgaataataagaaaacaattgcggagggtagacggattcccatctcaaaagccgtggaaaatccgaccgctactgaaatacaggatgtctgcagtgccgtcggactgaatgtatttctggagaagaataagatgtacagcagagagtggaaccgagacgttcagtacagaggcagagtgagggtgcaactgaaacaggaagacggcagcctgtgcctcgtgcagtttccatcccattatactttaagcctgacctccggatcttag

SEQ ID NO: 81052 - DNA, 333 bp, Artificial Sequence
  derived and/or modified sequence
atggcatgtgccgcagcgaggagccccgctgaccaggatagatttatttgcatttatccagcctatctcaacaacaagaagaccatcgctgaaggacgcagaatccctataagcaaggcagtcgaaaacccaaccgcgacagagatccaagatgtgtgtagcgctgttggactgaacgtgttcctggagaaaaacaagatgtatagtcgggagtggaatcgggatgtgcagtatagaggacgagttcgagtgcagctgaagcaagaggatgggtcactgtgtctggtgcagtttccctctcactatacgttgagtctgacttcaggttcttag

SEQ ID NO: 81053 - DNA, 937 bp, Artificial Sequence
  derived and/or modified sequence
agagccgggttcctcccgggtttctgccgggtttctccctgcggctcctgggttgttgagactcttgtgaagatggcttgcgctgccgcgcggtccccggccgaccaggacaggtttatttgtatctatcctgcttatttaaataataagaagaccatcgcagagggaaggcgaatccccataagtaaggctgttgaaaatcctacagctacagagattcaagatgtatgttcagcagttggacttaacgtatttcttgagaaaaataaaatgtactctagagaatggaatcgtgatgtccaatacagaggcagagtccgggtccagctcaaacaggaagatgggagcctctgccttgtacagttcccatcacattatacactaagcctaacttctggttcctaggtaagtcagtaatgttgtatgcagcagaaatgatacctaaactaaaaacaaggacacaaaaaacaggaggtgctgaccaaagtcttcaacaaggagagggaagtaaaaaagggaaaggaaagaaaaagaagtaacctagtatcagcatcaagtatgtggtactactgtaagagacatgaatggagacttctaatttgtatcggagggaaacagaagctttttgtttgcatcatttaactgaactgtgaacccttgtgcctctcatctttatcatcggagttgacagtgaaacaaatttacatcagaagtttgcatctcgcgtatatgccgtataaaagaatttttttgtctttcaatgcagttttttggaagaaaatatttttaaatggacaatggactgtacaataagttacttgaaataagttgtttcagataaatttcaattagatttaaaataaacattttgtccaccttttaagttaatgaaataaaatttgaaactgacttttgcagcttttgcttatatactaat

SEQ ID NO: 81054 - DNA, 333 bp, Artificial Sequence
  derived and/or modified sequence
atggcctgcgccgccgccagaagccccgccgaccaggacagattcatctgcatctaccccgcctacctgaacaacaagaagaccatcgccgagggcagaagaatccccatcagcaaggccgtggagaaccccaccgccaccgagatccaggacgtgtgcagcgccgtgggcctgaacgtgttcctggagaagaacaagatgtacagcagagagtggaacagagacgtgcagtacagaggcagagtgagagtgcagctgaagcaggaggacggcagcctgtgcctggtgcagttccccagccactacaccctgagcctgaccagcggcagctag

SEQ ID NO: 81055 - protein, 78 aa, Artificial Sequence
  derived and/or modified sequence
MACAAARSPADQDRLLKILQLQRFKMYVQQLDLTYFLRKIKCTLENGIVMSNTEAESGSSSNRKMGASALYSSHHVSQ

SEQ ID NO: 81056 - DNA, 237 bp, Artificial Sequence
  derived and/or modified sequence
atggcctgtgcagcagcacggtctccagcggatcaagatcggctgctgaagatcctgcaattacaacgctttaaaatgtatgtccagcaactcgatttgacctactttctgcggaaaataaaatgcaccctcgagaatggcatcgtaatgtctaacacggaagctgaaagcggctcatccagcaacaggaagatgggcgcatccgcattatattcatctcaccacgtgagccaatag

SEQ ID NO: 81057 - DNA, 237 bp, Artificial Sequence
  derived and/or modified sequence
atggcctgtgccgccgcccggagccctgctgaccaggaccggctgctgaagatcctgcagctgcagcgcttcaagatgtatgtgcagcagctggacctgacctacttcctgaggaagatcaagtgcaccctggagaatggcatcgtgatgagcaacacagaagctgagagcggcagcagcagcaacaggaagatgggcgccagcgccctgtacagcagccaccacgtgtcccagtag

SEQ ID NO: 81058 - DNA, 237 bp, Artificial Sequence
  derived and/or modified sequence
atggcctgcgccgccgcccggagccccgccgaccaggaccggctgctcaagattttgcaactgcagcggtttaaaatgtacgtgcagcagctcgatttaacctatttcctgcgtaaaatcaagtgtactctggagaatgggatcgtgatgtctaatactgaggccgaatcaggtagctcttccaatagaaagatgggggcatctgccctgtatagtagtcatcatgtcagccagtag

SEQ ID NO: 81059 - DNA, 237 bp, Artificial Sequence
  derived and/or modified sequence
atggcatgcgccgctgctagaagccctgcagaccaagacaggcttctgaaaattctccaattacagcggttcaagatgtacgtgcaacagttggatctcacttattttcttcggaagatcaagtgcactcttgaaaatgggatcgttatgtctaacacggaggccgaaagcggcagttcatctaaccggaagatgggggcatccgccctctacagcagccaccacgtgagccagtag

SEQ ID NO: 81060 - DNA, 237 bp, Artificial Sequence
  derived and/or modified sequence
atggcctgcgccgccgccagaagccccgccgaccaggacagactgctgaagatcctgcagctgcagagattcaagatgtacgtgcagcagctggacctgacctacttcctgagaaagatcaagtgcaccctggagaacggcatcgtgatgagcaacaccgaggccgagagcggcagcagcagcaacagaaagatgggcgccagcgccctgtacagcagccaccacgtgagccagtag

SEQ ID NO: 81061 - DNA, 834 bp, Artificial Sequence
  derived and/or modified sequence
atgtttagcgagattagagcagtcttctcaaggagatatctgctgcagaacacagcgctcgaagtgtttatggctaatcgcacaagcgttatgtttaactttcccgatcaggccacagtgaagaaagtggtctattcactacccagagttggtgtcggtaccagctacggcctgccacaggccagaagaatctcccttgcaacccccaggcagctgtacaaatcatccaacatgacacagagatggcagaggagggaaatttccaacttcgaatacttgatgtttcttaatacaatcgcggggcgcacatataacgatctgaaccagtatccagtcttcccatgggtgctaaccaattacgagtctgaagagcttgatctgacgctacccggaaatttccgggacttgagcaagccgatcggcgcacttaaccccaaacgtgctgtgttctatgcggagagatacgaaacgtgggaggatgaccagagccctccttatcactataatacccactactccaccgctacctctaccttatcttggttagtgcggatcgaaccttttactaccttcttccttaatgcaaatgatggtaagttcgatcaccctgaccgcaccttctcctccgtggcccggagttggcgcacctcacagcgcgatacatctgacgtcaaagaattgattccagaattctactaccttccagagatgtttgttaactccaacggttataaccttggcgtgagagaagatgaggtggtggttaatgacgtagacctgcccccttgggcaaaaaaccttaagacactttgtgggtcaacggggtggccatag

SEQ ID NO: 81062 - DNA, 834 bp, Artificial Sequence
  derived and/or modified sequence
atgttttctgagatccgggctgtgttcagccgccgctacctgctgcagaacacagccctggaggtgttcatggccaacagaacatctgtgatgttcaacttcccagaccaggccaccgtgaagaaggtggtgtacagcctgccccgggtgggcgtgggcaccagctatggcctgccccaggcccggcgcatcagcctggccaccccccggcagctgtacaagagcagcaacatgacccagcgctggcagaggcgggagatcagcaactttgagtacctgatgttcctgaacaccatcgccggccgcacctacaatgacctgaaccagtaccctgtgttcccctgggtgctgaccaactatgagagcgaggagctggacctgaccctgcccggcaacttccgggacctgagcaagcccatcggggccctgaaccccaagagagctgtgttctacgccgagagatatgagacctgggaggatgaccagagccccccctaccactacaacacccactacagcacagccaccagcaccctgtcctggctggtgagaattgagcccttcaccaccttcttcctgaatgccaatgatggcaagtttgaccacccagacaggaccttcagctctgtggcccgctcctggaggaccagccagagggacaccagtgatgtgaaggagctgatccctgagttctactacctgcctgagatgtttgtgaacagcaatggctacaacctgggcgtgcgggaggatgaggtggtggtgaatgatgtggacctgcccccctgggccaagaacctgaagaccctgtgtggcagcacaggctggccctag

SEQ ID NO: 81063 - DNA, 834 bp, Artificial Sequence
  derived and/or modified sequence
atgttcagcgagatccgggccgtgttcagccggcggtacctgctgcagaatacggctttggaagttttcatggcaaataggacatccgtcatgtttaacttccctgaccaggctaccgtaaaaaaagttgtttattctctgcctcgggttggagtgggcaccagctacggccttcctcaggctcggaggataagtctggcgactccccgacagctctacaagtcctctaatatgacacagaggtggcagagacgggagatctccaatttcgagtaccttatgtttctaaacacaatcgcaggaaggacatataatgacctcaatcaatacccagttttcccttgggtgctgactaattatgaaagcgaagagctggatctaacactaccaggtaattttagagacttaagcaagccgatcggagccctcaatcccaagcgggctgttttctatgccgagagatacgagacttgggaggacgaccaaagcccaccataccactataacacccactactctacagccacaagcactctaagctggctggtgaggatcgagccctttactacatttttcctaaatgcaaacgacggaaaatttgaccaccccgatagaactttctccagtgtggccagatcatggcgaacctctcaacgagataccagcgatgtcaaagagttgattccagaattttattacctgccagagatgttcgtgaactcaaatggttataacctgggcgtacgtgaggacgaggtggtcgttaatgatgtcgatctgccaccgtgggccaagaatctcaagaccctttgcgggtctactgggtggccctag

SEQ ID NO: 81064 - DNA, 834 bp, Artificial Sequence
  derived and/or modified sequence
atgttttccgaaattcgagccgttttttctcgccgttatctacttcagaacacggccctggaagtttttatggctaacaggacaagtgtcatgtttaacttcccagatcaggctacagtgaaaaaagtggtctacagcctgccacgagttggggtcggcacaagctacggactgcctcaggcaaggcgcatatctttagcaacaccacggcaactctataaatcctctaacatgactcagcggtggcagaggagggagatttctaacttcgagtatcttatgttcctgaacactatcgccggtcggacttacaacgacctgaatcagtatcccgtgttcccttgggtgcttaccaactatgagagcgaggagcttgatttgacgctccctgggaactttcgcgacttaagcaaacctattggtgctctgaacccaaaaagagccgtcttctatgctgagcggtatgagacctgggaagacgatcaatctcctccttaccactacaacacacactacagcactgcgactagcacactctcgtggctggtgcgcatcgagccgtttactacctttttcctgaatgcaaacgatgggaaatttgaccacccagacagaacattcagtagcgtggctcgctcctggcggacttcccagcgcgatacgtccgatgtgaaggaattgatccctgagttttattatcttcccgagatgtttgtcaactccaatgggtataatctgggagtgagagaggacgaggtcgtggtaaacgatgtagacttgcctccatgggccaaaaacctcaaaactctctgtggcagcacaggttggccatag

SEQ ID NO: 81065 - DNA, 834 bp, Artificial Sequence
  derived and/or modified sequence
atgttcagcgagatcagagccgtgttcagcagaagatacctgctgcagaacaccgccctggaggtgttcatggccaacagaaccagcgtgatgttcaacttccccgaccaggccaccgtgaagaaggtggtgtacagcctgcccagagtgggcgtgggcaccagctacggcctgccccaggccagaagaatcagcctggccacccccagacagctgtacaagagcagcaacatgacccagagatggcagagaagagagatcagcaacttcgagtacctgatgttcctgaacaccatcgccggcagaacctacaacgacctgaaccagtaccccgtgttcccctgggtgctgaccaactacgagagcgaggagctggacctgaccctgcccggcaacttcagagacctgagcaagcccatcggcgccctgaaccccaagagagccgtgttctacgccgagagatacgagacctgggaggacgaccagagccccccctaccactacaacacccactacagcaccgccaccagcaccctgagctggctggtgagaatcgagcccttcaccaccttcttcctgaacgccaacgacggcaagttcgaccaccccgacagaaccttcagcagcgtggccagaagctggagaaccagccagagagacaccagcgacgtgaaggagctgatccccgagttctactacctgcccgagatgttcgtgaacagcaacggctacaacctgggcgtgagagaggacgaggtggtggtgaacgacgtggacctgcccccctgggccaagaacctgaagaccctgtgcggcagcaccggctggccctag

SEQ ID NO: 81066 - protein, 320 aa, Artificial Sequence
  derived and/or modified sequence
MSGRVGDLSPRQKEALAKFRENVQDVLPALPNPDDYFLLRWLRARSFDLQKSEAMLRKLGRKVETITIIYDCEGLGLKHLWKPAVEAYGEFLCMFEENYPETLKRLFVVKAPKLFPVAYNLIKPFLSEDTRKKIMVLGANWKEVLLKHISPDQVPVEYGGTMTDPDGNPKCKSKINYGGDIPRKYYVRDQVKQQYEHSVQISRGSSHQVEYEILFPGCVLRWQFMSDGADVGFGIFLKTKMGERQRAGEMTEVLPNQRYNSHLVPEDGTLTCSDPGIYVLRFDNTYSFIHAKKVNFTVEVLLPDKASEEKMKQLGAGTPK

SEQ ID NO: 81067 - DNA, 963 bp, Artificial Sequence
  derived and/or modified sequence
atgtctggtcgtgtgggagacctgtcgccacgtcagaaagaggctcttgccaaattcagagagaatgtgcaggacgtcttaccggccctgcctaatcctgacgactatttcctgcttcggtggcttcgtgctcggtcatttgacctgcagaaatccgaggccatgctaagaaagctgggccgtaaagtggaaaccataacaataatctacgactgcgaaggcctgggactcaaacacttgtggaagcccgcggtagaggcatatggagagtttctgtgtatgttcgaagagaattaccccgagactcttaagaggctattcgtcgtcaaggcccctaagctgttccccgtggcttacaatctaataaagccatttcttagcgaggacactcgcaaaaaaattatggtgctgggggccaattggaaggaggtgctgcttaagcacatcagccccgatcaggtgccagttgagtacggcggaacgatgaccgacccggacggcaatcctaaatgtaagagtaaaataaattatggtggtgacataccccgaaagtactacgtgcgggaccaggtcaagcagcagtatgagcactctgtccagatttccagaggatcttcccatcaggtggagtatgagatactgtttccaggttgtgtgctgcggtggcagttcatgtcggacggggccgacgtgggtttcggcatctttctcaaaaccaagatgggagagcgtcaaagagcaggagaaatgacagaagtgttgcccaatcaacgctacaactcccacctcgtgcccgaagatgggacgttgacctgctctgacccgggcatttacgtgctgaggttcgataatacctactcttttatacacgcgaagaaggtaaactttaccgtggaggtattgctccccgataaagcatctgaagaaaagatgaagcagctgggtgccggcactcccaaatag

SEQ ID NO: 81068 - DNA, 963 bp, Artificial Sequence
  derived and/or modified sequence
atgagcggccgggtgggggacctgagcccccggcagaaggaggccctggccaagttcagagaaaatgtgcaggatgtgctgcctgccctgcccaacccagatgactacttcctgctgcgctggctgcgggcccggagctttgacctgcagaagtctgaggccatgctgaggaagctgggcaggaaggtggagaccatcaccatcatctatgactgtgagggcctgggcctgaagcacctgtggaagccagctgtggaggcctacggggagttcctgtgcatgtttgaggagaactacccagagaccctgaagaggctgtttgtggtgaaggcccccaagctgtttcctgtggcctacaacctgatcaagcccttcctgtctgaggacaccaggaagaagatcatggtgctgggcgccaactggaaggaggtgctgctgaagcacatcagcccagaccaggtgcctgtggagtatggaggcaccatgacagatcctgatggcaaccccaagtgcaagagcaagatcaactatggaggagacatccccaggaagtactacgtgcgggaccaggtgaagcagcagtatgagcacagcgtgcagatcagccggggcagcagccaccaggtggagtatgagatcctcttccctggctgtgtgctgcgctggcagttcatgtctgatggagcagatgtgggcttcggcatcttcctgaagaccaagatgggagagcggcagagagctggggagatgacagaggtgctgcccaaccagcgctacaacagccacctggtgcctgaagatggcaccctgacctgcagcgaccccggcatctacgtgctgcgctttgacaacacctacagcttcatccacgccaagaaggtgaacttcaccgtggaggtgctgctgcctgacaaggccagcgaggagaagatgaagcagctgggcgccggcacccccaagtag

SEQ ID NO: 81069 - DNA, 963 bp, Artificial Sequence
  derived and/or modified sequence
atgagcggccgggtgggcgacctgagcccccggcagaaggaggccctggctaagtttagggagaatgtccaggacgtacttcccgccttgcctaacccagatgactacttcttactgcggtggctgagagcaagatctttcgacctgcagaaaagcgaagccatgctccgaaaactggggcgaaaagtggaaactattacaataatttatgattgtgaggggctcggccttaagcatctgtggaagccagcagtcgaggcatatggcgagtttttgtgcatgttcgaagagaactatccggagaccctgaaacgactcttcgtggtgaaggctccgaagctctttcccgtggcgtataacctaatcaaacctttcctaagtgaggacactagaaaaaaaattatggttttaggcgccaactggaaagaagtgctgctgaaacatatctcgccagaccaggtgcccgtggagtatggaggcaccatgacggatcccgatggaaatccaaaatgtaaatcaaaaatcaattacggcggcgacatcccacgcaagtactatgttagagaccaggtgaagcagcagtacgaacactcagtgcagatatccaggggctcttcacatcaggtcgaatacgagatactgttccctggttgcgtgttaagatggcagtttatgtccgacggggctgatgttggcttcggtatttttctgaagacaaagatgggagagaggcagagagccggggaaatgaccgaggttctcccgaatcagagatacaattcccacctggtacccgaagatggcacactcacatgtagcgatcctggcatttacgtcctacgttttgataacacttactcctttatacatgccaagaaagtgaattttacagtagaagtacttcttcctgataaggcctctgaggaaaagatgaaacagttgggagcggggacgcccaaatag

SEQ ID NO: 81070 - DNA, 963 bp, Artificial Sequence
  derived and/or modified sequence
atgagcggaagagtcggagatctgagccctcgtcaaaaggaagccttagcaaaattccgagagaatgtgcaggatgtcttgcccgctctgccaaacccggacgattatttcctgctgaggtggctgcgcgcaaggtccttcgatttgcaaaagtctgaagctatgttgaggaagctgggccgtaaggtggaaacaattaccattatctatgactgtgaagggctgggcttaaagcatctgtggaagccggctgtcgaggcatacggtgagttcctgtgcatgttcgaagaaaattaccccgagacactgaagcgactctttgtggtaaaagctcccaaattgtttccggtggcatataatctcataaaaccctttctctcagaagataccagaaaaaagattatggtgctgggggcaaattggaaagaggtccttttgaaacacatcagcccggatcaggtgcctgtggaatatgggggtacgatgacggaccccgatgggaatcccaaatgcaagtctaagattaattatggtggggacattcccagaaagtactatgtacgagatcaggtgaaacagcagtatgaacattctgtgcagatctctcgtggaagcagccaccaggtggagtacgagatactgttcccgggttgtgtgcttcgctggcagtttatgtccgacggcgcagacgtggggttcggcatattcctgaagactaaaatgggcgagcggcagagagcgggtgagatgaccgaagtcctcccgaaccaacgctataactcacatttggtcccggaagacggcacccttacatgttccgatcctggcatctacgtgttgaggtttgacaacacatactccttcatacatgcaaaaaaagttaatttcacagtggaggtactgctgccagataaagcttccgaggagaagatgaagcaactgggcgcaggaacaccaaaatag

SEQ ID NO: 81071 - DNA, 1229 bp, Artificial Sequence
  derived and/or modified sequence
gagtctgtgctccatcagctgccgcacccgccgcctcccgcccccaaaccccatccccgcggttgagccacgatgagcggcagagtcggcgatctgagccccaggcagaaggaggcattggccaagtttcgggagaatgtccaggatgtgctgccggccctgccgaatccagatgactattttctcctgcgttggctccgagccagaagcttcgacctgcagaagtcggaggccatgctccggaagttggggaggaaggtggagaccatcaccataatttatgactgcgaggggcttggcctcaagcatctctggaagcctgctgtggaggcctatggagagtttctctgcatgtttgaggaaaattatcccgaaacactgaagcgtctttttgttgttaaagcccccaaactgtttcctgtggcctataacctcatcaaacccttcctgagtgaggacactcgtaagaagatcatggtcctgggagcaaattggaaggaggttttactgaaacatatcagccctgaccaggtgcctgtggagtatgggggcaccatgactgaccctgatggaaaccccaagtgcaaatccaagatcaactacgggggtgacatccccaggaagtattatgtgcgagaccaggtgaaacagcagtatgaacacagcgtgcagatttcccgtggctcctcccaccaagtggagtatgagatcctcttccctggctgtgtcctcaggtggcagtttatgtcagatggagcggatgttggttttgggattttcctgaagaccaagatgggagagaggcagcgggcaggggagatgacagaggtgctgcccaaccagaggtacaactcccacctggtccctgaagatgggaccctcacctgcagtgatcctggcatctatgtcctgcggtttgacaacacctacagcttcattcatgccaagaaggtcaatttcactgtggaggtcctgcttccagacaaagcctcagaagagaagatgaaacagctgggggcaggcaccccgaaataacaccttctcctatagcaggcctggccccctcagtgtctccctgtcaatttctaccccttgtagcagtcattttcgcacaaccctgaagcccaaagaaactgggctggaggacagacctcaggagctttcatttcagttaggcagaggaagagcgactgcagtgggtctccgtgtctatcaaatacctaaggagt

SEQ ID NO: 81072 - DNA, 963 bp, Artificial Sequence
  derived and/or modified sequence
atgagcggcagagtgggcgacctgagccccagacagaaggaggccctggccaagttcagagagaacgtgcaggacgtgctgcccgccctgcccaaccccgacgactacttcctgctgagatggctgagagccagaagcttcgacctgcagaagagcgaggccatgctgagaaagctgggcagaaaggtggagaccatcaccatcatctacgactgcgagggcctgggcctgaagcacctgtggaagcccgccgtggaggcctacggcgagttcctgtgcatgttcgaggagaactaccccgagaccctgaagagactgttcgtggtgaaggcccccaagctgttccccgtggcctacaacctgatcaagcccttcctgagcgaggacaccagaaagaagatcatggtgctgggcgccaactggaaggaggtgctgctgaagcacatcagccccgaccaggtgcccgtggagtacggcggcaccatgaccgaccccgacggcaaccccaagtgcaagagcaagatcaactacggcggcgacatccccagaaagtactacgtgagagaccaggtgaagcagcagtacgagcacagcgtgcagatcagcagaggcagcagccaccaggtggagtacgagatcctgttccccggctgcgtgctgagatggcagttcatgagcgacggcgccgacgtgggcttcggcatcttcctgaagaccaagatgggcgagagacagagagccggcgagatgaccgaggtgctgcccaaccagagatacaacagccacctggtgcccgaggacggcaccctgacctgcagcgaccccggcatctacgtgctgagattcgacaacacctacagcttcatccacgccaagaaggtgaacttcaccgtggaggtgctgctgcccgacaaggccagcgaggagaagatgaagcagctgggcgccggcacccccaagtag

SEQ ID NO: 81073 - DNA, 3993 bp, Artificial Sequence
  derived and/or modified sequence
atggaggatcatatgttcggggtgcagcagatccagccgaatgtgatatctgttaggctcttcaaacgcaaagtcggcgggctagggtttctcgtgaaggagcgcgtctcgaaacctccagtgatcatcagtgaccttattaggggaggggccgcagaacaaagcggcttgatacaggccggcgatattatactggctgttaacgggcgcccacttgtggatctttcttacgacagcgctttagaagtgctgcgtggaatagccagcgaaactcatgtcgttctcatcctaaggggacctgagggatttacaacccacctcgaaacaacatttacgggggacggaacgcctaagaccatccgcgtcactcagccgctggggcctccaactaaggccgtagatctgagccaccagccacctgccggtaaagagcagcccctggcagtcgatggcgcttcagggcctggtaacggccctcaacacgcctatgacgatggccaggaggctggatctctcccgcatgccaacgggctcgctccccgcccccccggccaggaccccgccaagaaagcgacccgggtgagtctccaggggcgaggagaaaataatgaactcctgaaggaaatcgagccagtgttgagtctcctgacctcaggctcccgcggcgtgaaggggggcgccccagcaaaagctgagatgaaggacatggggatccaggtggaccgtgatcttgatggcaagagtcacaaacccttgccattgggggttgagaacgatcgcgtatttaacgatctctggggaaagggcaacgtccccgtggtcctgaacaacccctattccgaaaaggagcagcccccgacctccggcaagcagagtccaaccaaaaacggatccccttcgaagtgcccacggttcctgaaggtgaagaattgggagacggaagttgtgcttacagatacactgcacctgaaaagcaccctcgagactggttgtaccgaatacatctgcatgggatcaatcatgcacccatcacagcacgcgcgccgccccgaggacgtgcggaccaagggacagctctttcctctcgcaaaagaattcatcgatcagtactatagcagcatcaagaggtttgggagcaaagcacacatggaacgcctcgaagaagtgaataaagagattgacactacaagtacataccagctcaaagatacagaactcatctatggggctaagcatgcatggcggaatgcttctcgatgcgtaggtagaattcagtggtcaaagcttcaagtgtttgatgcaagggattgtactaccgcacacggaatgttcaattatatatgtaaccacgtcaaatacgccacgaataagggtaacctgcgttcggctatcaccatattccctcaacggacagacggcaagcatgactttcgggtctggaactcccaattgatacgctatgcaggctataaacagcctgacggcagtaccctgggggacccagccaacgtgcagtttaccgaggaagtggctaagaagatgaacctagatatgaggaaaacctctagcttatggaaagaccaggccctggtcgagataaatattgccgtactctattctttccagtccgacaaggtcactattgtggatcaccactcagctaccgagagttttatcaaacatatggagaatgagtatcggtgccgcgggggctgtcccgctgactgggtgtggattgttccacctatgagcggctcgatcacacctgtcttccaccaggaaatgctcaactatagactgactccatcctttgaatatcagccagatccatggaatacccacgtgtggaaaggcaccaacgggactcctaccaagcgcagagctatcgggtttaagaagctggccgaagcagttaagtttagtgccaaactgatggggcaggcaatggccaaacgcgtcaaggctacaatcctttatgcaacagagacaggcaagagccaggcctatgcaaagaccctgtgcgaaatttttaaacatgcatttgatgcgaaggtgatgtccatggaggagtacgatatcgtgcatttggaacacgaaaccttggtgctggttgtaacatctacgtttggcaatggcgaccctcctgaaaacggcgaaaaatttggctgcgcattaatggagatgcgacacccaaattctgtccaggaagaaaggaagtcttataaggtgaggttcaactccgttagcagctacagcgactcccaaaagagctcaggcgatggtcccgatttgagggacaacttcgaatcagctggaccactggccaacgtcaggtttagcgtttttgggcttggcagccgggcctacccacatttttgcgcttttgggcacgctgtggatactctgctggaggagctgggcggcgagagaatcctaaagatgcgcgaaggggacgagttgtgcggacaggaggaggcattcagaacctgggctaagaaggtgttcaaagctgcatgcgacgttttttgtgtgggggacgacgtcaacatcgagaaagcaaacaatagtctgatttctaacgaccgctcttggaaacgcaacaagttccgactcactttcgtagctgaggcgcccgagctcacgcagggactgtcgaacgttcacaaaaagagggtctccgctgctcgactcctgtctagacaaaatctccagagtccaaaatcttcgcgcagtaccatcttcgtccgtctgcatacaaatgggtcacaggagctccagtaccagcctggagaccatctcggcgttttcccaggaaatcacgaagatttagtgaacgcgctaatcgaacgactcgaggatgccccacctgttaatcagatggtgaaagtggagctgttagaggagaggaataccgcgctgggagtgatctccaattggactgacgagctgcgactcccgccatgtacaatcttccaggcttttaaatactacctggatattaccactccaccaactcccctgcaactacagcagttcgcatcactcgctacatccgaaaaggaaaagcaacgcttgcttgtcctatccaaaggactgcaggaatatgaggaatggaaatgggggaagaacccaacaatcgttgaagtgctcgaagaatttcccagcatccagatgccagctacactgttactgactcagctgtctcttctgcagccccgctactattcgatttcaagttctcctgacatgtatccagacgaggtgcacctgactgtggccatcgtaagctataggacccgggacggagaaggacccatacatcatggagtttgcagtagttggctgaatagaatccaggctgatgagctggtaccttgtttcgtgcgaggagccccaagttttcacctccctcgtaacccccaggtgccttgcattctcgtcgggcctggaacagggatcgcccccttccgatctttttggcagcaaagacaatttgacattcagcataagggcatgaacccttgtcctatggtactcgttttcggttgccgccagagtaagattgatcatatttacagggaggagaccttgcaagctaaaaacaagggcgtgtttcgggaactttacacagcctacagccgggaacctgataaaccgaagaagtatgtgcaagacattctgcaggaacagcttgctgagagcgtgtacagagccctgaaggagcagggcggtcacatctatgtgtgcggtgacgtcactatggctgctgacgtgctaaaggccatccagagaattatgacgcagcagggcaagctgagtgccgaagacgctggcgtcttcatctcaagaatgcgcgacgacaacaggtatcatgaggatatctttggtgtcactctccggacctacgaagtaacgaaccggctaaggtccgaatcaattgcattcatcgaggaaagtaagaaagacacagatgaccaagtgtttaaaacctag

SEQ ID NO: 81074 - DNA, 3993 bp, Artificial Sequence
  derived and/or modified sequence
atggaggaccacatgtttggagtgcagcagatccagcccaacgtcatctctgtgcggctcttcaagaggaaggtgggcggcctgggcttcctggtgaaggagcgggtgtccaagccccctgtgatcatcagtgacctgatccggggcggcgctgctgagcagagcggcctcatccaggccggggacatcatcctggccgtgaatggccggcccctggtggacctgtcctatgattctgccctggaggtgctgcggggcatcgccagcgagacccacgtggtgctgatcctgcggggccctgagggcttcaccacccacctggagaccaccttcaccggagatggcacccccaagaccatccgggtgacccagcccctgggcccccccaccaaggctgtggacctgagccaccagcccccagctgggaaggagcagcccctggccgtggatggagccagcggccctggaaatggcccccagcacgcctatgatgatggccaggaggccggcagcctgccccacgccaacggcctggccccccggcccccaggccaggaccctgccaagaaggccaccagggtgtccctgcagggcagaggagaaaataatgagctgctgaaggagattgagcctgtgctgagcctgctgaccagcggcagccggggcgtgaagggcggggccccagccaaggccgagatgaaggacatgggcatccaggtggaccgggacctggatggcaagagccacaagcccctgcccctgggcgtggagaatgacagagtcttcaatgacctgtggggcaaaggaaatgtgcctgtggtgctgaacaacccctacagcgagaaggagcagccccccaccagcggcaagcagagccccaccaagaatggcagccccagcaaatgtccccgcttcctgaaggtgaagaactgggagacagaggtggtgctgacagacaccctgcacctgaagagcaccctggagaccggctgcacagagtacatctgcatgggcagcatcatgcaccccagccagcacgcccggcggccagaagatgtgaggaccaagggccagctgttccccctggccaaggagttcatcgaccagtactacagcagcatcaagagatttggcagcaaggcccacatggagcggctggaggaggtgaacaaggagattgacaccaccagcacctaccagctgaaggacacagagctgatctacggggccaagcacgcctggagaaatgccagccgctgtgtgggccgcatccagtggagcaagctgcaggtgtttgatgcccgggactgcaccacagcccacggcatgttcaactacatctgcaaccacgtgaagtatgccaccaacaagggcaacctgcggagcgccatcaccatcttcccccagaggacagatggcaagcatgacttccgggtgtggaacagccagctgatccgctatgccggctacaagcagccagatggcagcaccctgggggaccctgccaacgtgcagttcacagaggaggtggccaagaagatgaacctggacatgaggaagaccagcagcctgtggaaggaccaggccctggtggagatcaacattgctgtgctgtacagcttccagagcgacaaggtgaccatcgtggaccaccacagcgccacagagagcttcatcaagcacatggagaatgagtaccgctgccggggcggctgcccagctgactgggtgtggatcgtgccccccatgagcggcagcatcacccctgtgttccaccaggagatgctgaactaccgcctgacccccagctttgagtaccagcctgacccctggaacacccacgtgtggaagggcaccaacggcacccccaccaagaggcgggccatcggcttcaagaagctggccgaggccgtgaagttcagcgccaagctgatgggccaggccatggccaagagggtgaaggccaccatcctgtatgccacagaaacaggcaagagccaggcctatgccaagaccctgtgtgagatcttcaagcacgcctttgatgccaaggtgatgtccatggaggagtatgacatcgtgcacctggagcacgagaccctggtgctggtggtgaccagcacctttggaaatggagaccccccagaaaatggagagaagtttggctgtgccctgatggagatgaggcaccccaacagcgtgcaggaggagaggaagagctacaaggtgcgcttcaacagcgtgagcagctacagcgacagccagaagagcagtggagatggccctgacctgcgggacaactttgagagcgctggccccctggccaacgtgcgcttctctgtgtttggcctgggcagccgggcctacccccacttctgtgcctttggacatgctgtggacaccctgctggaggagctgggcggggagcgcatcctgaagatgagagaaggagatgagctgtgtggccaggaggaggccttccgcacctgggccaagaaggtgttcaaggccgcctgtgatgtgttctgtgtgggagatgatgtgaacatcgagaaggccaacaacagcctcatcagcaatgaccgctcctggaagaggaacaagttccggctgacctttgtggccgaggcccctgagctgacccagggcctgagcaatgtgcacaagaagagggtgtctgctgcccggctgctgagccggcagaacctgcagagccccaagagcagccgcagcaccatctttgtgcggctgcacaccaacggcagccaggagctgcagtaccagcccggggaccacctgggcgtcttccctggcaaccacgaggacctggtgaatgccctgattgaaaggctggaggatgcccctcctgtgaaccagatggtgaaggtggagctgctggaggagaggaacacagccctgggcgtcatcagcaactggacagatgagctgcggctgcccccctgcaccatcttccaggccttcaagtactacctggacatcaccaccccacccacccccctgcagctgcagcagtttgccagcctggccaccagcgagaaggagaagcagaggctgctggtgctgagcaagggcctgcaggagtatgaggagtggaagtggggcaagaaccccaccatcgtggaggtgctggaggagttccccagcatccagatgcctgccaccctgctgctgacccagctgagcctgctgcagccccgctactacagcatcagcagcagcccagacatgtacccagatgaggtgcacctgactgtggccatcgtgtcctaccgcaccagagatggagagggccccatccaccacggcgtgtgcagctcctggctgaaccgcatccaggctgatgagctggtgccctgctttgtgcggggggcccccagcttccacctgcccaggaacccccaggtgccctgcatcctggtgggccctggcactggaattgcccccttccgctccttctggcagcagaggcagtttgacatccagcacaagggcatgaacccctgccccatggtgctggtgtttggctgccggcagagcaagattgaccacatctaccgggaggagaccctgcaggccaagaacaagggcgtcttccgggagctgtacacagcctacagccgggagccagacaagcccaagaagtatgtgcaggacatcctgcaggagcagctggccgagagcgtgtaccgggccctgaaggagcagggcggccacatctacgtgtgtggagatgtgaccatggccgcagatgtgctgaaggccatccagaggatcatgacccagcagggcaagctgtctgcagaagatgctggggtcttcatcagcaggatgagagatgacaaccgctaccacgaggacatctttggagtgaccctgcggacctatgaggtgaccaaccggctgcggtctgagagcatcgccttcatcgaggagagcaagaaggacacagatgaccaggtgttcaagacctag

SEQ ID NO: 81075 - DNA, 3993 bp, Artificial Sequence
  derived and/or modified sequence
atggaggaccacatgttcggcgtgcagcagatccagcccaacgtgatctccgtgcgcctgttcaagcgaaaggtcgggggcctgggattcctcgtgaaagagcgcgtttcgaagcccccggtgattatctccgatttaattcgggggggcgcagcggagcagtcaggcctgattcaggcaggagatattattctggctgttaatggcagacctctagtggatctctcttacgactctgctctagaagtcctgagggggattgccagcgagacccacgtcgtattgatcctaaggggccctgaaggtttcaccacacacttggagaccacttttaccggcgacggcaccccaaaaacaatccgggtgactcagcctcttggccctcccactaaggccgtcgacctgagtcaccagccaccagcgggtaaagagcaaccactcgcagtagatggggcatctgggccaggcaacggccctcaacacgcgtacgatgatggccaggaagccggcagtctgcctcatgcaaatggtctggccccccgtcctccaggacaagacccagctaaaaaagctaccagagtcagcctccaagggagaggcgagaacaacgaactgctgaaagagattgaaccggtcctaagcctgctgacctccggatctagaggtgttaaaggcggtgcacccgccaaggcggagatgaaggacatggggatccaggtagaccgggatctggacggtaaaagccataagccactcccacttggcgtcgaaaatgaccgcgtctttaatgacttatggggcaaagggaatgttcctgtcgtgctcaacaacccgtattctgagaaggagcagccgcccactagtgggaaacagagtccaaccaagaacggatccccttccaagtgccctagatttcttaaggtgaagaactgggaaaccgaggtagttcttaccgacactctccatctgaagtcaacactggaaacaggctgtacagagtacatctgtatgggatccatcatgcatccttcacagcacgcaagacgtccagaagacgtgcgtactaaagggcagctgttcccactggccaaggagtttattgatcagtactatagctcaattaagcgatttgggtcgaaagcacatatggagcgcctggaggaggtgaataaggagattgataccacctctacttatcagctgaaggataccgaactgatatacggggccaaacacgcatggaggaacgcgtctaggtgcgtcggtcgtattcagtggagcaagctgcaggttttcgacgcccgggactgcactaccgcccacggaatgttcaattacatttgcaatcatgtgaaatatgctaccaacaaagggaatctccgctccgctatcacaatcttccctcagcgtactgatggcaagcatgatttcagagtctggaattcacagttgatcagatacgccggctataagcaaccagatggttctacactcggggatccagctaacgtgcagtttaccgaggaggtggccaagaaaatgaacctggacatgaggaaaacctccagtctctggaaggaccaggctcttgtcgaaatcaatatcgccgtgctgtatagcttccagtccgacaaggtgactattgtggaccaccatagcgcgacagagtcttttatcaagcacatggagaacgagtacaggtgtcggggcgggtgccctgccgactgggtgtggatcgtccccccaatgtccggaagcatcacacctgtgttccaccaggaaatgcttaactaccgcctgaccccgagcttcgagtatcagccagacccctggaatactcacgtgtggaagggcactaacggaacacctaccaagaggcgggcaataggctttaagaaactggccgaagcggttaagtttagtgcaaagcttatgggtcaagctatggctaagcgggtcaaagccaccatcttatacgcaacagagactggtaagagtcaggcgtacgcaaaaacactgtgtgagatttttaagcacgcgtttgatgccaaggtgatgtctatggaggagtacgatatagttcacctggaacacgagaccctggtgctcgtggtgacctcaacatttggcaatggagacccacccgaaaatggagaaaaattcggttgtgcgttgatggagatgcgtcatcccaatagtgtccaggaggagcgtaagtcgtacaaagttcgttttaattcagtgtctagctactccgattctcagaagtcctctggagacggtcccgatttgcgtgataacttcgaatcagcagggccactagcaaatgtcaggttttctgtcttcgggttggggtctcgagcctacccacacttttgcgcttttggacacgcggtggacactctactagaagagctgggaggagaacgaatcctgaagatgagggaaggagacgaactctgtggccaggaagaggcatttcgcacgtgggctaaaaaggtgttcaaagcagcctgtgacgtgttctgcgtgggtgacgacgtcaatattgagaaagcaaacaactcacttattagcaatgacaggtcatggaaacgaaacaaattccgcttaacatttgtggcagaggctccagagctaactcaaggactgagtaatgtgcacaagaagagagtctctgcggcacggctgctgagccgccagaacttgcagtccccaaagtcctcccgtagcacaatttttgttagactgcataccaatggatcacaggaactgcagtatcagcctggggaccatttgggtgtgttccctggtaatcatgaagacctggtgaatgcactcatcgaacgactggaggacgccccccccgtgaatcagatggttaaagttgaattgctggaggagcgtaacaccgccctcggcgtgatttccaactggaccgatgaactccgcctgcctccctgcacaatcttccaggcttttaagtactacctggacatcaccaccccccccacacctctgcaactccagcaattcgcgagtctggcgacatcagaaaaagagaagcaaaggctgttggtgctatctaaagggctgcaggagtatgaagagtggaaatgggggaaaaatcctaccattgtcgaggttctcgaagaattccccagcattcaaatgcccgcgacactccttctaacacagctctctcttttgcagcctaggtactacagcattagttcgtcccccgacatgtacccagatgaggtgcatctcacagtggcgatcgtgtcttacaggaccagagacggcgagggacccatccaccacggcgtgtgctcttcatggttgaatcgaattcaagccgatgagctggtaccatgtttcgtcagaggggcccctagctttcacctccccaggaatccacaggtgccctgcatcctcgtgggtcccggaactggaatcgcccccttcagaagcttctggcagcaacgtcagttcgatattcagcataagggcatgaatccttgtcctatggtactcgtgttcggctgcaggcagagtaagatcgatcatatctatcgggaggaaaccctccaagccaagaacaagggtgtgttcagggaattgtatacagcctatagcagagaacctgataaacctaagaaatatgtccaggacatcctgcaggaacaactggccgaaagcgtatatcgcgccctgaaggagcagggcggacacatatacgtgtgcggtgatgtaacaatggcggcagacgtactcaaagcgattcaaagaatcatgactcagcagggcaaactgagtgcagaggacgctggtgtgtttatctcccggatgagagacgacaaccgatatcatgaggatatcttcggcgtcaccctgcgtacatatgaagtgaccaaccgcctgagatcggaatccattgcgttcatagaagaatcaaaaaaagacacagacgaccaggtgttcaaaacttag

SEQ ID NO: 81076 - DNA, 4676 bp, Artificial Sequence
  derived and/or modified sequence
agagcggctcttttaatgagggttgcgacgtctccctccccacacccataaaccagtcgggttggacgtcactgctaattcgtttcagtgatgataggataaaggagggacattaagaaataaattccccctcacgaccctcgctgagctcacggctcagtccctacatatttatgccgcgtttccagccgctgggtgaggagctacttagcgccgcggctcctccgaggggcggccgggcagcgagcagcggccgagcggacgggctcatgatgcctcagatctgatccgcatctaacaggctggcaatgaagatacccagagaatagttcacatctatcatgcgtcacttctagacacagccatcagacgcatctcctcccctttctgcctgaccttagggacacgtcccaccgcctctcttgacgtctgcctggtcaaccatcacttccttagagaataaggagagaggcggatgcaggaaatcatgccaccgacgggccaccagccatgagtgggtgacgctgagctgacgtcaaagacagagagggctgaagccttgtcagcacctgtcaccccggctcctgctctccgtgtagcctgaagcctggatcctcctggtgaaatcatcttggcctgatagcattgtgaggtcttcagacaggacccctcggaagctagttaccatggaggatcacatgttcggtgttcagcaaatccagcccaatgtcatttctgttcgtctcttcaagcgcaaagttgggggcctgggatttctggtgaaggagcgggtcagtaagccgcccgtgatcatctctgacctgattcgtgggggcgccgcagagcagagtggcctcatccaggccggagacatcattcttgcggtcaacggccggcccttggtggacctgagctatgacagcgccctggaggtactcagaggcattgcctctgagacccacgtggtcctcattctgaggggccctgaaggtttcaccacgcacctggagaccacctttacaggtgatgggacccccaagaccatccgggtgacacagcccctgggtccccccaccaaagccgtggatctgtcccaccagccaccggccggcaaagaacagcccctggcagtggatggggcctcgggtcccgggaatgggcctcagcatgcctacgatgatgggcaggaggctggctcactcccccatgccaacggcctggcccccaggcccccaggccaggaccccgcgaagaaagcaaccagagtcagcctccaaggcagaggggagaacaatgaactgctcaaggagatagagcctgtgctgagccttctcaccagtgggagcagaggggtcaagggaggggcacctgccaaggcagagatgaaagatatgggaatccaggtggacagagatttggacggcaagtcacacaaacctctgcccctcggcgtggagaacgaccgagtcttcaatgacctatgggggaagggcaatgtgcctgtcgtcctcaacaacccatattcagagaaggagcagccccccacctcaggaaaacagtcccccacaaagaatggcagcccctccaagtgtccacgcttcctcaaggtcaagaactgggagactgaggtggttctcactgacaccctccaccttaagagcacattggaaacgggatgcactgagtacatctgcatgggctccatcatgcatccttctcagcatgcaaggaggcctgaagacgtccgcacaaaaggacagctcttccctctcgccaaagagtttattgatcaatactattcatcaattaaaagatttggctccaaagcccacatggaaaggctggaagaggtgaacaaagagatcgacaccactagcacttaccagctcaaggacacagagctcatctatggggccaagcacgcctggcggaatgcctcgcgctgtgtgggcaggatccagtggtccaagctgcaggtattcgatgcccgtgactgcaccacggcccacgggatgttcaactacatctgtaaccatgtcaagtatgccaccaacaaagggaacctcaggtctgccatcaccatattcccccagaggacagacggcaagcacgacttccgagtctggaactcccagctcatccgctacgctggctacaagcagcctgacggctccaccctgggggacccagccaatgtgcagttcacagaggaagtggccaagaagatgaacttagacatgaggaagacgtcctccctgtggaaggaccaggcgctggtggagatcaatatcgcggttctctatagcttccagagtgacaaagtgaccattgttgaccatcactccgccaccgagtccttcattaagcacatggagaatgagtaccgctgccgggggggctgccctgccgactgggtgtggatcgtgccccccatgtccggaagcatcacccctgtgttccaccaggagatgctcaactaccggctcaccccctccttcgaataccagcctgatccctggaacacgcatgtctggaaaggcaccaacgggacccccacaaagcggcgagccattggcttcaagaagctagcagaagctgtcaagttctcggccaagctgatggggcaggctatggccaagagggtgaaagcgaccatcctctatgccacagagacaggcaaatcgcaagcttatgccaagaccttgtgtgagatcttcaaacacgcctttgatgccaaggtgatgtccatggaagaatatgacattgtgcacctggaacatgaaactctggtccttgtggtcaccagcacctttggcaatggagatccccctgagaatggggagaaattcggctgtgctttgatggaaatgaggcaccccaactctgtgcaggaagaaaggaagagctacaaggtccgattcaacagcgtctcctcctactctgactcccaaaaatcatcaggcgatgggcccgacctcagagacaactttgagagtgctggacccctggccaatgtgaggttctcagtttttggcctcggctcacgagcataccctcacttttgcgccttcggacacgctgtggacaccctcctggaagaactgggaggggagaggatcctgaagatgagggaaggggatgagctctgtgggcaggaagaggctttcaggacctgggccaagaaggtcttcaaggcagcctgtgatgtcttctgtgtgggagatgatgtcaacattgaaaaggccaacaattccctcatcagcaatgatcgcagctggaagagaaacaagttccgcctcacctttgtggccgaagctccagaactcacacaaggtctatccaatgtccacaaaaagcgagtctcagctgcccggctccttagccgtcaaaacctccagagccctaaatccagtcggtcaactatcttcgtgcgtctccacaccaacgggagccaggagctgcagtaccagcctggggaccacctgggtgtcttccctggcaaccacgaggacctcgtgaatgccctgatcgagcggctggaggacgcgccgcctgtcaaccagatggtgaaagtggaactgctggaggagcggaacacggctttaggtgtcatcagtaactggacagacgagctccgcctcccgccctgcaccatcttccaggccttcaagtactacctggacatcaccacgccaccaacgcctctgcagctgcagcagtttgcctccctagctaccagcgagaaggagaagcagcgtctgctggtcctcagcaagggtttgcaggagtacgaggaatggaaatggggcaagaaccccaccatcgtggaggtgctggaggagttcccatctatccagatgccggccaccctgctcctgacccagctgtccctgctgcagccccgctactattccatcagctcctccccagacatgtaccctgatgaagtgcacctcactgtggccatcgtttcctaccgcactcgagatggagaaggaccaattcaccacggcgtatgctcctcctggctcaaccggatacaggctgacgaactggtcccctgtttcgtgagaggagcacccagcttccacctgccccggaacccccaagtcccctgcatcctcgttggaccaggcaccggcattgcccctttccgaagcttctggcaacagcggcaatttgatatccaacacaaaggaatgaacccctgccccatggtcctggtcttcgggtgccggcaatccaagatagatcatatctacagggaagagaccctgcaggccaagaacaagggggtcttcagagagctgtacacggcttactcccgggagccagacaaaccaaagaagtacgtgcaggacatcctgcaggagcagctggcggagtctgtgtaccgagccctgaaggagcaagggggccacatatacgtctgtggggacgtcaccatggctgctgatgtcctcaaagccatccagcgcatcatgacccagcaggggaagctctcggcagaggacgccggcgtattcatcagccggatgagggatgacaaccgataccatgaggatatttttggagtcaccctgcgaacgtacgaagtgaccaaccgccttagatctgagtccattgccttcattgaagagagcaaaaaagacaccgatgaccaggtattcaaaacc

SEQ ID NO: 81077 - DNA, 3993 bp, Artificial Sequence
  derived and/or modified sequence
atggaagaccacatgttcggagtccaacagatccagccgaacgtgatatccgttcggcttttcaagaggaaagtgggaggtctggggtttttagtgaaggaacgagtgagtaaaccccctgtgatcatcagcgatttgatccggggaggcgcagccgaacagtcgggattaatccaggctggggatataatcctggctgtaaatgggagacccttagttgatctgtcctatgacagtgcccttgaagtactacgcggtattgcttccgagacgcatgtagttctgatccttcgaggtcctgagggctttaccactcacttagaaacaacatttactggagatggtacccccaaaaccatacgcgtgactcagccactgggaccccctaccaaggccgtggatctttcacatcagccgccagcgggtaaggagcagccgctggctgtcgacggcgcttccggcccaggtaatggacctcagcacgcttatgatgatggccaggaggccggatcactcccacatgccaatggcttagctccccgtcctccaggacaggatcccgcaaaaaaagccacccgagtgtccctgcaggggcgaggagaaaataatgaactgttgaaagaaatcgagccagtcctgtcactgctgacctcaggttcgcgcggagtcaaaggcggtgcgcctgcgaaagcggaaatgaaggacatgggaatacaagtggaccgagatctggatggaaaaagccacaaacctctgccactgggggtcgaaaacgatagggtgttcaacgacctctggggcaaaggcaacgtgcctgtcgtactgaataacccatattctgaaaaggagcagcctccaaccagtggaaaacaaagccctaccaagaacgggtctcctagcaaatgccccagatttctcaaagttaaaaattgggaaacagaggtggtgttgacggacacactgcatctaaagtctacactcgaaactggctgtaccgaatatatttgtatgggtagcatcatgcacccttcccaacacgctcgcagacccgaagatgttagaactaagggacagctattcccactggccaaggaatttatcgatcagtactatagtagtatcaagcgattcggctctaaggcccacatggaacgcttagaggaggtgaacaaagagatcgataccactagtacttaccagctgaaggacacagagctgatatacggagctaagcacgcttggaggaatgctagtcgctgtgtcggaaggatccagtggagcaagctccaggtctttgacgctcgcgattgcacaaccgcgcatggcatgtttaattacatttgcaatcacgttaagtatgcaactaacaaaggcaacctcagatccgccatcacaatcttcccgcagcggaccgatggaaaacatgatttccgggtctggaactcccagttaatccgttatgctggttacaaacaaccagacgggtctacgctgggcgatcctgccaacgtgcaattcactgaagaagtggccaagaagatgaatttggacatgaggaagacgtctagcttgtggaaagaccaggcgttagtcgagatcaacattgcagtgttatattcttttcaatccgataaggtcaccatcgtggatcaccactccgccacagagagtttcataaagcatatggagaacgaatacagatgtcggggagggtgccccgcagactgggtgtggatagtgcccccaatgtctggctccattactccagtgttccaccaggagatgctcaactaccgattaaccccatctttcgaatatcagccagatccgtggaacactcatgtgtggaagggaactaacggcactcctacgaagaggagagcgataggatttaaaaagcttgctgaggctgttaaattcagcgccaaactgatgggccaggcgatggccaagagagtcaaggcaacaatcctttatgcgacagaaacaggtaaaagccaagcgtatgccaaaacactgtgtgagatatttaagcacgcatttgatgctaaagtgatgtctatggaagagtacgacattgtccaccttgagcacgagacgcttgtcctggttgtgacttcaacctttgggaacggagaccccccagaaaatggtgagaagtttggatgcgctctcatggaaatgagacatccgaacagtgtgcaggaagagcgcaaatcctacaaagtcaggttcaattccgtttcatcatatagtgattctcagaaatcttctggcgacgggccagacctgcgcgacaattttgagtctgcagggcctcttgccaacgtgagattcagtgtgtttggattgggcagccgggcttacccccacttctgcgccttcggccatgctgtcgatacattgctggaggagctgggtggggaaaggatcctgaagatgagggagggagatgagctctgcggccaggaggaagccttccgcacatgggcaaagaaagtgttcaaagccgcatgcgatgttttctgcgtgggcgacgacgtgaacatcgagaaagcaaacaacagtcttatctcaaacgataggtcctggaagcgtaataaatttcggttgacctttgtcgctgaggcaccagagctgactcagggactgtcgaatgtgcataagaagcgggtaagcgctgctaggcttctgtccaggcaaaacctccagtccccaaagtcctcacgctctacaatatttgttagattgcatacaaatggttcacaagagctccagtatcagcccggagaccaccttggcgtgtttcccggaaaccatgaagacctggttaatgccctcattgagcgcctggaggatgcacccccagtgaaccagatggtcaaagtggagcttttggaggagcgtaacacagcactgggcgtcatatccaactggaccgacgagctgagactgcctccttgtacaatctttcaggcatttaaatattacctcgatatcacaacgccgccaacacctctgcagctccaacagtttgcgtcactagccacaagcgagaaggagaagcagagactgctcgtgctctctaaaggcctgcaggaatatgaggaatggaagtgggggaaaaatccaactattgtagaagtactggaggagttcccatctattcagatgccagccacactcctgctgactcaactgtcgttgctccagccaaggtactactccattagttcttcacctgacatgtatcctgatgaggttcatctcaccgtcgccatcgtctcatacagaacaagagatggggagggaccaatccaccatggtgtgtgcagttcctggcttaatcggatccaggctgacgaactggtaccctgttttgtcagaggtgcaccttctttccatctacccagaaacccacaagtcccatgcatcctggtcggaccagggacagggattgctccctttagatctttctggcagcagcggcagtttgacattcagcataaaggcatgaacccctgcccgatggtgcttgtctttggatgccggcaaagcaaaatagatcacatataccgggaggaaacattacaagcaaagaataagggggtttttcgggagctgtacaccgcttacagtagggagccggacaaacccaaaaaatatgtgcaggatatactccaggaacagctggcagagagcgtctatcgggcactaaaagaacaaggcggtcatatttatgtgtgtggagacgttactatggctgcagatgttctgaaggccatacagaggattatgacccaacagggcaaattgtctgcggaagacgccggagtcttcatttctcgcatgagagatgataacagataccacgaggacatcttcggagtgacactgcggacttatgaagtaactaatagactaaggtcagaatctatcgctttcatcgaagaatctaagaaggacacagatgatcaggtatttaagacgtag

SEQ ID NO: 81078 - DNA, 3993 bp, Artificial Sequence
  derived and/or modified sequence
atggaggaccacatgttcggcgtgcagcagatccagcccaacgtgatcagcgtgagactgttcaagagaaaggtgggcggcctgggcttcctggtgaaggagagagtgagcaagccccccgtgatcatcagcgacctgatcagaggcggcgccgccgagcagagcggcctgatccaggccggcgacatcatcctggccgtgaacggcagacccctggtggacctgagctacgacagcgccctggaggtgctgagaggcatcgccagcgagacccacgtggtgctgatcctgagaggccccgagggcttcaccacccacctggagaccaccttcaccggcgacggcacccccaagaccatcagagtgacccagcccctgggcccccccaccaaggccgtggacctgagccaccagccccccgccggcaaggagcagcccctggccgtggacggcgccagcggccccggcaacggcccccagcacgcctacgacgacggccaggaggccggcagcctgccccacgccaacggcctggcccccagaccccccggccaggaccccgccaagaaggccaccagagtgagcctgcagggcagaggcgagaacaacgagctgctgaaggagatcgagcccgtgctgagcctgctgaccagcggcagcagaggcgtgaagggcggcgcccccgccaaggccgagatgaaggacatgggcatccaggtggacagagacctggacggcaagagccacaagcccctgcccctgggcgtggagaacgacagagtgttcaacgacctgtggggcaagggcaacgtgcccgtggtgctgaacaacccctacagcgagaaggagcagccccccaccagcggcaagcagagccccaccaagaacggcagccccagcaagtgccccagattcctgaaggtgaagaactgggagaccgaggtggtgctgaccgacaccctgcacctgaagagcaccctggagaccggctgcaccgagtacatctgcatgggcagcatcatgcaccccagccagcacgccagaagacccgaggacgtgagaaccaagggccagctgttccccctggccaaggagttcatcgaccagtactacagcagcatcaagagattcggcagcaaggcccacatggagagactggaggaggtgaacaaggagatcgacaccaccagcacctaccagctgaaggacaccgagctgatctacggcgccaagcacgcctggagaaacgccagcagatgcgtgggcagaatccagtggagcaagctgcaggtgttcgacgccagagactgcaccaccgcccacggcatgttcaactacatctgcaaccacgtgaagtacgccaccaacaagggcaacctgagaagcgccatcaccatcttcccccagagaaccgacggcaagcacgacttcagagtgtggaacagccagctgatcagatacgccggctacaagcagcccgacggcagcaccctgggcgaccccgccaacgtgcagttcaccgaggaggtggccaagaagatgaacctggacatgagaaagaccagcagcctgtggaaggaccaggccctggtggagatcaacatcgccgtgctgtacagcttccagagcgacaaggtgaccatcgtggaccaccacagcgccaccgagagcttcatcaagcacatggagaacgagtacagatgcagaggcggctgccccgccgactgggtgtggatcgtgccccccatgagcggcagcatcacccccgtgttccaccaggagatgctgaactacagactgacccccagcttcgagtaccagcccgacccctggaacacccacgtgtggaagggcaccaacggcacccccaccaagagaagagccatcggcttcaagaagctggccgaggccgtgaagttcagcgccaagctgatgggccaggccatggccaagagagtgaaggccaccatcctgtacgccaccgagaccggcaagagccaggcctacgccaagaccctgtgcgagatcttcaagcacgccttcgacgccaaggtgatgagcatggaggagtacgacatcgtgcacctggagcacgagaccctggtgctggtggtgaccagcaccttcggcaacggcgacccccccgagaacggcgagaagttcggctgcgccctgatggagatgagacaccccaacagcgtgcaggaggagagaaagagctacaaggtgagattcaacagcgtgagcagctacagcgacagccagaagagcagcggcgacggccccgacctgagagacaacttcgagagcgccggccccctggccaacgtgagattcagcgtgttcggcctgggcagcagagcctacccccacttctgcgccttcggccacgccgtggacaccctgctggaggagctgggcggcgagagaatcctgaagatgagagagggcgacgagctgtgcggccaggaggaggccttcagaacctgggccaagaaggtgttcaaggccgcctgcgacgtgttctgcgtgggcgacgacgtgaacatcgagaaggccaacaacagcctgatcagcaacgacagaagctggaagagaaacaagttcagactgaccttcgtggccgaggcccccgagctgacccagggcctgagcaacgtgcacaagaagagagtgagcgccgccagactgctgagcagacagaacctgcagagccccaagagcagcagaagcaccatcttcgtgagactgcacaccaacggcagccaggagctgcagtaccagcccggcgaccacctgggcgtgttccccggcaaccacgaggacctggtgaacgccctgatcgagagactggaggacgccccccccgtgaaccagatggtgaaggtggagctgctggaggagagaaacaccgccctgggcgtgatcagcaactggaccgacgagctgagactgcccccctgcaccatcttccaggccttcaagtactacctggacatcaccaccccccccacccccctgcagctgcagcagttcgccagcctggccaccagcgagaaggagaagcagagactgctggtgctgagcaagggcctgcaggagtacgaggagtggaagtggggcaagaaccccaccatcgtggaggtgctggaggagttccccagcatccagatgcccgccaccctgctgctgacccagctgagcctgctgcagcccagatactacagcatcagcagcagccccgacatgtaccccgacgaggtgcacctgaccgtggccatcgtgagctacagaaccagagacggcgagggccccatccaccacggcgtgtgcagcagctggctgaacagaatccaggccgacgagctggtgccctgcttcgtgagaggcgcccccagcttccacctgcccagaaacccccaggtgccctgcatcctggtgggccccggcaccggcatcgcccccttcagaagcttctggcagcagagacagttcgacatccagcacaagggcatgaacccctgccccatggtgctggtgttcggctgcagacagagcaagatcgaccacatctacagagaggagaccctgcaggccaagaacaagggcgtgttcagagagctgtacaccgcctacagcagagagcccgacaagcccaagaagtacgtgcaggacatcctgcaggagcagctggccgagagcgtgtacagagccctgaaggagcagggcggccacatctacgtgtgcggcgacgtgaccatggccgccgacgtgctgaaggccatccagagaatcatgacccagcagggcaagctgagcgccgaggacgccggcgtgttcatcagcagaatgagagacgacaacagataccacgaggacatcttcggcgtgaccctgagaacctacgaggtgaccaacagactgagaagcgagagcatcgccttcatcgaggagagcaagaaggacaccgacgaccaggtgttcaagacctag

SEQ ID NO: 81079 - protein, 1468 aa, Artificial Sequence
  derived and/or modified sequence
MEDHMFGVQQIQPNVISVRLFKRKVGGLGFLVKERVSKPPVIISDLIRGGAAEQSGLIQAGDIILAVNGRPLVDLSYDSALEVLRGIASETHVVLILRGPEGFTTHLETTFTGDGTPKTIRVTQPLGPPTKAVDLSHQPPAGKEQPLAVDGASGPGNGPQHAYDDGQEAGSLPHANGLAPRPPGQDPAKKATRVSLQGRGENNELLKEIEPVLSLLTSGSRGVKGGAPAKAEMKDMGIQVDRDLDGKSHKPLPLGVENDRVFNDLWGKGNVPVVLNNPYSEKEQPPTSGKQSPTKNGSPSKCPRFLKVKNWETEVVLTDTLHLKSTLETGCTEYICMGSIMHPSQHARRPEDVRTKGQLFPLAKEFIDQYYSSIKRFGSKAHMERLEEVNKEIDTTSTYQLKDTELIYGAKHAWRNASRCVGRIQWSKLQVFDARDCTTAHGMFNYICNHVKYATNKGNLRSAITIFPQRTDGKHDFRVWNSQLIRYAGYKQPDGSTLGDPANVQFTEICIQQGWKPPRGRFDVLPLLLQANGNDPELFQIPPELVLEVPIRHPKFEWFKDLGLKWYGLPAVSNMLLEIGGLEFSACPFSGWYMGTEIGVRDYCDNSRYNILEEVAKKMNLDMRKTSSLWKDQALVEINIAVLYSFQSDKVTIVDHHSATESFIKHMENEYRCRGGCPADWVWIVPPMSGSITPVFHQEMLNYRLTPSFEYQPDPWNTHVWKGTNGTPTKRRAIGFKKLAEAVKFSAKLMGQAMAKRVKATILYATETGKSQAYAKTLCEIFKHAFDAKVMSMEEYDIVHLEHETLVLVVTSTFGNGDPPENGEKFGCALMEMRHPNSVQEERKYPEPLRFFPRKGPPLPNGDTEVHGLAAARDSQHRSYKVRFNSVSSYSDSQKSSGDGPDLRDNFESAGPLANVRFSVFGLGSRAYPHFCAFGHAVDTLLEELGGERILKMREGDELCGQEEAFRTWAKKVFKAACDVFCVGDDVNIEKANNSLISNDRSWKRNKFRLTFVAEAPELTQGLSNVHKKRVSAARLLSRQNLQSPKSSRSTIFVRLHTNGSQELQYQPGDHLGVFPGNHEDLVNALIERLEDAPPVNQMVKVELLEERNTALGVISNWTDELRLPPCTIFQAFKYYLDITTPPTPLQLQQFASLATSEKEKQRLLVLSKGLQEYEEWKWGKNPTIVEVLEEFPSIQMPATLLLTQLSLLQPRYYSISSSPDMYPDEVHLTVAIVSYRTRDGEGPIHHGVCSSWLNRIQADELVPCFVRGAPSFHLPRNPQVPCILVGPGTGIAPFRSFWQQRQFDIQHKGMNPCPMVLVFGCRQSKIDHIYREETLQAKNKGVFRELYTAYSREPDKPKKYVQDILQEQLAESVYRALKEQGGHIYVCGDVTMAADVLKAIQRIMTQQGKLSAEDAGVFISRMRDDNRYHEDIFGVTLRTYEVTNRLRSESIAFIEESKKDTDEVFSS

SEQ ID NO: 81080 - protein, 67 aa, Artificial Sequence
  derived and/or modified sequence
HPNSVQEERKYPEPLRFFPRKGPPLPNGDTEVHGLAAARDSQHRSYKVRFNSVSSYSDSQKSSGDGP

SEQ ID NO: 81081 - DNA, 4407 bp, Artificial Sequence
  derived and/or modified sequence
atggaggaccacatgttcggtgtccagcagattcagccgaacgtcatcagtgtgaggctgttcaagcgcaaggtaggaggcctgggcttcttagtgaaggagcgggtatccaagcctcctgtgatcataagcgaccttattcgcgggggagcagcagaacagtctgggttgattcaagccggagatataattcttgcagtgaacgggagacccctcgtggatctcagttatgacagcgcccttgaagtccttagagggatagcctccgagacccatgtggtcctgattcttcgcgggcctgagggttttaccacacacctggagaccacatttacaggagacggtacccctaagacaatccgggtcacccaacccctagggccacctaccaaggccgtcgacctctctcaccagcctcccgccggcaaggaacagcctctcgccgtcgatggagcaagtgggccgggaaatgggccccaacacgcatacgatgacgggcaggaggcaggttcgttgccacacgccaatggtctggcacctaggcctccagggcaggatccagcaaagaaagccacccgggtaagcctccagggccgcggcgagaataatgagcttctgaaagagattgagcctgtgttgtctttgctcactagcgggtcccggggagtgaagggcggggcccccgctaaggccgagatgaaagatatgggaatccaggttgatagggatttggacggcaaaagccataagcctctcccgctaggtgtggagaacgaccgcgtgtttaacgacctatggggtaagggcaatgttccagtagtacttaataacccctatagtgaaaaagagcagccacctacatctgggaaacagagccccacaaaaaacggatctccaagtaagtgccctcggtttctgaaagtcaagaactgggaaaccgaagttgtgctgaccgacacccttcaccttaagtcgaccctggagacgggttgtaccgaatacatctgcatgggctccattatgcatccttcccagcacgccagacgacccgaggatgttaggaccaaaggtcagctgttcccgctggccaaggagttcatagaccagtattatagctccatcaagaggttcggcagcaaggcacacatggagcggcttgaggaggtcaacaaagagatagacacgacctcaacttaccaacttaaggacacagagttgatctacggcgcgaagcacgcctggaggaatgcttcccgctgtgtcggtcgtatccaatggagcaaactgcaagttttcgatgccagggattgtactactgcgcacggtatgttcaactacatctgcaaccacgtcaagtacgcaaccaacaaaggtaatctgcgaagtgctatcaccatcttcccgcagagaacagacggaaagcatgactttcgggtgtggaactcacagcttatccgctacgccgggtataagcagccagacggcagtacgcttggagatcctgccaatgtgcaatttaccgagatctgcattcagcaagggtggaagccgcctcgcggaagattcgatgtgctgcctctgctcctacaggcgaacggcaacgaccccgaactgttccaaattccgccggagctggtgctcgaggtccccattagacatcccaagtttgaatggtttaaggacctgggcctgaaatggtacggcctgcctgccgtgagcaacatgttgctcgaaattgggggactggaattctctgcctgtcctttctctggttggtacatgggtactgagattggggtccgcgattattgcgacaactcgaggtacaacatactggaagaagtggctaagaagatgaacctggacatgagaaaaacatctagtctctggaaggaccaggccctggtcgaaataaacatagcagtgctgtacagctttcagtccgataaggttacaatagtcgaccatcatagtgctacagagtcttttatcaagcacatggagaatgagtacaggtgccgcggtggctgccccgctgactgggtttggatcgtgcctcctatgagcgggagcatcaccccagtcttccaccaggaaatgctgaattaccggcttactccttcatttgagtatcaaccagatccctggaacacgcatgtttggaaggggactaacggcacacccacaaagagacgcgccatcggcttcaaaaagctggccgaagctgtcaaatttagcgcaaaactgatgggtcaggctatggcaaaacgagtcaaggctacgatactgtatgcaacagaaacaggtaagtctcaggcgtatgcaaagacactctgcgagatatttaaacacgctttcgacgccaaggtcatgagtatggaagagtacgacatcgttcatttggaacatgagacgctggtcctcgtcgttaccagtacctttgggaacggagacccccccgaaaatggggagaagttcggttgcgctctcatggaaatgcggcaccccaatagcgtgcaagaggagaggaagtacccagagcctctgagattctttcccagaaaggggcctcccctccccaacggcgataccgaggtccacgggctagccgccgcgcgtgactcccagcaccggtcgtataaggttcggtttaatagcgtgtcatcatactctgactcccagaagtctagtggcgatggcccagacctccgtgacaattttgaaagcgctggaccccttgctaacgtccgcttttccgtctttggcttggggtcccgggcttatccccatttctgcgcgttcgggcacgccgtggacacgcttctggaggagttgggcggagagcggattctgaaaatgcgcgagggcgatgaactgtgtggccaagaggaggccttcagaacttgggccaagaaggtctttaaggccgcttgcgacgtattttgtgtcggagacgatgtgaacatcgagaaggcaaataatagtctgatatcgaatgaccgctcatggaagaggaataagttccggctgacctttgtcgccgaggcccctgagctaacccaggggttatcgaatgtgcacaaaaagcgggttagcgcagcaagactcttatcccggcaaaacctgcagtctccaaaaagctctagaagtactatctttgtgcggctgcataccaacggttcgcaggagctccagtatcaacctggagatcatctgggtgtatttcctggtaaccatgaggacttagtaaatgctttaatcgagcggctggaggatgctccaccagtgaaccagatggtgaaggtggaactgctggaggaacggaacacagctttgggggttatttcaaattggacggatgagctgagactgccaccttgcaccattttccaggcatttaagtactatctggacattaccacgcctcccacaccattgcagctacagcagttcgcgtccttggctacttcggaaaaagaaaaacagcgattactcgtgctttccaaagggttgcaggaatacgaagaatggaagtgggggaagaacccaacaattgtcgaggtgctggaggaatttcctagcatacagatgccagctaccctgctgctgacacagctctccctgctccagccccgctactactccatttctagctctccagacatgtaccccgacgaggtacatctgacggttgccattgtgagctaccgcaccagagatggagagggtcctatccaccacggggtttgtagctcctggcttaaccgaattcaggctgacgagctggtcccctgtttcgttagaggcgccccatcttttcacttaccgcgtaacccacaggttccatgcatacttgttggaccaggaaccggcattgctccttttagatcattctggcagcaaaggcagttcgacatacagcacaaaggcatgaacccgtgtccaatggtgctggtgtttgggtgccgccaatccaaaatcgatcacatttatcgggaagagacactgcaggctaagaataagggcgtatttcgggaattatacacggcctactcccgggagcccgataaacctaagaagtatgtacaggacattttacaggagcagctcgcagagtcggtttaccgggcgctcaaggagcagggtggccacatttacgtatgcggggatgtgaccatggcagccgacgtcctgaaggctattcagcggatcatgactcagcaggggaaattaagcgccgaagacgcaggagtgttcatcagcagaatgcgggatgacaaccgttatcatgaagacattttcggggtcacactgcggacctacgaggtgaccaaccgtttgagatccgaatcgattgctttcattgaggagagtaaaaaggacaccgatgaagtgttctcttcctag

SEQ ID NO: 81082 - DNA, 204 bp, Artificial Sequence
  derived and/or modified sequence
cacccaaatagtgtgcaggaggaaaggaagtaccccgaaccgctgcgtttctttccccgtaagggccccccgctgcccaatggtgatacagaagtgcacggattggctgccgctcgggattcccagcataggtcctataaggtgaggttcaatagtgtcagcagctactccgatagtcagaagtcatctggcgatggcccctag

SEQ ID NO: 81083 - DNA, 4407 bp, Artificial Sequence
  derived and/or modified sequence
atggaggaccacatgtttggagtgcagcagatccagcccaacgtcatctctgtgcggctcttcaagaggaaggtgggcggcctgggcttcctggtgaaggagcgggtgtccaagccccctgtgatcatcagtgacctgatccggggcggcgctgctgagcagagcggcctcatccaggccggggacatcatcctggccgtgaatggccggcccctggtggacctgtcctatgattctgccctggaggtgctgcggggcatcgccagcgagacccacgtggtgctgatcctgcggggccctgagggcttcaccacccacctggagaccaccttcaccggagatggcacccccaagaccatccgggtgacccagcccctgggcccccccaccaaggctgtggacctgagccaccagcccccagctgggaaggagcagcccctggccgtggatggagccagcggccctggaaatggcccccagcacgcctatgatgatggccaggaggccggcagcctgccccacgccaacggcctggccccccggcccccaggccaggaccctgccaagaaggccaccagggtgtccctgcagggcagaggagaaaataatgagctgctgaaggagattgagcctgtgctgagcctgctgaccagcggcagccggggcgtgaagggcggggccccagccaaggccgagatgaaggacatgggcatccaggtggaccgggacctggatggcaagagccacaagcccctgcccctgggcgtggagaatgacagagtcttcaatgacctgtggggcaaaggaaatgtgcctgtggtgctgaacaacccctacagcgagaaggagcagccccccaccagcggcaagcagagccccaccaagaatggcagccccagcaaatgtccccgcttcctgaaggtgaagaactgggagacagaggtggtgctgacagacaccctgcacctgaagagcaccctggagaccggctgcacagagtacatctgcatgggcagcatcatgcaccccagccagcacgcccggcggccagaagatgtgaggaccaagggccagctgttccccctggccaaggagttcatcgaccagtactacagcagcatcaagagatttggcagcaaggcccacatggagcggctggaggaggtgaacaaggagattgacaccaccagcacctaccagctgaaggacacagagctgatctacggggccaagcacgcctggagaaatgccagccgctgtgtgggccgcatccagtggagcaagctgcaggtgtttgatgcccgggactgcaccacagcccacggcatgttcaactacatctgcaaccacgtgaagtatgccaccaacaagggcaacctgcggagcgccatcaccatcttcccccagaggacagatggcaagcatgacttccgggtgtggaacagccagctgatccgctatgccggctacaagcagccagatggcagcaccctgggggaccctgccaacgtgcagttcacagagatctgcatccagcagggctggaagccaccccggggccgctttgatgtgctgcccctgctgctgcaggccaatggaaatgaccctgagctgttccagatccccccagagctggtgctggaggtgcccatccgccaccccaagtttgagtggttcaaggacctgggcctgaagtggtacggcctgcctgctgtgagcaacatgctgctggagattggaggcctggagttcagcgcctgccccttcagcggctggtacatgggcacagaaattggagtgcgggactactgtgacaacagccgctacaacatcctggaggaggtggccaagaagatgaacctggacatgaggaagaccagcagcctgtggaaggaccaggccctggtggagatcaacattgctgtgctgtacagcttccagagcgacaaggtgaccatcgtggaccaccacagcgccacagagagcttcatcaagcacatggagaatgagtaccgctgccggggcggctgcccagctgactgggtgtggatcgtgccccccatgagcggcagcatcacccctgtgttccaccaggagatgctgaactaccgcctgacccccagctttgagtaccagcctgacccctggaacacccacgtgtggaagggcaccaacggcacccccaccaagagaagagccatcggcttcaagaagctggccgaggccgtgaagttcagcgccaagctgatgggccaggccatggccaagagggtgaaggccaccatcctgtatgccacagagaccgggaagagccaggcctatgccaagaccctgtgtgagatcttcaagcacgcctttgatgccaaggtgatgtccatggaggagtatgacatcgtgcacctggagcacgagaccctggtgctggtggtgaccagcacctttggaaatggagaccccccagaaaatggagagaagtttggctgtgccctgatggagatgaggcaccccaacagcgtgcaggaggagaggaagtacccagagcccctgcgcttcttccccaggaaaggaccacccctgcccaatggagacacagaggtgcacggcctggccgccgcccgggacagccagcacaggagctacaaggtgcgcttcaacagcgtgtcctcctacagcgacagccagaagagcagtggagatggccctgacctgcgggacaactttgaatctgctggccccctggccaacgtgcgcttctctgtgtttggcctgggcagccgggcctacccccacttctgtgccttcggccatgctgtggacaccctgctggaggagctgggcggggagcgcatcctgaagatgagagaaggagatgagctgtgtggccaggaggaggccttccgcacctgggccaagaaggtgttcaaggccgcctgtgatgtgttctgtgtgggagatgatgtgaacatcgagaaggccaacaacagcctcatcagcaatgaccgctcctggaagaggaacaagttccggctgacctttgtggccgaggcccctgagctgacccagggcctgagcaatgtgcacaagaagagggtgtctgctgcccggctgctgagccggcagaacctgcagagccccaagagcagccgcagcaccatctttgtgcggctgcacaccaacggcagccaggagctgcagtaccagcccggggaccacctgggcgtcttccctggcaaccacgaggacctggtgaatgccctgattgagcggctggaggatgcccctcctgtgaaccagatggtgaaggtggagctgctggaggagaggaacacagccctgggcgtcatcagcaactggacagatgagctgcggctgcccccctgcaccatcttccaggccttcaagtactacctggacatcaccaccccacccacccccctgcagctgcagcagtttgccagcctggccaccagcgagaaggagaagcagaggctgctggtgctgagcaagggcctgcaggagtatgaggagtggaagtggggcaagaaccccaccatcgtggaggtgctggaggagttccccagcatccagatgcctgccaccctgctgctgacccagctgagcctgctgcagccccgctactacagcatcagcagcagcccagacatgtacccagatgaggtgcacctgactgtggccatcgtgtcctaccgcaccagagatggagagggccccatccaccacggcgtgtgcagctcctggctgaaccgcatccaggctgatgagctggtgccctgctttgtgcggggggcccccagcttccacctgcccaggaacccccaggtgccctgcatcctggtgggccctggcaccggcatcgcccccttccgctccttctggcagcagaggcagtttgacatccagcacaagggcatgaacccctgccccatggtgctggtgtttggctgccggcagagcaagattgaccacatctaccgggaggagaccctgcaggccaagaacaagggcgtcttccgggagctgtacacagcctacagccgggagccagacaagcccaagaagtatgtgcaggacatcctgcaggagcagctggccgagagcgtgtaccgggccctgaaggagcagggcggccacatctacgtgtgtggagatgtgaccatggctgctgatgtgctgaaggccatccagaggatcatgacccagcagggcaagctgtctgcagaagatgctggggtcttcatcagcaggatgagagatgacaaccgctaccacgaggacatcttcggcgtgaccctgcggacctatgaggtgaccaaccggctgcggtctgagagcatcgccttcatcgaggagagcaagaaggacacagatgaggtgttcagcagctag

SEQ ID NO: 81084 - DNA, 204 bp, Artificial Sequence
  derived and/or modified sequence
caccccaacagcgtgcaggaggagaggaagtacccagagcccctgcgcttcttccccaggaaaggaccacccctgcccaatggagacacagaggtgcacggcctggccgccgcccgggacagccagcacaggagctacaaggtgcgcttcaacagcgtgtcctcctacagcgacagccagaagagcagtggagatggcccctag

SEQ ID NO: 81085 - DNA, 4407 bp, Artificial Sequence
  derived and/or modified sequence
atggaggaccacatgttcggcgtgcagcagatccagcccaacgtgatctctgtcagattatttaagagaaaggtagggggactgggtttcttggtgaaggaacgggtaagcaagccacccgtgatcatcagcgacctgatccgcggaggagccgccgaacagagcggtctgatccaggcaggcgatattattctggccgtgaacgggaggcctctggtggatttgagctacgacagtgcactcgaggttttgaggggaatcgcaagcgagacacatgttgtcttgattctcaggggccccgagggatttaccactcacctggagacgacatttacaggtgatggcacacctaagactataagagtgacgcagccacttggcccaccaaccaaggcagttgatcttagccatcagcctccagccggaaaagagcaaccgctcgctgttgacggtgctagcgggccaggcaacggaccacagcacgcatacgatgatgggcaggaggcaggctcgcttccccacgctaacggactagcacctcgaccgccaggtcaggaccccgccaagaaagcaacccgtgtgagtctccagggtcgaggagagaataatgaacttctgaaggaaattgagcctgtgctgagcctcctcacctctggttcccgtggggtcaaaggaggtgcccctgccaaagctgagatgaaggacatgggaatccaggtcgaccgcgacctggacggtaaaagtcataaacctttaccactgggcgtggagaatgaccgcgtgttcaatgatctctggggaaaaggcaatgtgccagttgtgctaaataatccgtacagtgagaaagaacaaccaccgacctcgggaaagcagtccccaacgaagaatggcagccctagtaaatgtcctagatttctcaaagtaaaaaactgggaaacggaggtggttcttacagacactttacatcttaaatctaccctggagaccggttgtacagagtacatctgtatggggtccattatgcacccttcccaacacgcacggagacctgaggatgtgcgaacaaaagggcagctgttccccctagctaaggagttcatcgatcagtactattcatcaatcaaacggttcgggtcgaaagcgcacatggagcgtttagaagaagtcaacaaagaaattgacaccacctccacataccagctgaaagatactgagctgatctacggagccaaacatgcatggaggaatgcttccaggtgcgtcggacggattcagtggagcaagctgcaggtatttgatgctagggactgtacgactgcccacgggatgttcaactatatctgcaaccatgttaaatatgccacgaataaggggaatttgcggagtgccattacaattttccctcagcgcacggatggaaagcacgacttcagagtgtggaactctcaacttatccgctacgccgggtacaagcaacccgacggaagcaccctaggggacccagcaaacgtgcagtttacagaaatctgcattcagcaaggatggaagccccccagggggcggtttgatgttttgcccctgctcctccaggctaacgggaatgaccctgaactcttccaaatcccaccagagctggtactggaggtgcccattcgccacccgaaattcgagtggttcaaggacttgggactgaagtggtacggattgcctgccgtgagcaatatgctattggagataggcggcctcgaattttccgcatgcccgttctccgggtggtacatggggacggagattggcgtaagagattattgcgataactcccgctataatattttagaagaggtcgcaaagaagatgaacctggacatgcgtaagacctcctccctgtggaaggatcaggccttggtggagattaatatcgccgtgctgtactcgttccagtcagataaggtgacgattgttgatcaccactccgcgactgagtcttttatcaagcatatggagaacgagtatagatgccgcggtggctgccccgccgactgggtttggatcgtgcctcctatgtcaggctccatcactcctgtgtttcaccaggaaatgcttaactaccggctaactccatcttttgagtatcagcccgacccttggaatacacatgtttggaaaggcaccaatggaacaccgacaaaaaggagagccatcggcttcaaaaaactggccgaggctgtgaagttctccgcaaaacttatgggacaggccatggcaaaaagagtgaaagccactatcctatacgctaccgagaccgggaagtctcaggcatatgcaaaaactctttgtgaaatctttaaacacgcattcgacgccaaggtgatgtcaatggaggaatacgacatcgtgcatctggagcacgagactctcgtactggtggtgacctctacattcgggaacggggatccacctgaaaacggagagaaattcggatgtgctctcatggagatgagacaccccaactccgtgcaggaggagaggaaatatcccgagccattaaggtttttcccaagaaaaggtccccccctgcccaacggtgacactgaagtccacggtttggccgcagccagagattctcagcaccggtcttacaaagtccgttttaatagtgtgtccagttacagtgattcacagaagtcaagcggagatgggccggacctgcgggataacttcgagagcgccgggcccctcgctaacgtgcgtttttctgtatttgggctgggaagccgggcataccctcacttctgtgcatttggccacgctgtggacactctgttggaggagctgggcggtgagcgcatcctgaaaatgcgtgaaggagacgaactctgtgggcaagaggaggcgtttcggacctgggccaaaaaagtgtttaaggcagcctgcgacgtcttttgtgtgggcgacgacgttaacattgaaaaggctaataatagcctaatcagtaacgaccgctcttggaaaagaaataagtttcggttaacattcgttgctgaagccccagagctgacacaggggctgtctaacgttcacaagaagagagtgagcgcggcgcgcctcctttcaagacagaatctccaatcccccaagtcaagcagatctacaatcttcgtacggctccacacaaatggcagtcaggagctgcagtatcaacctggagaccacctgggggtgttccctgggaatcatgaggacttggtgaatgccctaatcgagcgtctcgaggacgcaccccccgttaatcagatggtcaaagtggagctcctcgaggagcgcaacaccgcccttggtgtgatatccaattggactgacgagctgagattgcccccatgtaccattttccaggcctttaagtattacctagatataacaacaccacctacccccctacagcttcagcaattcgcaagccttgctacaagcgagaaagagaagcaacggctgctagttttgtctaaagggcttcaggagtatgaagaatggaaatggggcaagaatcccacaatcgtggaagtgctggaagagtttccttccatacagatgcccgccacattgctcctgacacaactaagcctgctgcagcccagatattatagcatatcttcttctcctgacatgtaccccgatgaggtccacctgaccgttgccatcgtgtcataccgaactagagacggtgagggccccattcatcatggtgtctgctccagctggctcaatagaattcaggccgatgagcttgttccctgtttcgtgcggggtgccccttcgttccacttgccacgcaaccctcaggtaccctgtatcctggttggacctggtaccggaattgcacccttcaggagtttttggcagcagcgccagtttgatatccaacataagggcatgaatccttgtccaatggttctggtttttgggtgccgccagagtaagatagaccatatctatagggaggaaacactgcaggcaaaaaataagggggtgttccgcgagctgtataccgcctattccagggagccagataaaccgaagaagtatgtgcaggatatcttgcaggaacagctggccgagtctgtctacagggccttaaaggaacagggcggacatatttacgtgtgcggcgatgtgacgatggccgcagatgtgctgaaggccatccagagaatcatgacccagcaaggcaaactttctgccgaggatgctggcgttttcatctctcggatgcgtgatgataatagataccatgaggacatattcggagtgactctccggacttacgaggtcaccaatcgactgcgatccgaaagcattgcgttcatagaagagagcaaaaaggataccgacgaagtattctcttcttag

SEQ ID NO: 81086 - DNA, 204 bp, Artificial Sequence
  derived and/or modified sequence
caccccaacagcgtgcaggaggagcggaagtaccccgagcccctgcggttcttcccaagaaagggacccccactgcccaatggggacacagaagtgcacggactggctgcggctcgagactcccagcacagatcctacaaagtgaggtttaattccgtgtcctcatacagtgattcccagaaaagcagtggggacgggccttag

SEQ ID NO: 81087 - DNA, 4462 bp, Artificial Sequence
  derived and/or modified sequence
ttaccatggaggatcacatgttcggtgttcagcaaatccagcccaatgtcatttctgttcgtctcttcaagcgcaaagttgggggcctgggatttctggtgaaggagcgggtcagtaagccgcccgtgatcatctctgacctgattcgtgggggcgccgcagagcagagtggcctcatccaggccggagacatcattcttgcggtcaacggccggcccttggtggacctgagctatgacagcgccctggaggtactcagaggcattgcctctgagacccacgtggtcctcattctgaggggccctgaaggtttcaccacgcacctggagaccacctttacaggtgatgggacccccaagaccatccgggtgacacagcccctgggtccccccaccaaagccgtggatctgtcccaccagccaccggccggcaaagaacagcccctggcagtggatggggcctcgggtcccgggaatgggcctcagcatgcctacgatgatgggcaggaggctggctcactcccccatgccaacggcctggcccccaggcccccaggccaggaccccgcgaagaaagcaaccagagtcagcctccaaggcagaggggagaacaatgaactgctcaaggagatagagcctgtgctgagccttctcaccagtgggagcagaggggtcaagggaggggcacctgccaaggcagagatgaaagatatgggaatccaggtggacagagatttggacggcaagtcacacaaacctctgcccctcggcgtggagaacgaccgagtcttcaatgacctatgggggaagggcaatgtgcctgtcgtcctcaacaacccatattcagagaaggagcagccccccacctcaggaaaacagtcccccacaaagaatggcagcccctccaagtgtccacgcttcctcaaggtcaagaactgggagactgaggtggttctcactgacaccctccaccttaagagcacattggaaacgggatgcactgagtacatctgcatgggctccatcatgcatccttctcagcatgcaaggaggcctgaagacgtccgcacaaaaggacagctcttccctctcgccaaagagtttattgatcaatactattcatcaattaaaagatttggctccaaagcccacatggaaaggctggaagaggtgaacaaagagatcgacaccactagcacttaccagctcaaggacacagagctcatctatggggccaagcacgcctggcggaatgcctcgcgctgtgtgggcaggatccagtggtccaagctgcaggtattcgatgcccgtgactgcaccacggcccacgggatgttcaactacatctgtaaccatgtcaagtatgccaccaacaaagggaacctcaggtctgccatcaccatattcccccagaggacagacggcaagcacgacttccgagtctggaactcccagctcatccgctacgctggctacaagcagcctgacggctccaccctgggggacccagccaatgtgcagttcacagagatatgcatacagcagggctggaaaccgcctagaggccgcttcgatgtcctgccgctcctgcttcaggccaacggcaatgaccctgagctcttccagattcctccagagctggtgttggaagttcccatcaggcaccccaagtttgagtggttcaaggacctggggctgaagtggtacggcctccccgccgtgtccaacatgctcctagagattggcggcctggagttcagcgcctgtcccttcagtggctggtacatgggcacagagattggtgtccgcgactactgtgacaactcccgctacaatatcctggaggaagtggccaagaagatgaacttagacatgaggaagacgtcctccctgtggaaggaccaggcgctggtggagatcaatatcgcggttctctatagcttccagagtgacaaagtgaccattgttgaccatcactccgccaccgagtccttcattaagcacatggagaatgagtaccgctgccgggggggctgccctgccgactgggtgtggatcgtgccccccatgtccggaagcatcacccctgtgttccaccaggagatgctcaactaccggctcaccccctccttcgaataccagcctgatccctggaacacgcatgtctggaaaggcaccaacgggacccccacaaagcggcgagccattggcttcaagaagctagcagaagctgtcaagttctcggccaagctgatggggcaggctatggccaagagggtgaaagcgaccatcctctatgccacagagacaggcaaatcgcaagcttatgccaagaccttgtgtgagatcttcaaacacgcctttgatgccaaggtgatgtccatggaagaatatgacattgtgcacctggaacatgaaactctggtccttgtggtcaccagcacctttggcaatggagatccccctgagaatggggagaaattcggctgtgctttgatggaaatgaggcaccccaactctgtgcaggaagaaaggaagtacccggaacccttgcgtttctttccccgtaaagggcctcccctccccaatggtgacacagaagtccacggtctggctgcagcccgtgacagccagcacaggagctacaaggtccgattcaacagcgtctcctcctactctgactcccaaaaatcatcaggcgatgggcccgacctcagagacaactttgagagtgctggacccctggccaatgtgaggttctcagtttttggcctcggctcacgagcataccctcacttttgcgccttcggacacgctgtggacaccctcctggaagaactgggaggggagaggatcctgaagatgagggaaggggatgagctctgtgggcaggaagaggctttcaggacctgggccaagaaggtcttcaaggcagcctgtgatgtcttctgtgtgggagatgatgtcaacattgaaaaggccaacaattccctcatcagcaatgatcgcagctggaagagaaacaagttccgcctcacctttgtggccgaagctccagaactcacacaaggtctatccaatgtccacaaaaagcgagtctcagctgcccggctccttagccgtcaaaacctccagagccctaaatccagtcggtcaactatcttcgtgcgtctccacaccaacgggagccaggagctgcagtaccagcctggggaccacctgggtgtcttccctggcaaccacgaggacctcgtgaatgccctgatcgagcggctggaggacgcgccgcctgtcaaccagatggtgaaagtggaactgctggaggagcggaacacggctttaggtgtcatcagtaactggacagacgagctccgcctcccgccctgcaccatcttccaggccttcaagtactacctggacatcaccacgccaccaacgcctctgcagctgcagcagtttgcctccctagctaccagcgagaaggagaagcagcgtctgctggtcctcagcaagggtttgcaggagtacgaggaatggaaatggggcaagaaccccaccatcgtggaggtgctggaggagttcccatctatccagatgccggccaccctgctcctgacccagctgtccctgctgcagccccgctactattccatcagctcctccccagacatgtaccctgatgaagtgcacctcactgtggccatcgtttcctaccgcactcgagatggagaaggaccaattcaccacggcgtatgctcctcctggctcaaccggatacaggctgacgaactggtcccctgtttcgtgagaggagcacccagcttccacctgccccggaacccccaagtcccctgcatcctcgttggaccaggcaccggcattgcccctttccgaagcttctggcaacagcggcaatttgatatccaacacaaaggaatgaacccctgccccatggtcctggtcttcgggtgccggcaatccaagatagatcatatctacagggaagagaccctgcaggccaagaacaagggggtcttcagagagctgtacacggcttactcccgggagccagacaaaccaaagaagtacgtgcaggacatcctgcaggagcagctggcggagtctgtgtaccgagccctgaaggagcaagggggccacatatacgtctgtggggacgtcaccatggctgctgatgtcctcaaagccatccagcgcatcatgacccagcaggggaagctctcggcagaggacgccggcgtattcatcagccggatgagggatgacaaccgataccatgaggatatttttggagtcaccctgcgaacgtacgaagtgaccaaccgccttagatctgagtccattgccttcattgaagagagcaaaaaagacaccgatgaggttttcagctcctaactggaccctcttgcccagccggctgcaagttttgtaagcgcggacagaca

SEQ ID NO: 81088 - DNA, 201 bp, Artificial Sequence
  derived and/or modified sequence
caccccaactctgtgcaggaagaaaggaagtacccggaacccttgcgtttctttccccgtaaagggcctcccctccccaatggtgacacagaagtccacggtctggctgcagcccgtgacagccagcacaggagctacaaggtccgattcaacagcgtctcctcctactctgactcccaaaaatcatcaggcgatgggccc

SEQ ID NO: 81089 - DNA, 4407 bp, Artificial Sequence
  derived and/or modified sequence
atggaagaccacatgtttggggtgcagcaaatacagcccaatgttatatcagtcaggttgttcaagaggaaagtgggagggcttggatttctcgtaaaggaaagggtttctaagcctcccgtcattatatccgacctaatcagaggcggagcagccgagcagtctggccttattcaggctggcgatattatactggcagtgaacggaaggcctctcgtcgacctgtcatatgactccgcccttgaagtgctacgcggaatcgcgagcgaaactcacgtggtcctgatcctcaggggccctgagggctttaccactcatctcgagacaactttcaccggagacgggactccaaagaccattagagtgacacagcctcttggcccacccaccaaggcggtggacctgtcacaccaaccccctgcagggaaggagcagccactggccgtcgacggtgcttccgggcctggcaatgggccacagcatgcatacgatgacggccaagaagccggatcactccctcacgctaatggactggcccctagaccgccaggccaggatcccgcaaaaaaggctactcgggtcagtctgcagggacggggagaaaacaacgaattgctcaaagagattgaacccgttttgtctttgctgacgtcaggatcccgcggtgtaaaaggcggtgcacctgcaaaagccgaaatgaaagatatggggatccaggtagatcgcgacctggacggaaaatcacacaaacctcttcctctaggcgttgagaacgacagggtatttaatgatctttggggaaaaggaaatgtcccagttgttctgaataatccttacagtgaaaaggagcagcccccaaccagcggaaaacaaagccctaccaaaaacggaagccctagcaagtgcccgaggtttctgaaggttaaaaattgggaaaccgaggtggtgctgaccgatacacttcatctgaagagtaccctggagaccgggtgcacggagtacatttgtatgggaagcatcatgcatccctctcagcatgccagaaggccagaggacgtgcgcaccaaaggtcagctgttccccctggcaaaagaatttatcgatcagtattactccagcatcaaacgtttcggttcgaaagcgcatatggagagattagaagaagtgaacaaggaaattgatactacctcaacctatcagctgaaagacacagagctaatttacggggctaagcacgcatggcgcaacgcctcccgttgtgtgggtcggattcagtggtctaagctccaggtcttcgatgcccgtgactgcactacagctcatggaatgtttaactacatttgcaaccacgtgaagtacgccacaaataaaggaaatctacgctccgctatcaccattttcccgcaacgtaccgatgggaagcacgattttagggtgtggaactcccagctgattaggtacgccggatacaaacaacccgacgggtcaactctcggagacccggctaatgtccagtttaccgagatatgtatacagcaggggtggaaaccccctcggggacggttcgacgtgctgccgctactactgcaggccaacggtaacgacccagaactgtttcagatcccgcctgaactggtgttggaggtgcctatcagacacccaaagttcgagtggtttaaggatctgggcctgaaatggtatggattgcctgccgtctccaatatgctgttagagatcgggggactggagtttagcgcttgtccgttctccggctggtatatggggacggagatcggcgtgagagactactgcgacaactcccgctataatatcttggaggaggtcgcgaaaaagatgaatctggacatgagaaaaacttccagcctgtggaaagaccaggctctggttgaaatcaacattgcggtgttatacagcttccagagcgacaaggtgacaatcgtcgatcaccattctgccactgagtccttcattaaacacatggaaaacgagtatcgatgtaggggagggtgtcctgccgattgggtctggatcgtccctcctatgagtggcagcatcacccccgtgttccaccaagagatgctgaattatcggctaacacccagtttcgaatatcagccagatccctggaacacccacgtttggaagggcaccaacggcacaccaactaagagacgggcaatcggatttaaaaaactagccgaggccgtgaagtttagcgctaaactcatgggccaggccatggctaagcgcgtaaaggcgacgatcctttacgcaacagagaccgggaagagtcaagcctatgcaaagaccctgtgcgaaatcttcaaacacgcattcgacgcaaaagtgatgtccatggaggagtacgatatcgtccatttagagcacgaaaccctggttctggtggtcacaagcaccttcgggaacggtgaccctcctgagaatggtgaaaagttcggctgtgcactgatggagatgcgccaccctaattcggtgcaggaggagcggaaataccctgaacccctccggttcttccctcgcaagggtccacccctccctaatggcgataccgaggtgcatggcctggccgctgccagggatagccagcatcggtcatataaagtacgctttaacagcgtgtctagttactcagattcccagaagtcaagtggagatggccctgacctgagggataattttgagtctgccggacctctggcgaatgtcagattctcggtgttcggcctcggttcaagagcatatccccacttctgcgcctttggtcacgctgtggacaccctcctcgaggagctaggcggagaacgtattctaaagatgcgtgagggggatgaactgtgtgggcaagaggaagcatttcgcacctgggctaaaaaagtgttcaaggctgcctgcgatgtgttctgcgtgggagacgacgtgaacattgagaaggcgaacaatagccttataagcaacgaccgctcttggaagagaaataagttcaggctgacattcgttgctgaggcacctgagctgacccagggacttagcaacgtacataagaagcgagtaagtgcggcaaggctcctttccaggcaaaaccttcagagtccaaagagttcaaggagcaccatcttcgttagactgcacaccaacggctcccaggaactccagtatcagcctggggaccacctgggagtgttccctgggaaccacgaggacctagtcaacgctctcattgagcggcttgaggacgcgcctcccgttaatcaaatggtgaaagttgaattgctcgaggaacggaatactgcgctgggggtgatctccaattggactgacgaattacggctgccaccctgtactatattccaggcctttaaatactatctcgacataacaactccgcctacccccctgcagcttcagcaattcgccagccttgctacctccgagaaagagaagcagcggctgcttgttctgtccaagggactgcaggagtacgaagagtggaagtggggaaagaatcccacaatagtcgaggtgctggaagagtttccttcaattcagatgccagcaaccctcctgctgactcagctgtcgttgttgcagccacggtattacagcatctcttcctctcccgatatgtatcccgacgaagtgcacctcacagtggcaatcgtgtcttacaggacaagggatggtgagggcccaatccaccacggagtgtgcagctcgtggctcaaccgcatccaggccgatgagctagttccttgttttgtgcgcggtgccccatccttccatttacccaggaacccacaggtgccctgtatattggtcggacctggaacagggatagcaccctttcgtagcttttggcagcagcgccagtttgacatccaacataagggaatgaacccttgcccaatggttttagtcttcggctgtcggcagagcaaaatcgatcacatctacagggaagagacccttcaggcaaagaataaaggagtgttcagggaattatacactgcttattctcgcgaaccagataaaccgaaaaagtatgtacaggatatcctgcaggaacagctggctgagagtgtctaccgtgcgctaaaggaacagggaggacacatctacgtctgtggggatgtcactatggccgctgatgtactgaaagcaatccaaaggattatgacccagcagggtaaattaagtgcagaagatgcaggtgtgtttatttctagaatgcgcgacgacaatcgataccatgaggatatcttcggggtgaccctcaggacttatgaagtcacaaatcgtctgagaagtgaaagcattgcatttatcgaggagtctaaaaaggataccgatgaagtgttttccagttag

SEQ ID NO: 81090 - DNA, 204 bp, Artificial Sequence
  derived and/or modified sequence
catcctaatagcgtacaagaggaacgtaaatacccagaacctctgcggttttttccccgtaaggggccacccctgcctaatggcgatacagaagtccacggactggctgccgcacgggacagtcaacaccgcagctacaaggtcagattcaactcagtgtcctcgtactccgattctcagaagagctccggtgatggaccctag

SEQ ID NO: 81091 - DNA, 4407 bp, Artificial Sequence
  derived and/or modified sequence
atggaggaccacatgttcggcgtgcagcagatccagcccaacgtgatcagcgtgagactgttcaagagaaaggtgggcggcctgggcttcctggtgaaggagagagtgagcaagccccccgtgatcatcagcgacctgatcagaggcggcgccgccgagcagagcggcctgatccaggccggcgacatcatcctggccgtgaacggcagacccctggtggacctgagctacgacagcgccctggaggtgctgagaggcatcgccagcgagacccacgtggtgctgatcctgagaggccccgagggcttcaccacccacctggagaccaccttcaccggcgacggcacccccaagaccatcagagtgacccagcccctgggcccccccaccaaggccgtggacctgagccaccagccccccgccggcaaggagcagcccctggccgtggacggcgccagcggccccggcaacggcccccagcacgcctacgacgacggccaggaggccggcagcctgccccacgccaacggcctggcccccagaccccccggccaggaccccgccaagaaggccaccagagtgagcctgcagggcagaggcgagaacaacgagctgctgaaggagatcgagcccgtgctgagcctgctgaccagcggcagcagaggcgtgaagggcggcgcccccgccaaggccgagatgaaggacatgggcatccaggtggacagagacctggacggcaagagccacaagcccctgcccctgggcgtggagaacgacagagtgttcaacgacctgtggggcaagggcaacgtgcccgtggtgctgaacaacccctacagcgagaaggagcagccccccaccagcggcaagcagagccccaccaagaacggcagccccagcaagtgccccagattcctgaaggtgaagaactgggagaccgaggtggtgctgaccgacaccctgcacctgaagagcaccctggagaccggctgcaccgagtacatctgcatgggcagcatcatgcaccccagccagcacgccagaagacccgaggacgtgagaaccaagggccagctgttccccctggccaaggagttcatcgaccagtactacagcagcatcaagagattcggcagcaaggcccacatggagagactggaggaggtgaacaaggagatcgacaccaccagcacctaccagctgaaggacaccgagctgatctacggcgccaagcacgcctggagaaacgccagcagatgcgtgggcagaatccagtggagcaagctgcaggtgttcgacgccagagactgcaccaccgcccacggcatgttcaactacatctgcaaccacgtgaagtacgccaccaacaagggcaacctgagaagcgccatcaccatcttcccccagagaaccgacggcaagcacgacttcagagtgtggaacagccagctgatcagatacgccggctacaagcagcccgacggcagcaccctgggcgaccccgccaacgtgcagttcaccgagatctgcatccagcagggctggaagccccccagaggcagattcgacgtgctgcccctgctgctgcaggccaacggcaacgaccccgagctgttccagatcccccccgagctggtgctggaggtgcccatcagacaccccaagttcgagtggttcaaggacctgggcctgaagtggtacggcctgcccgccgtgagcaacatgctgctggagatcggcggcctggagttcagcgcctgccccttcagcggctggtacatgggcaccgagatcggcgtgagagactactgcgacaacagcagatacaacatcctggaggaggtggccaagaagatgaacctggacatgagaaagaccagcagcctgtggaaggaccaggccctggtggagatcaacatcgccgtgctgtacagcttccagagcgacaaggtgaccatcgtggaccaccacagcgccaccgagagcttcatcaagcacatggagaacgagtacagatgcagaggcggctgccccgccgactgggtgtggatcgtgccccccatgagcggcagcatcacccccgtgttccaccaggagatgctgaactacagactgacccccagcttcgagtaccagcccgacccctggaacacccacgtgtggaagggcaccaacggcacccccaccaagagaagagccatcggcttcaagaagctggccgaggccgtgaagttcagcgccaagctgatgggccaggccatggccaagagagtgaaggccaccatcctgtacgccaccgagaccggcaagagccaggcctacgccaagaccctgtgcgagatcttcaagcacgccttcgacgccaaggtgatgagcatggaggagtacgacatcgtgcacctggagcacgagaccctggtgctggtggtgaccagcaccttcggcaacggcgacccccccgagaacggcgagaagttcggctgcgccctgatggagatgagacaccccaacagcgtgcaggaggagagaaagtaccccgagcccctgagattcttccccagaaagggcccccccctgcccaacggcgacaccgaggtgcacggcctggccgccgccagagacagccagcacagaagctacaaggtgagattcaacagcgtgagcagctacagcgacagccagaagagcagcggcgacggccccgacctgagagacaacttcgagagcgccggccccctggccaacgtgagattcagcgtgttcggcctgggcagcagagcctacccccacttctgcgccttcggccacgccgtggacaccctgctggaggagctgggcggcgagagaatcctgaagatgagagagggcgacgagctgtgcggccaggaggaggccttcagaacctgggccaagaaggtgttcaaggccgcctgcgacgtgttctgcgtgggcgacgacgtgaacatcgagaaggccaacaacagcctgatcagcaacgacagaagctggaagagaaacaagttcagactgaccttcgtggccgaggcccccgagctgacccagggcctgagcaacgtgcacaagaagagagtgagcgccgccagactgctgagcagacagaacctgcagagccccaagagcagcagaagcaccatcttcgtgagactgcacaccaacggcagccaggagctgcagtaccagcccggcgaccacctgggcgtgttccccggcaaccacgaggacctggtgaacgccctgatcgagagactggaggacgccccccccgtgaaccagatggtgaaggtggagctgctggaggagagaaacaccgccctgggcgtgatcagcaactggaccgacgagctgagactgcccccctgcaccatcttccaggccttcaagtactacctggacatcaccaccccccccacccccctgcagctgcagcagttcgccagcctggccaccagcgagaaggagaagcagagactgctggtgctgagcaagggcctgcaggagtacgaggagtggaagtggggcaagaaccccaccatcgtggaggtgctggaggagttccccagcatccagatgcccgccaccctgctgctgacccagctgagcctgctgcagcccagatactacagcatcagcagcagccccgacatgtaccccgacgaggtgcacctgaccgtggccatcgtgagctacagaaccagagacggcgagggccccatccaccacggcgtgtgcagcagctggctgaacagaatccaggccgacgagctggtgccctgcttcgtgagaggcgcccccagcttccacctgcccagaaacccccaggtgccctgcatcctggtgggccccggcaccggcatcgcccccttcagaagcttctggcagcagagacagttcgacatccagcacaagggcatgaacccctgccccatggtgctggtgttcggctgcagacagagcaagatcgaccacatctacagagaggagaccctgcaggccaagaacaagggcgtgttcagagagctgtacaccgcctacagcagagagcccgacaagcccaagaagtacgtgcaggacatcctgcaggagcagctggccgagagcgtgtacagagccctgaaggagcagggcggccacatctacgtgtgcggcgacgtgaccatggccgccgacgtgctgaaggccatccagagaatcatgacccagcagggcaagctgagcgccgaggacgccggcgtgttcatcagcagaatgagagacgacaacagataccacgaggacatcttcggcgtgaccctgagaacctacgaggtgaccaacagactgagaagcgagagcatcgccttcatcgaggagagcaagaaggacaccgacgaggtgttcagcagctag

SEQ ID NO: 81092 - DNA, 204 bp, Artificial Sequence
  derived and/or modified sequence
caccccaacagcgtgcaggaggagagaaagtaccccgagcccctgagattcttccccagaaagggcccccccctgcccaacggcgacaccgaggtgcacggcctggccgccgccagagacagccagcacagaagctacaaggtgagattcaacagcgtgagcagctacagcgacagccagaagagcagcggcgacggcccctag

SEQ ID NO: 81093 - DNA, 12291 bp, Artificial Sequence
  derived and/or modified sequence
ataaaagatgtatgctttggagcccagagcggctcttttaatgagggttgcgacgtctccctccccacacccataaaccagtcgggttggacgtcactgctaattcgtttcagtgatgataggataaaggagggacattaagaaataaattccccctcacgaccctcgctgagctcacggctcagtccctacatatttatgccgcgtttccagccgctgggtgaggagctacttagcgccgcggctcctccgaggggcggccgggcagcgagcagcggccgagcggacgggctcatgatgcctcagatctgatccgcatctaacaggctggcaatgaagatacccagagaatagttcacatctatcatgcgtcacttctagacacagccatcagacgcatctcctcccctttctgcctgaccttagggacacgtcccaccgcctctcttgacgtctgcctggtcaaccatcacttccttagagaataaggagagaggcggatgcaggaaatcatgccaccgacgggccaccagccatgagtgggtgacgctgagctgacgtcaaagacagagagggctgaagccttgtcagcacctgtcaccccggctcctgctctccgtgtagcctgaagcctggatcctcctggtgaaatcatcttggcctgatagcattgtgaggtcttcagacaggacccctcggaagctagttaccatggaggatcacatgttcggtgttcagcaaatccagcccaatgtcatttctgttcgtctcttcaagcgcaaagttgggggcctgggatttctggtgaaggagcgggtcagtaagccgcccgtgatcatctctgacctgattcgtgggggcgccgcagagcagagtggcctcatccaggccggagacatcattcttgcggtcaacggccggcccttggtggacctgagctatgacagcgccctggaggtactcagaggcattgcctctgagacccacgtggtcctcattctgaggggccctgaaggtttcaccacgcacctggagaccacctttacaggtgatgggacccccaagaccatccgggtgacacagcccctgggtccccccaccaaagccgtggatctgtcccaccagccaccggccggcaaagaacagcccctggcagtggatggggcctcgggtcccgggaatgggcctcagcatgcctacgatgatgggcaggaggctggctcactcccccatgccaacggcctggcccccaggcccccaggccaggaccccgcgaagaaagcaaccagagtcagcctccaaggcagaggggagaacaatgaactgctcaaggagatagagcctgtgctgagccttctcaccagtgggagcagaggggtcaagggaggggcacctgccaaggcagagatgaaagatatgggaatccaggtggacagagatttggacggcaagtcacacaaacctctgcccctcggcgtggagaacgaccgagtcttcaatgacctatgggggaagggcaatgtgcctgtcgtcctcaacaacccatattcagagaaggagcagccccccacctcaggaaaacagtcccccacaaagaatggcagcccctccaagtgtccacgcttcctcaaggtcaagaactgggagactgaggtggttctcactgacaccctccaccttaagagcacattggaaacgggatgcactgagtacatctgcatgggctccatcatgcatccttctcagcatgcaaggaggcctgaagacgtccgcacaaaaggacagctcttccctctcgccaaagagtttattgatcaatactattcatcaattaaaagatttggctccaaagcccacatggaaaggctggaagaggtgaacaaagagatcgacaccactagcacttaccagctcaaggacacagagctcatctatggggccaagcacgcctggcggaatgcctcgcgctgtgtgggcaggatccagtggtccaagctgcaggtattcgatgcccgtgactgcaccacggcccacgggatgttcaactacatctgtaaccatgtcaagtatgccaccaacaaagggaacctcaggtctgccatcaccatattcccccagaggacagacggcaagcacgacttccgagtctggaactcccagctcatccgctacgctggctacaagcagcctgacggctccaccctgggggacccagccaatgtgcagttcacagagatatgcatacagcagggctggaaaccgcctagaggccgcttcgatgtcctgccgctcctgcttcaggccaacggcaatgaccctgagctcttccagattcctccagagctggtgttggaagttcccatcaggcaccccaagtttgagtggttcaaggacctggggctgaagtggtacggcctccccgccgtgtccaacatgctcctagagattggcggcctggagttcagcgcctgtcccttcagtggctggtacatgggcacagagattggtgtccgcgactactgtgacaactcccgctacaatatcctggaggaagtggccaagaagatgaacttagacatgaggaagacgtcctccctgtggaaggaccaggcgctggtggagatcaatatcgcggttctctatagcttccagagtgacaaagtgaccattgttgaccatcactccgccaccgagtccttcattaagcacatggagaatgagtaccgctgccgggggggctgccctgccgactgggtgtggatcgtgccccccatgtccggaagcatcacccctgtgttccaccaggagatgctcaactaccggctcaccccctccttcgaataccagcctgatccctggaacacgcatgtctggaaaggcaccaacgggacccccacaaagcggcgagccattggcttcaagaagctagcagaagctgtcaagttctcggccaagctgatggggcaggctatggccaagagggtgaaagcgaccatcctctatgccacagagacaggcaaatcgcaagcttatgccaagaccttgtgtgagatcttcaaacacgcctttgatgccaaggtgatgtccatggaagaatatgacattgtgcacctggaacatgaaactctggtccttgtggtcaccagcacctttggcaatggagatccccctgagaatggggagaaattcggctgtgctttgatggaaatgaggcaccccaactctgtgcaggaagaaaggaagtacccggaacccttgcgtttctttccccgtaaagggcctcccctccccaatggtgacacagaagtccacggtctggctgcagcccgtgacagccagcacaggagctacaaggtccgattcaacagcgtctcctcctactctgactcccaaaaatcatcaggcgatgggcccgacctcagagacaactttgagagtgctggacccctggccaatgtgaggttctcagtttttggcctcggctcacgagcataccctcacttttgcgccttcggacacgctgtggacaccctcctggaagaactgggaggggagaggatcctgaagatgagggaaggggatgagctctgtgggcaggaagaggctttcaggacctgggccaagaaggtcttcaaggcagcctgtgatgtcttctgtgtgggagatgatgtcaacattgaaaaggccaacaattccctcatcagcaatgatcgcagctggaagagaaacaagttccgcctcacctttgtggccgaagctccagaactcacacaaggtctatccaatgtccacaaaaagcgagtctcagctgcccggctccttagccgtcaaaacctccagagccctaaatccagtcggtcaactatcttcgtgcgtctccacaccaacgggagccaggagctgcagtaccagcctggggaccacctgggtgtcttccctggcaaccacgaggacctcgtgaatgccctgatcgagcggctggaggacgcgccgcctgtcaaccagatggtgaaagtggaactgctggaggagcggaacacggctttaggtgtcatcagtaactggacagacgagctccgcctcccgccctgcaccatcttccaggccttcaagtactacctggacatcaccacgccaccaacgcctctgcagctgcagcagtttgcctccctagctaccagcgagaaggagaagcagcgtctgctggtcctcagcaagggtttgcaggagtacgaggaatggaaatggggcaagaaccccaccatcgtggaggtgctggaggagttcccatctatccagatgccggccaccctgctcctgacccagctgtccctgctgcagccccgctactattccatcagctcctccccagacatgtaccctgatgaagtgcacctcactgtggccatcgtttcctaccgcactcgagatggagaaggaccaattcaccacggcgtatgctcctcctggctcaaccggatacaggctgacgaactggtcccctgtttcgtgagaggagcacccagcttccacctgccccggaacccccaagtcccctgcatcctcgttggaccaggcaccggcattgcccctttccgaagcttctggcaacagcggcaatttgatatccaacacaaaggaatgaacccctgccccatggtcctggtcttcgggtgccggcaatccaagatagatcatatctacagggaagagaccctgcaggccaagaacaagggggtcttcagagagctgtacacggcttactcccgggagccagacaaaccaaagaagtacgtgcaggacatcctgcaggagcagctggcggagtctgtgtaccgagccctgaaggagcaagggggccacatatacgtctgtggggacgtcaccatggctgctgatgtcctcaaagccatccagcgcatcatgacccagcaggggaagctctcggcagaggacgccggcgtattcatcagccggatgagggatgacaaccgataccatgaggatatttttggagtcaccctgcgaacgtacgaagtgaccaaccgccttagatctgagtccattgccttcattgaagagagcaaaaaagacaccgatgaggttttcagctcctaactggaccctcttgcccagccggctgcaagttttgtaagcgcggacagacactgctgaacctttcctctgggaccccctgtggccctcgctctgcctcctgtccttgtcgctgtgccctggtttccctcctcgggcttctcgcccctcagtggtttcctcggccctcctgggtttactccttgagttttcctgctgcgatgcaatgcttttctaatctgcagtggctcttacaaaactctgttcccactccctctcttgccgacaagggcaactcacgggtgcatgaaaccactggaacatggccgtcgctgtgggggtttttttctctggggttcccctggaaaggctgcaggaactaggcacaagctctctgagccagtccctcagccactgaagtccccctttctccttttttatgatgacattttggttgtgcgtgcctgtgtgtgtgtgtgtgtgtgtgtgtgtgtgtgtgatgggccaggtctctgtccgtcctcttccctgcacaagtgtgtcgatcttagattgccactgctttcattgaagaccctcaatgccaagaaacgtgtccctggcccatattaatccctcgtgtgtccataattagggtccacgcccatgtacctgaaacatttggaagccccataattgttctagttagaaagggttcagggcatggggagaggagtgggaaattgattaaaggggctgtctcccaatgaaagaggcattcccagaatttgctgcatttagattttgataccagtgagcagagccctcatgtgacatgaacccatccaatggattgtgcaaatcccctccccaaacccacccataccagctagaatcacttgactttgccacatccattgactgaccccctcctccagcaatagcatccaaggggcctggaagttatgttgttcaaagaagcctggtggcaataaggatcttcccactttgccactggatgactttggatgggtcacttgtcctcagtttttcctagtcataatgtcatacgaacctaaagaatatgaatggattaaatgttaaagctttggtgcctggaaacaatatcaagtaacaatatgattattatttttttattcccccaaagcgggcttgctgcttcacccttggggatgaaataatggaagctggttaaagtggatgaggttggaaagagttgccataatgaggtcccacgtggcttcttcgataggagccacaacttggggtgggaagaacttgtccctcaggcttgttgccctctgcagttgatctccaaagttttaaacctgttaaattaattttgacaaataagttaccctcaactcagatcaaaaatgggcagccaagtcttcggtaggaattggagccggtgtaattcctccctaagaggcaacctgttgaatttactctctcagagtaaatggtgggaagggatccctttgtatacttttttaaatactacaaattagtgtcaggcagttcccagaaagagacaagaaatcctagtggcctcccagactgcagggtccccaaggatggaaagggaatgttctgctggttctaccctgtttgttgtgtcttgctatacagaaaaaccacatttcttttatatactgtacgtgggcatatcttgttgttcagtttgggtgtctgctaaagaggaagtgcactggccctctttgaaagggctttacagtgggggcaccaagaccccaaagggcccaggccaggagactgttaaagtgaaaaggcaatctatgactcaccttgctctgccatccctggcagcccccaccggtgtcctgttcctgccacatggagcttgacttcatgccagctataatctcccctgccttcctttaatcccaatttcccctgctcactcttccacagatataaagaacaaacacttagcatcccacactcaccccttctaatcctgaagggaagcccattctaaactcctttcctgcaaacccatttccagctcctagtagctttcctcccaaaggctttctttccaatcctttatagctttggagacgcctccccaattccccagggaaggaaactgttgtgtccaatccccattaaagacaaattgatcagtgcttcccactccaagtcaagctttatgcaggaatgcttttccatcagggaataaatacttagaagcgcttacaaggtgccaggcacctcctttctgcatgtgcctgcctttctagtagcagacagatggaaacattgtctcattttgtcaaggagtccaaagaaatgattataaaaccaggattcatccttcttctccagaaagatttttttttaagtaaacacctttcaatccccaacacaagctgcttcacaactccaggctagaaggcaggagagcgatctgatgtgtttctttcatttgccagaattcctgataccaaaagcctctctctctgttgagtaacctctcaaggaccagagtggagtccagattgttaggctcagatcaagggtggggaaatactgccctctcgtggtggcttttcatccaggcctcgtagccaaccgtttaagtgcaaaatagaattaagcaatgggtaagcaaaatagggttgacaagatatttgggggttattcgggttatggcccatttatttccctcttccccctgaattgaccagtagcagctccagccccatttcacaaaagtgagtttggccaggaggaatgagacgtctcctgaaataggaacaccggaacatcatgctcacctgccatcactatgcatccagttcccacagcttgtgtcgtgaaagagcagagagatgatgttaaactccttgggaggagagagggcttcttttggtttccctggagtgagacagccaggtgtctttcttttgcggggggacacttcagacccatcaatatggaattttgggagccgacctgagtgcaaatcctaattctgcccctgttggtgcagatggctgtgggcggctcacttgaccttttagagtctgcatacccacctgtataacaaggtggattgaatgagacaatgcccacgaaatgcccagttacagtacctggttcaaaacttactgcattttaatttttcacttaacttataacatgtcttgcttctccagtgtgtggaaggcaccgggcagtttgcagagataagcaaaacacagttcctctcgtgcagaaggttagaatctatttttttttttgacagagtcttgctctgtcacccaggctggcgtacagtggtacgatctcagctcactgcatcctctgcctcccccagttcaagtgattcttctgcctcggcctcctgagtaactgggactacaggcgcctaccaccacgcccagctaagttttgtatttttagtagagtcagggtttcaccatgttggccaggctggtcttgaattcctgacctcaaatgatccacgcacctcagcctcccaaagtgctggattacaggcatgagccaccacgcccagccaaaggttataatctgatggagagagacacccgtcttggaactgacataaatttctggggtttgagaaatgggcgggatttcactggtagcttctggaaggtaagagttgtccaggaattgggaagagtgagaggaaaggcacggacagggagcatgtaagataaattgaggctggctttggaaggctgaggagggtgagaaaaggtgggctgggaccagaccgtggggagaggtgagtggcattacaagaaatttaggctttattcagaaggcaacagggagtccctaagaatgtttttcaaaaagggacattaaggcgattggagttatacttggaaaagaaagttctggccacagtacagagcatggcccgttgagctgttgggggggttattgctgcaaccaaggcttgagtgagggaagaggcggatgtagtgataaagagactccaggaactgaatcagcgtacctggcaccccatccattgtagagggtgagaataaaggagaaattaaagcatcttgcaggctgggcgcggtagctcatgtctgtaatcccagcactttgggaggccgaggtgggtgtatcagttgaggtcaggagttggagaccagtcagccagttagtagaaaccctgactctactaagaaaatacaaaaattagctgggcatggtggcatgcgcctgtagtctcagctacctgggaggctgaggaaggaggatcgcttgagcccaggaggtggaggctgcagtgagccaagattgtaccactgcactccagcctgggtgacagagcaagactcttatctcaaaaaaaataaaataaaataaaataaaataaaacatcttgcccctagctgagagagaggtctctgaagagcaggctcagggaaaagatgagttttcagagctgatgtgatagtcagcttctctggagtcaacagggtgaatccttcccaagtccagccatgcccagatgcccggagggaaaactgacccccagccagtagacattggctaagaacacagaatcttctgaccaaacacgctttcagcagctgcctgctctggactttgaaagaggtcaggtcttgccctaagctcaaaacaagtgagaggtgtcctgacctagctcatagggcaaatggtcctaataggatgggcaatccagatgcctgagccccttcactccgacagcaccagcgcctaatgcagccttttcattcttgccattaggaaatctgtggacttctagcctgtgttttaaaccagccatgtttccttgtatatttccctacccgctgccccacatacccagcatgccgctgtggccaccatgtcctcaaagccttctgtctgtatcaggaatgtagtctgagactgccaggaagcaacaaggagagagaaacactaactagtcttcctttataacccattcatactctctggctgtccccaaccttcatagtctcctgcatccaaatgtcctctttggctcaaaaagtaggccaggcatggtggttcatgcctgtaatagcactttgggagactgaggtgggaggatcacttggggccaggagtttgagaccagcttgggcaacacagcgcaatctcgtctctactaaaaaaaaaaaaaaaaaaaaattagctgggcatgatggcatgctcctgtggtcccagctacttgggaggctgaggcaggaggatcacttggtcccaggagtttgaggcgacagtgagctaggatcgcaccactgcactccagcctgagtgacagagcaagaccctgtctctaaaaaaaattaaaatgaaagaccaggtgctgggattaaggaaacacaggtctgagggtctgagggaaggggcctgcctcccagggagtcaacatagatgttccccatgaacagggatttgactttggaggccaacctggcctggcctctgccctttatctcacactccctatccttggcccactgccagtccctgccttgtggcaaaggggccccaaaagaaaagctgcccttccccaaatgtaaggacccaggtacactttcacccgtggaaagcagtgtctgtcgagagtctgtttcctattaatacttatcaaagccatgtgcgagggaggtggtcagctgtcaatatgccttagtatgtttatatgagtttgttttgttctaaaatacccaaacagttctggtcaagcggggctatgcccgtctggcccaaaacacagtccgttattaacgagatggccctggcaggcgggaacaaatctgcctccatgcactgcttcctgtagtcttttagaaagtaactccaggacatcgaagtgcccagatttgactcctaagttctaggagactgtagcgcagggtctgtcaaccttagcactattggcatttggggctgggtaattctttcttgtgggggccgtcttgggtactgtaggaagctgagcagcattcctggcctccatccacaagatacctgtagcagtgtcctgccaacggtaacaatcaagtatgtcatcagacattgcccaatgtccccagggggcaacacccctctcttggacttcagggtcaagagaatctctgctggctaccccaggacttctcattatagatttcctggagcacgcagcagaaactttgcctagcccagtggttgtttccattatctgctgccaaagtgggatttgagggtgtccgggggagggggcatggggagggcagtatgctttcaaaaacccctcccaggccaggcgtggtggctcatgcctgtaatcacaggactttgggaggccgaggctggcagatcacttgaggctgggagttagagaccaacctggctaacatggcaaaacctcgtctctactaaaaatacaaaaatcagcccggcgtggtggcgggcatctgtaatcccatctactcgggaggctgaggcaggagaattacttgaacccaggaggcagaggctgcagtgagccgagatggcaccactgcactccagcttgttgacagaatgagaccctgtggaaaaaaaaaaaaaagccctcccatgccagaacagaggatggcagtctgtttcaataagacactgtgtccttggtgttggttctgattaagactcactgagatccagtgctcttgagctgggtctcagtcccctcccatgtcctgtgctctgccgccactgttttcattgttgtgttctcgttgtgattgttaagactcacactcctggctcagcagtggttttccagaaggcccaaagagcggtgccgggcaccccacgtcgcagtgtccgttccgggcttgggaagctggggaggtgggcagacctggtcgcatctcaccacacacacacacacacacacacacacacacgctgtcagaaactcggccgtcccccctacctctgagctctcaatgctgctaatctctgccaagtgtccctgtgctccagcaccttccttgaaggactgacgcccaccccacgctctttgcgaggttgtccaggctgtgtttgtcgcatgctcttcttctgtatagttctcatcttccaattttatgggattcaacaaaagcctattatgcttgtttgcattatggttacaatattaaaaagtggattcaaaaaaaa

SEQ ID NO: 81094 - protein, 335 aa, Artificial Sequence
  derived and/or modified sequence
MGRCCFYTAGTLSLLLLVTSVTLLVARVFQKAVDQSIEKKIVLRNGTEAFDSWEKPPLPVYTQFYFFNVTNPEEILRGETPRVEEVGPYTYRSLDWWITDKCNMINGTDGDSFHPLITKDEVLYVFPSDFCRSVYITFSDYESVQGLPAFRYKVPAEILANTSDNAGFCIPEGNCLGSGVLNVSICKNGAPIIMSFPHFYQADERFVSAIEGMHPNQEDHETFVDINPLTGIILKAAKRFQINIYVKKLDDFVETGDIRTMVFPVMYLNESVHIDKETASRLKSMINTTLIITNIPYIIMALGVFFGLVFTWLACKGQGSMDEGTADERAPLIRT

SEQ ID NO: 81095 - DNA, 1008 bp, Artificial Sequence
  derived and/or modified sequence
atgggtaggtgctgcttttataccgctgggaccttgtccctccttctactggtaacgtcggtcactcttttagttgccagggtcttccagaaggcagtcgaccagtctatcgagaaaaaaattgtgctgcgcaacggcacagaagcctttgacagctgggagaagccaccacttcccgtatacacacagttctatttctttaacgtgaccaacccagaggagattctgagaggtgaaacgcctcgcgtagaagaagtggggccatacacctatcgcagccttgattggtggatcacagacaaatgcaacatgattaacggaactgatggcgactcttttcaccccctcataaccaaggacgaggtgctctacgtcttcccttctgatttttgccgaagcgtctatatcaccttttccgactacgagagcgtgcaggggctgcctgccttcaggtacaaagtgcctgccgagattttggctaatacaagcgataatgctggtttctgtatccctgaaggaaattgcctggggagtggagtcctgaatgtgtctatctgtaagaacggtgcaccgattatcatgagcttcccgcacttctaccaagctgatgagcgctttgtttccgccattgagggcatgcaccccaatcaagaggaccacgagacatttgtggacattaatcctttaactggcatcatactgaaggcagccaaacggttccagatcaatatatacgtcaagaagctggacgatttcgtggaaactggggacatccgcaccatggttttccccgtcatgtacctcaacgagtctgtccacattgataaagagacggcctcacggcttaagtccatgatcaatactacactcataattactaatataccttacataataatggccctcggtgtcttcttcggactggtgtttacctggttggcgtgcaaaggacaaggatctatggacgaggggaccgcagacgagcgtgctccgctgattagaacctag

SEQ ID NO: 81096 - DNA, 1008 bp, Artificial Sequence
  derived and/or modified sequence
atgggccgctgctgcttctacacagctggcaccctgagcctgctgctgctggtgacctctgtgaccctgctggtggcccgggtcttccagaaggctgtggaccagagcattgagaagaagatcgtgctgagaaatggaacagaggcctttgacagctgggagaagccacccctgcctgtgtacacccagttctacttcttcaacgtgaccaaccctgaggagatcctgcggggggagaccccccgggtggaggaggtgggcccctacacctaccgcagcctggactggtggatcacagacaagtgcaacatgatcaatggaacagatggagacagcttccaccccctcatcaccaaggatgaggtgctgtatgtgttccccagcgacttctgccgctctgtgtacatcaccttcagtgactatgaatctgtgcagggcctgcctgccttccgctacaaggtgcctgctgagatcctggccaacaccagtgacaatgccggcttctgcatccctgagggcaactgcctgggcagcggcgtgctgaatgtgtccatctgcaagaatggagcccccatcatcatgtccttcccccacttctaccaggctgatgaaagatttgtgtctgccatcgagggcatgcaccccaaccaggaggaccacgagacctttgtggacatcaaccccctgaccggcatcatcctgaaggccgccaagcgcttccagatcaacatctacgtgaagaagctggatgactttgtggagactggagacatccgcaccatggtgtttcctgtgatgtacctgaatgaatctgtgcacatcgacaaggagacagccagccggctgaagtccatgatcaacaccaccctcatcatcaccaacatcccctacatcatcatggccctgggcgtcttcttcggcctggtgttcacctggctggcctgcaagggccagggctccatggatgagggcacagcagatgagcgggcccccctcatccgcacctag

SEQ ID NO: 81097 - DNA, 1008 bp, Artificial Sequence
  derived and/or modified sequence
atgggccggtgctgcttctacaccgccggcaccctgagcctgctgctgttggtgacatccgtgacattgttggtcgcaagggtttttcaaaaggcagtggaccagtccatcgagaaaaaaattgtgctgaggaacggaactgaggcgttcgactcttgggagaaaccacctctgccagtctacacacagttttacttctttaacgtgaccaaccctgaggaaatcttgagaggagaaacaccaagggtggaggaggtggggccatacacatataggagtctggactggtggattactgacaagtgtaacatgataaatggcacagacggagattcgttccatccactcatcaccaaggatgaggtcctctatgtctttccgagcgatttctgccggagcgtttacattactttctcagactacgagagtgtccagggtttgccggccttcaggtataaagtgcccgccgaaattctggcgaatacctcagataacgcaggattctgcatccccgagggcaattgcctcgggagtggggtcctgaacgtgtctatctgcaaaaatggggcccccatcatcatgagctttcctcacttctatcaagcagacgagcgcttcgtctctgccattgaggggatgcatcccaaccaggaagatcacgaaactttcgtagacatcaacccacttacagggattattctaaaggctgccaagcggttccagattaatatctatgtgaaaaagctagatgactttgtggaaacaggggatattcggaccatggtgttcccagtgatgtacttaaacgaatccgtccacattgataaagagactgcgtctcgactgaagtctatgatcaatacaaccctgattattacaaatattccctatataatcatggcactgggagtgttttttgggctggtgttcacctggttggcttgcaaaggtcagggcagtatggacgagggaacagccgatgagagggctcctctgatcaggacctag

SEQ ID NO: 81098 - DNA, 1008 bp, Artificial Sequence
  derived and/or modified sequence
atgggtcgctgctgcttttacacagccggaacactctcgctgctgctgctggtgaccagtgtcactctcctcgtagccagagtgtttcagaaagcggtggatcagagcatcgagaaaaaaatcgtgctacggaatggcacagaagcgttcgattcttgggagaaacctccgctacccgtttacacccaattctacttctttaacgtgacaaaccccgaagagattctgaggggggagaccccaagagtcgaagaggtgggcccttacacgtatcggagcctcgattggtggatcactgacaaatgtaacatgattaacggcaccgatggcgactcattccacccattgatcactaaggacgaagttctctacgtgtttcctagtgacttttgcaggagcgtgtacatcacattctcagactacgaaagtgtgcaagggctacccgcatttagatataaggtgcccgctgaaatcctggccaatacatctgataatgccggattctgtatacctgaaggcaattgtctgggtagcggcgtccttaacgtatctatatgcaaaaacggggcacccatcatcatgagctttcctcatttctaccaggccgacgaacgtttcgtcagtgcgatagaaggcatgcatcctaatcaagaggatcacgaaacatttgtggacattaatcctttgaccggtatcatcttaaaggcagccaagcgattccaaataaacatttatgttaagaagctcgacgatttcgtagagaccggagacatcagaactatggtgtttcctgtgatgtatctgaacgagtccgtgcatatcgacaaagagacagccagccggctgaaaagcatgatcaatactaccttgattatcacgaacatcccttatatcatcatggctctaggcgtgttttttgggctggtttttacttggcttgcatgcaagggacaggggtcaatggatgaaggcacggcagacgagagagcacctctgatacgcacatag

SEQ ID NO: 81099 - DNA, 1495 bp, Artificial Sequence
  derived and/or modified sequence
ctccttgcagttggatccctggcgggtgcggcccggcccggcccgtgagcggcgcacagaatgggccgatgctgcttctacacggcggggacgttgtccctgctcctgctggtgaccagcgtcacgctgctggtggcccgggtcttccagaaggctgtagaccagagtatcgagaagaaaattgtgttaaggaatggtactgaggcatttgactcctgggagaagccccctctgcctgtgtatactcagttctatttcttcaatgtcaccaatccagaggagatcctcagaggggagacccctcgggtggaagaagtggggccatacacctacaggtcacttgactggtggataacagacaagtgcaatatgattaatggaacagatggagattcttttcacccactaataaccaaagatgaggtcctttatgtcttcccatctgacttttgcaggtcagtgtatattactttcagtgactatgagagtgtacagggactgcctgcctttcggtataaagttcctgcagaaatattagccaatacgtcagacaatgccggcttctgtatacctgagggaaactgcctgggctcaggagttctgaatgtcagcatctgcaagaatggtgcacccatcattatgtctttcccacacttttaccaagcagatgagaggtttgtttctgccatagaaggcatgcacccaaatcaggaagaccatgagacatttgtggacattaatcctttgactggaataatcctaaaagcagccaagaggttccaaatcaacatttatgtcaaaaaattagatgactttgttgaaacgggagacattagaaccatggttttcccagtgatgtacctcaatgagagtgttcacattgataaagagacggcgagtcgactgaagtctatgattaacactactttgatcatcaccaacataccctacatcatcatggcgctgggtgtgttctttggtttggtttttacctggcttgcatgcaaaggacagggatccatggatgagggaacagcggatgaaagagcacccctcattcgaacctaaacattgcctttgcttggtgaagaaactgtgtgagctgtcctgacctggacgatgacgtggggaaaccctccacctccttgcaggcttgttgcctgttgaaagaaggaaaaagacacggcgctggcaagtgataggaacattctggccagaggttaaagagcaggctgacatggctggccattaagctttataaaatcatgtgggctctgaaattgttcttttatgtgtctagcaagtatttaataaacccttgtatagtaattttgttgttgttgggtgctggtagctccagaattttgtgaccactattgtgggtaaaatgtctctgcatcacttgttaatgctactggtctaacttcattcagtatgcttcattcaccgaactttgtgctcaaaatgcgtatataccattttatgttgtattcct

SEQ ID NO: 81100 - DNA, 1008 bp, Artificial Sequence
  derived and/or modified sequence
atgggcagatgctgcttctacaccgccggcaccctgagcctgctgctgctggtgaccagcgtgaccctgctggtggccagagtgttccagaaggccgtggaccagagcatcgagaagaagatcgtgctgagaaacggcaccgaggccttcgacagctgggagaagccccccctgcccgtgtacacccagttctacttcttcaacgtgaccaaccccgaggagatcctgagaggcgagacccccagagtggaggaggtgggcccctacacctacagaagcctggactggtggatcaccgacaagtgcaacatgatcaacggcaccgacggcgacagcttccaccccctgatcaccaaggacgaggtgctgtacgtgttccccagcgacttctgcagaagcgtgtacatcaccttcagcgactacgagagcgtgcagggcctgcccgccttcagatacaaggtgcccgccgagatcctggccaacaccagcgacaacgccggcttctgcatccccgagggcaactgcctgggcagcggcgtgctgaacgtgagcatctgcaagaacggcgcccccatcatcatgagcttcccccacttctaccaggccgacgagagattcgtgagcgccatcgagggcatgcaccccaaccaggaggaccacgagaccttcgtggacatcaaccccctgaccggcatcatcctgaaggccgccaagagattccagatcaacatctacgtgaagaagctggacgacttcgtggagaccggcgacatcagaaccatggtgttccccgtgatgtacctgaacgagagcgtgcacatcgacaaggagaccgccagcagactgaagagcatgatcaacaccaccctgatcatcaccaacatcccctacatcatcatggccctgggcgtgttcttcggcctggtgttcacctggctggcctgcaagggccagggcagcatggacgagggcaccgccgacgagagagcccccctgatcagaacctag

SEQ ID NO: 81101 - DNA, 1782 bp, Artificial Sequence
  derived and/or modified sequence
atggacagcaaggagagcctgacccccggcagagaggagaaccccagcagcgtgctggcccaggagagaggcgacgtgatggacttctacaagaccctgagaggcggcgccaccgtgaaggtgagcgccagcagccccagcctggccgtggccagccagagcgacagcaagcagagaagactgctggtggacttccccaagggcagcgtgagcaacgcccagcagcccgacctgagcaaggccgtgagcctgagcatgggcctgtacatgggcgagaccgagaccaaggtgatgggcaacgacctgggcttcccccagcagggccagatcagcctgagcagcggcgagaccgacctgaagctgctggaggagagcatcgccaacctgaacagaagcaccagcgtgcccgagaaccccaagagcagcgccagcaccgccgtgagcgccgcccccaccgagaaggagttccccaagacccacagcgacgtgagcagcgagcagcagcacctgaagggccagaccggcaccaacggcggcaacgtgaagctgtacaccaccgaccagagcaccttcgacatcctgcaggacctggagttcagcagcggcagccccggcaaggagaccaacgagagcccctggagaagcgacctgctgatcgacgagaactgcctgctgagccccctggccggcgaggacgacagcttcctgctggagggcaacagcaacgaggactgcaagcccctgatcctgcccgacaccaagcccaagatcaaggacaacggcgacctggtgctgagcagccccagcaacgtgaccctgccccaggtgaagaccgagaaggaggacttcatcgagctgtgcacccccggcgtgatcaagcaggagaagctgggcaccgtgtactgccaggccagcttccccggcgccaacatcatcggcaacaagatgagcgccatcagcgtgcacggcgtgagcaccagcggcggccagatgtaccactacgacatgaacaccgccagcctgagccagcagcaggaccagaagcccatcttcaacgtgatcccccccatccccgtgggcagcgagaactggaacagatgccagggcagcggcgacgacaacctgaccagcctgggcaccctgaacttccccggcagaaccgtgttcagcaacggctacagcagccccagcatgagacccgacgtgagcagcccccccagcagcagcagcaccgccaccaccggccccccccccaagctgtgcctggtgtgcagcgacgaggccagcggctgccactacggcgtgctgacctgcggcagctgcaaggtgttcttcaagagagccgtggagggccagcacaactacctgtgcgccggcagaaacgactgcatcatcgacaagatcagaagaaagaactgccccgcctgcagatacagaaagtgcctgcaggccggcatgaacctggaggtggtgcccaaggacggcctgaagagccaggagctgttcgacgagatcagaatgacctacatcaaggagctgggcaaggccatcgtgaagagagagggcaacagcagccagaactggcagagattctaccagctgaccaagctgctggacagcatgcacgaggtggtggagaacctgctgaactactgcttccagaccttcctggacaagaccatgagcatcgagttccccgagatgctggccgagatcatcaccaaccagatccccaagtacagcaacggcaacatcaagaagctgctgttccaccagaagtag

SEQ ID NO: 81102 - DNA, 1782 bp, Artificial Sequence
  derived and/or modified sequence
atggactccaaggagtccctcacccccggccgagaagaaaatccatcctctgtcctggcccaggagcgtggtgatgtgatggatttctacaaaacgctccggggcggtgctacagtaaaggtaagcgccagcagcccatcactggccgtggcgagccaatcagacagcaaacagcgacggctcttagtagactttccgaaggggtctgtgagcaatgcacagcagcccgacctgtccaaggctgtgagtcttagtatggggctctatatgggggaaaccgaaacaaaggtgatgggcaatgacctcggttttccccagcaagggcagatctctctatcgagcggggagaccgatctgaaattgctagaagagagtatcgctaatctcaacagaagcacatcagtgccggaaaatcctaaatcttccgccagtaccgctgtgagtgctgccccaactgagaaagagtttccaaaaacacactcagacgtaagttcggagcagcagcatctaaaagggcagaccggtaccaatggcggcaacgtgaaattgtatacgaccgatcagtccacatttgacatcttacaagacctggagttctcttctggttcccctggcaaggagaccaacgagtccccttggcgcagcgatctattgattgacgagaattgcctactctcccctctggctggcgaggatgactcattcctgttggaaggaaactctaatgaggattgtaagccactgattctcccagacacaaagcctaaaataaaggacaacggagatctggtcctgtcaagtccctcaaacgtgacgctccctcaagttaagacagagaaagaagatttcattgaattatgtactccaggtgttatcaagcaggagaaattaggtactgtgtattgccaggcctcctttcccggcgctaacattatagggaacaagatgagcgctatctctgtacatggggtctcgacctcaggggggcagatgtaccattatgatatgaatacggcctctctgtcgcagcagcaggatcagaaacccatctttaacgttatccccccaattcctgtgggatccgaaaactggaaccgctgtcagggttctggggacgacaacctgacaagtctcggcacactaaactttcccggccgaaccgtcttcagtaatgggtactcatctccatctatgaggcccgacgtgagcagcccacccagctcttcaagtaccgccactacaggacccccccccaaactctgtcttgtgtgtagcgacgaggcatctggctgccattacggagtactaacttgcggctcctgtaaagtttttttcaagcgcgcagtggagggacaacacaattacctctgcgctgggcgtaacgactgcatcattgacaaaatccgacgaaaaaattgtcccgcctgcagatatcgcaaatgtctgcaggcagggatgaacctcgaggtggttcccaaggatggactgaagtcgcaggagttgttcgatgaaataaggatgacatatattaaagagctgggcaaagccattgtcaagagagagggtaatagtagccagaactggcagagattctaccagctgaccaaactgctagactcaatgcatgaggtagtggagaatcttctgaactattgctttcagacctttctggataaaacaatgtctatcgagttccccgagatgctggctgagattataactaaccagataccaaagtactccaatggcaatatcaaaaagcttctatttcatcagaagtag

SEQ ID NO: 81103 - DNA, 1782 bp, Artificial Sequence
  derived and/or modified sequence
atggacagcaaggagagcctgaccccaggccgggaggagaaccccagctctgtgctggcccaggagagaggagatgtgatggacttctacaagaccctgcggggcggggccaccgtgaaggtgtctgccagcagccccagcctggccgtggccagccagagcgacagcaagcagaggcggctgctggtggacttccccaagggctctgtgtccaatgcccagcagcctgacctgagcaaggctgtgtccctgtccatgggcctgtacatgggagaaacagagaccaaggtgatgggaaatgacctgggcttcccccagcagggccagatcagcctgagcagcggggagacagacctgaagctgctggaggagagcatcgccaacctgaacagaagcacctctgtgcctgagaaccccaagagcagcgccagcacagctgtgtctgctgcccccacagagaaggagttccccaagacccacagtgatgtgtcctctgagcagcagcacctgaagggccagacaggcaccaatggaggaaatgtgaagctgtacaccacagaccagagcacctttgacatcctgcaggacctggagttcagcagcggcagccctgggaaggagaccaatgaaagcccctggaggagtgacctgctgattgatgagaactgcctgctgagccccctggccggagaagatgacagcttcctgctggagggcaacagcaatgaagactgcaagcccctcatcctgcctgacaccaagcccaagatcaaggacaacggggacctggtgctgagcagccccagcaatgtgaccctgccccaggtgaagacagagaaggaggacttcatcgagctgtgcaccccaggagtcatcaagcaggagaagctgggcaccgtgtactgccaggccagcttccctggggccaacatcatcggcaacaagatgtctgccatctctgtgcacggcgtgtccaccagcggcggccagatgtaccactatgacatgaacacagccagcctgagccagcagcaggaccagaagcccatcttcaacgtcatcccccccatccctgtgggcagcgagaactggaaccgctgccagggcagcggagatgacaacctgaccagcctgggcaccctgaacttccctggccgcacagtgttcagcaatggctacagcagccccagcatgaggccagatgtgagcagcccccccagcagcagcagcacagccaccaccggccccccacccaagctgtgcctggtgtgcagtgatgaggccagcggctgccactatggagtgctgacctgtggcagctgcaaggtgttcttcaagagagctgtggagggccagcacaactacctgtgtgccggcagaaatgactgcatcatcgacaagatccggaggaagaactgcccagcctgccgctacaggaagtgcctgcaggccggcatgaacctggaggtggtgcccaaggatggcctgaagagccaggagctgtttgatgagatccgcatgacctacatcaaggagctgggcaaggccatcgtgaagcgggagggcaacagcagccagaactggcagcgcttctaccagctgaccaagctgctggacagcatgcatgaggtggtggagaacctgctgaactactgcttccagaccttcctggacaagaccatgagcattgagttccctgagatgctggccgagatcatcaccaaccagatccccaagtacagcaatggaaacatcaagaagctgctcttccaccagaagtag

SEQ ID NO: 81104 - DNA, 1782 bp, Artificial Sequence
  derived and/or modified sequence
atggacagcaaggagagcctgacccccggccgggaggagaaccccagctcagtactagcccaagaaaggggagacgtgatggatttctacaaaactttacggggcggcgctaccgtgaaggtgtccgcctcaagccccagcctggcggtggcttcccagtcagacagtaagcagagacgcctgttagtcgacttccctaaaggctcagtgtccaacgcccaacagccagatctctcgaaggctgtgtctctttctatgggcctctacatgggcgagaccgaaactaaagtgatgggtaacgacctgggattcccccagcaaggccaaataagcctgtcatccggcgaaactgacttaaagcttctcgaagagtcaattgcaaacttgaatcggtccacgagcgtgcctgaaaatcctaaatctagcgcatctacagccgtgagcgctgctcctacagagaaagaattccctaagacgcattcagacgtatcatcagagcagcagcaccttaaaggacagacggggaccaacggtggcaacgttaagctctatacgactgatcaaagcacttttgacatcctgcaagacctggaattttcaagtggaagcccaggaaaggaaaccaacgagtcgccttggaggagtgacctgctgattgatgagaactgtctgctctctccactggccggagaagatgattcctttttgttagaagggaactctaacgaggattgcaaacctttgatcttgcctgataccaagcccaagatcaaagacaatggagacctggtcctatcatcaccgagcaacgtaacccttcctcaagttaaaaccgagaaagaagatttcattgagctgtgtaccccgggcgtgatcaagcaagagaaactggggaccgtttactgccaggcctccttccccggtgccaacatcatcggtaataagatgagtgccatcagcgtgcacggtgtgtctacaagtgggggccagatgtatcactacgatatgaacacagccagcctctcgcagcagcaagaccaaaagcccatcttcaatgtcattccccctatccccgttggttcagagaattggaaccggtgccagggaagcggagatgacaaccttactagtctcgggacgctaaactttcccggtcgaaccgtgttctccaatggatatagctcaccctccatgcgcccagacgtgagtagccccccgagcagttcatccacagccaccaccggccccccgcctaagctatgtttggtctgctctgacgaggcaagcggttgtcattatggcgtgctgacatgcggatcttgtaaggtgtttttcaagcgcgcagttgagggtcagcacaactatttatgcgccgggcggaatgattgtattatcgataagatcaggcgtaaaaattgccccgcgtgtcggtacaggaagtgccttcaggctggtatgaatctggaagtggtgcccaaggacggcctgaaatcacaagaattatttgacgagatacggatgacctacattaaggaactgggaaaagccatagtgaagagagagggaaattcatctcagaattggcagaggttttaccagctcactaagctgttagatagtatgcacgaagtggttgaaaatcttctgaactattgctttcagacgttcctggacaaaaccatgtcaatagagttcccagaaatgctcgcagagattattaccaaccagataccaaaatacagcaacggaaatatcaaaaaactcctgttccaccagaagtag

SEQ ID NO: 81105 - DNA, 6232 bp, Artificial Sequence
  derived and/or modified sequence
ggcgccgcctccacccgctccccgctcggtcccgctcgctcgcccaggccgggctgccctttcgcgtgtccgcgctctcttccctccgccgccgcctcctccattttgcgagctcgtgtctgtgacgggagcccgagtcaccgcctgcccgtcggggacggattctgtgggtggaaggagacgccgcagccggagcggccgaagcagctgggaccgggacggggcacgcgcgcccggaacctcgacccgcggagcccggcgcggggcggagggctggcttgtcagctgggcaatgggagactttcttaaataggggctctccccccacccatggagaaaggggcggctgtttacttcctttttttagaaaaaaaaaatatatttccctcctgctccttctgcgttcacaagctaagttgtttatctcggctgcggcgggaactgcggacggtggcgggcgagcggctcctctgccagagttgatattcactgatggactccaaagaatcattaactcctggtagagaagaaaaccccagcagtgtgcttgctcaggagaggggagatgtgatggacttctataaaaccctaagaggaggagctactgtgaaggtttctgcgtcttcaccctcactggctgtcgcttctcaatcagactccaagcagcgaagacttttggttgattttccaaaaggctcagtaagcaatgcgcagcagccagatctgtccaaagcagtttcactctcaatgggactgtatatgggagagacagaaacaaaagtgatgggaaatgacctgggattcccacagcagggccaaatcagcctttcctcgggggaaacagacttaaagcttttggaagaaagcattgcaaacctcaataggtcgaccagtgttccagagaaccccaagagttcagcatccactgctgtgtctgctgcccccacagagaaggagtttccaaaaactcactctgatgtatcttcagaacagcaacatttgaagggccagactggcaccaacggtggcaatgtgaaattgtataccacagaccaaagcacctttgacattttgcaggatttggagttttcttctgggtccccaggtaaagagacgaatgagagtccttggagatcagacctgttgatagatgaaaactgtttgctttctcctctggcgggagaagacgattcattccttttggaaggaaactcgaatgaggactgcaagcctctcattttaccggacactaaacccaaaattaaggataatggagatctggttttgtcaagccccagtaatgtaacactgccccaagtgaaaacagaaaaagaagatttcatcgaactctgcacccctggggtaattaagcaagagaaactgggcacagtttactgtcaggcaagctttcctggagcaaatataattggtaataaaatgtctgccatttctgttcatggtgtgagtacctctggaggacagatgtaccactatgacatgaatacagcatccctttctcaacagcaggatcagaagcctatttttaatgtcattccaccaattcccgttggttccgaaaattggaataggtgccaaggatctggagatgacaacttgacttctctggggactctgaacttccctggtcgaacagttttttctaatggctattcaagccccagcatgagaccagatgtaagctctcctccatccagctcctcaacagcaacaacaggaccacctcccaaactctgcctggtgtgctctgatgaagcttcaggatgtcattatggagtcttaacttgtggaagctgtaaagttttcttcaaaagagcagtggaaggacagcacaattacctatgtgctggaaggaatgattgcatcatcgataaaattcgaagaaaaaactgcccagcatgccgctatcgaaaatgtcttcaggctggaatgaacctggaagtagttcctaaggacggtctgaagagccaagagctatttgatgaaattagaatgacctacatcaaagagctaggaaaagccattgtcaagagggaaggaaactccagccagaactggcagcggttttatcaactgacaaaactcttggattctatgcatgaagtggttgaaaatctccttaactattgcttccaaacatttttggataagaccatgagtattgaattccccgagatgttagctgaaatcatcaccaatcagataccaaaatattcaaatggaaatatcaaaaaacttctgtttcatcaaaagtgactgccttaataagaatggttgccttaaagaaagtcgaattaatagcttttattgtataaactatcagtttgtcctgtagaggttttgttgttttattttttattgttttcatctgttgttttgttttaaatacgcactacatgtggtttatagagggccaagacttggcaacagaagcagttgagtcgtcatcacttttcagtgatgggagagtagatggtgaaatttattagttaatatatcccagaaattagaaaccttaatatgtggacgtaatctccacagtcaaagaaggatggcacctaaaccaccagtgcccaaagtctgtgtgatgaactttctcttcatactttttttcacagttggctggatgaaattttctagactttctgttggtgtatcccccccctgtatagttaggatagcatttttgatttatgcatggaaacctgaaaaaaagtttacaagtgtatatcagaaaagggaagttgtgccttttatagctattactgtctggttttaacaatttcctttatatttagtgaactacgcttgctcattttttcttacataattttttattcaagttattgtacagctgtttaagatgggcagctagttcgtagctttcccaaataaactctaaacattaatcaatcatctgtgtgaaaatgggttggtgcttctaacctgatggcacttagctatcagaagaccacaaaaattgactcaaatctccagtattcttgtcaaaaaaaaaaaaaaaaaagctcatattttgtatatatctgcttcagtggagaattatataggttgtgcaaattaacagtcctaactggtatagagcacctagtccagtgacctgctgggtaaactgtggatgatggttgcaaaagactaatttaaaaaataactaccaagaggccctgtctgtacctaacgccctatttttgcaatggctatatggcaagaaagctggtaaactatttgtctttcaggaccttttgaagtagtttgtataacttcttaaaagttgtgattccagataaccagctgtaacacagctgagagacttttaatcagacaaagtaattcctctcactaaactttacccaaaaactaaatctctaatatggcaaaaatggctagacacccattttcacattcccatctgtcaccaattggttaatctttcctgatggtacaggaaagctcagctactgatttttgtgatttagaactgtatgtcagacatccatgtttgtaaaactacacatccctaatgtgtgccatagagtttaacacaagtcctgtgaatttcttcactgttgaaaattattttaaacaaaatagaagctgtagtagccctttctgtgtgcaccttaccaactttctgtaaactcaaaacttaacatatttactaagccacaagaaatttgatttctattcaaggtggccaaattatttgtgtaatagaaaactgaaaatctaatattaaaaatatggaacttctaatatatttttatatttagttatagtttcagatatatatcatattggtattcactaatctgggaagggaagggctactgcagctttacatgcaatttattaaaatgattgtaaaatagcttgtatagtgtaaaataagaatgatttttagatgagattgttttatcatgacatgttatatattttttgtaggggtcaaagaaatgctgatggataacctatatgatttatagtttgtacatgcattcatacaggcagcgatggtctcagaaaccaaacagtttgctctaggggaagagggagatggagactggtcctgtgtgcagtgaaggttgctgaggctctgacccagtgagattacagaggaagttatcctctgcctcccattctgaccacccttctcattccaacagtgagtctgtcagcgcaggtttagtttactcaatctccccttgcactaaagtatgtaaagtatgtaaacaggagacaggaaggtggtgcttacatccttaaaggcaccatctaatagcgggttactttcacatacagccctcccccagcagttgaatgacaacagaagcttcagaagtttggcaatagtttgcatagaggtaccagcaatatgtaaatagtgcagaatctcataggttgccaataatacactaattcctttctatcctacaacaagagtttatttccaaataaaatgaggacatgtttttgttttctttgaatgctttttgaatgttatttgttattttcagtattttggagaaattatttaataaaaaaacaatcatttgctttttgaatgctctctaaaagggaatgtaatattttaagatggtgtgtaacccggctggataaatttttggtgcctaagaaaactgcttgaatattcttatcaatgacagtgttaagtttcaaaaagagcttctaaaacgtagattatcattcctttatagaatgttatgtggttaaaaccagaaagcacatctcacacattaatctgattttcatcccaacaatcttggcgctcaaaaaatagaactcaatgagaaaaagaagattatgtgcacttcgttgtcaataataagtcaactgatgctcatcgacaactataggaggcttttcattaaatgggaaaagaagctgtgcccttttaggatacgtgggggaaaagaaagtcatcttaattatgtttaattgtggatttaagtgctatatggtggtgctgtttgaaagcagatttatttcctatgtatgtgttatctggccatcccaacccaaactgttgaagtttgtagtaacttcagtgagagttggttactcacaacaaatcctgaaaagtatttttagtgtttgtaggtattctgtgggatactatacaagcagaactgaggcacttaggacataacacttttggggtatatatatccaaatgcctaaaactatgggaggaaaccttggccaccccaaaaggaaaactaacatgatttgtgtctatgaagtgctggataattagcatgggatgagctctgggcatgccatgaaggaaagccacgctcccttcagaattcagaggcagggagcaattccagtttcacctaagtctcataattttagttcccttttaaaaaccctgaaaactacatcaccatggaatgaaaaatattgttatacaatacattgatctgtcaaacttccagaaccatggtagccttcagtgagatttccatcttggctggtcactccctgactgtagctgtaggtgaatgtgtttttgtgtgtgtgtgtctggttttagtgtcagaagggaaataaaagtgtaaggaggacactttaaaccctttgggtggagtttcgtaatttcccagactattttcaagcaacctggtccacccaggattagtgaccaggttttcaggaaaggatttgcttctctctagaaaatgtctgaaaggattttattttctgatgaaaggctgtatgaaaataccctcctcaaataacttgcttaactacatatagattcaagtgtgtcaatattctattttgtatattaaatgctatataatggggacaaatctatattatactgtgtatggcattattaagaagctttttcattattttttatcacagtaattttaaaatgtgtaaaaattaaaaccagtgactcctgtttaaaaataaaagttgtagttttttattcatgctgaataataatctgtagttaaaaaaaaagtgtctttttacctacgcagtgaaatgtcagactgtaaaaccttgtgtggaaatgtttaacttttattttttcatttaaatttgctgttctggtattaccaaaccacacatttgtaccgaattggcagtaaatgttagccatttacagcaatgccaaatatggagaaacatcataataaaaaaatctgctttttcatta

SEQ ID NO: 81106 - DNA, 1782 bp, Artificial Sequence
  derived and/or modified sequence
atggatagcaaagagtccctgacacccggacgggaagagaatcccagcagcgtgctcgctcaggaacgtggcgacgttatggacttctacaaaaccctcagagggggtgcaacagtgaaggtgtcagccagcagcccgtcactcgcagtggcctcccagagcgacagtaagcagagaaggttgctcgtcgacttccccaaggggagtgtcagtaatgcacagcaaccagacctgtcgaaggcagtgagcctgtccatgggtttgtatatgggagagactgaaacaaaggttatgggcaacgatctgggatttccacagcaagggcagatctcactatcatctggagagaccgaccttaagctcctcgaagagtcgattgctaaccttaatcgttccaccagtgtgcccgagaacccaaagtcgagcgcctcgacagctgtgtccgcggctccaacagagaaggagtttcccaaaacgcattctgatgtcagcagtgaacagcaacacttgaaaggccagacaggaaccaatggcggaaacgtcaaactgtacactacggatcagtcaacatttgacatcctgcaggacttggagttcagcagtgggtcccccggtaaagagacgaatgagtccccttggcggagcgacctgttgatcgacgaaaactgcctcttgagcccactggcaggagaagacgattccttcctgttggagggtaacagcaatgaggactgcaaaccacttatccttccagatacaaagccaaagatcaaagataacggagaccttgtcctctcctcaccttccaatgttacactgccacaggtgaagacagaaaaggaggacttcatagaactgtgtacaccgggagtcattaagcaggaaaagttagggactgtttattgccaggcatcgtttcccggtgcaaatatcatcggcaacaaaatgtccgcgatcagtgtccacggagttagtaccagtggtggtcagatgtatcattatgacatgaatacagcttcactgagccagcaacaggatcagaagccaatattcaacgtgatcccaccgatacctgtgggcagtgagaattggaatcggtgtcaggggtccggggatgacaatcttacttccttagggacattgaatttccccggtcgcaccgtttttagtaatggttactcttccccctctatgagaccagatgtttcctcaccacccagctcctcatccactgcaaccaccgggcctcctccgaaactctgtctggtctgttctgacgaggcgtccggctgccactacggggttctgacctgtgggagctgcaaggtcttctttaagcgcgcagtggagggccagcacaactatctgtgtgctggcagaaatgactgcataattgataaaatccggagaaaaaattgccccgcatgccgctacaggaaatgtctgcaggctggaatgaacctggaagtcgtgcctaaggatggcctgaagtcccaggagcttttcgatgaaatcaggatgacctatatcaaagaactgggcaaagctattgtgaaaagggaaggtaattcgagtcagaactggcagcggttttaccagctgactaaactcttggactctatgcacgaggttgtagagaatctgctgaactattgttttcaaacatttctggacaaaacaatgtccatcgagttccctgagatgctcgccgagattattacaaatcagatacccaaatactctaacgggaacatcaagaagttgttattccaccagaaatag

SEQ ID NO: 81107 - protein, 371 aa, Artificial Sequence
  derived and/or modified sequence
MALGKFRAALRDYETVVKVKPHDKDAKMKYQECNKIVKQKAFERAIAGDEHKRSVVDSLDIESMTIEDEYSGPKLEDGKVTISFMKELMQWYKDQKKLHRKCAYQTEKITVCGDTHGQFYDLLNIFELNGLPSETNPYIFNGDFVDRGSFSVEVILTLFGFKLLYPDHFHLLRGNHETDNMNQIYGFEGEVKAKYTAQMYELFSEVFEWLPLAQCINGKVLIMHGGLFSEDGVTLDDIRKIERNRQPPDSGPMCDLLWSDPQPQNGRSISKRGVSCQFGPDVTKAFLEENNLDYIIRSHEVKAEGYEVAHGGRCVTVFSAPNYCDQMGNKASYIHLQGSDLRPQFHQFTAVPHPNVKPMAYANTLLQLGMM

SEQ ID NO: 81108 - DNA, 1116 bp, Artificial Sequence
  derived and/or modified sequence
atggcgttgggtaagtttagggccgctttgagggattacgaaactgtagtgaaagtgaagccacatgacaaggacgctaaaatgaagtatcaagaatgcaacaaaatcgtcaaacagaaagcgttcgagcgagctatcgctggggacgaacataagaggtccgtcgtcgacagtctcgatatcgaaagcatgaccatcgaggatgagtattcaggcccaaaacttgaggacggaaaggttaccatttccttcatgaaggaactgatgcaatggtacaaggatcaaaaaaaacttcatcgcaagtgcgcatatcagaccgaaaaaatcactgtatgtggcgacacacacggccagttctatgacctgttgaacatattcgaactgaacgggctgccgagcgaaactaatccctacatcttcaatggcgatttcgtcgacagaggatccttcagtgtggaggtaattctcacactgtttgggtttaagctcttgtatcctgatcacttccacctgttaaggggtaatcacgaaaccgacaatatgaatcagatctatggatttgaaggtgaggtcaaggccaagtatacagctcagatgtacgaactttttagcgaagtgtttgaatggctcccactggctcagtgcatcaatggaaaagtgctcatcatgcatggagggctgttttccgaagacggggtcactctggacgacattcggaagatagaaagaaatcgacagccccccgacagcggcccaatgtgcgatctactatggtccgatcctcagcctcaaaatggccggtccataagcaaaaggggagtgtcttgtcagttcgggcctgatgttaccaaggcattcctggaggagaataacctcgactatatcatacgaagccatgaggtcaaggccgagggttatgaggtggcgcatgggggccgctgtgtcacagttttcagcgccccgaactactgcgatcaaatgggaaataaggctagctatatccacctccaagggtctgatctgaggccccagttccatcagtttacagcagtaccacaccccaacgttaaaccaatggcctatgcgaataccctcctgcaactgggcatgatgtag

SEQ ID NO: 81109 - DNA, 1116 bp, Artificial Sequence
  derived and/or modified sequence
atggccctgggcaagttccgggccgccctgcgggactatgaaacagtggtgaaggtgaagccccatgacaaggatgccaagatgaagtaccaggagtgcaacaagatcgtgaagcagaaggcctttgagcgggccatcgctggagatgagcacaagaggtctgtggtggacagcctggacattgaatccatgaccattgaagatgagtacagcggccccaagctggaggatggcaaggtgaccatctccttcatgaaggagctgatgcagtggtacaaggaccagaagaagctgcacaggaaatgtgcctaccagacagagaagatcaccgtgtgtggggacacccacggccagttctatgacctgctgaacatctttgagctgaatggcctgcccagcgagaccaacccctacatcttcaatggagactttgtggaccggggcagcttctctgtggaggtgatcctgaccctgtttggcttcaagctgctgtacccagaccacttccacctgctgcggggcaaccacgagacagacaacatgaaccagatctacggctttgaaggagaggtgaaggccaagtacacagcccagatgtatgagctgttcagcgaggtgtttgagtggctgcccctggcccagtgcatcaatggcaaggtgctgatcatgcacggcggcctcttctctgaagatggagtgaccctggatgacatcaggaagattgaaagaaaccggcagcccccagacagcggccccatgtgtgacctgctgtggagcgacccccagccccagaatggccgcagcatcagcaagaggggcgtgtcctgccagtttggaccagatgtgaccaaggccttcctggaggagaacaacctggactacatcatccgcagccatgaggtgaaggccgagggctatgaggtggcccacggcggccgctgtgtgaccgtcttcagcgcccccaactactgtgaccagatgggcaacaaggccagctacatccacctgcagggcagtgacctgcggccccagttccaccagttcaccgctgtgccccaccccaacgtgaagcccatggcctatgccaacaccctgctgcagctgggcatgatgtag

SEQ ID NO: 81110 - DNA, 1116 bp, Artificial Sequence
  derived and/or modified sequence
atggccctgggcaagttccgggccgccctgcgggactacgagaccgtggtaaaagttaagccacacgataaggatgctaagatgaagtatcaagagtgtaataagatcgtcaagcaaaaggctttcgaaagggccatcgctggagacgagcataaacgatcagtggtagacagcctggatatcgagtccatgacaattgaagacgagtattccggccccaagttagaagatggcaaagtcaccatttcatttatgaaggagctgatgcaatggtacaaggaccagaagaagttgcataggaagtgtgcctatcagactgaaaaaattactgtttgtggagatacacatgggcaattttacgacctgctcaatattttcgagctcaatgggcttccatccgagactaatccatatatatttaacggggatttcgttgatcgcggctccttctctgtggaagtgatcctcacattgtttggcttcaaactgctgtatcctgaccatttccacctcctgcgcggaaaccacgagaccgataacatgaaccagatttatggcttcgaaggggaagtaaaagccaagtataccgctcaaatgtatgagctattcagcgaagtgttcgagtggctcccgctggcacagtgcattaatggcaaagtgttgatcatgcatggaggactcttttcagaggacggagtgactctggacgacatacgcaaaatcgagcggaacaggcagccccccgatagtgggccaatgtgcgacttgctatggtccgacccccagccacagaacggaaggagcatttctaagagaggtgttagttgccagtttggccccgacgttaccaaagcctttctagaagagaacaatctggactacatcattagatcacacgaagtcaaggcagaaggatacgaagttgcccatggcgggaggtgtgtaacagtgtttagtgcccccaactactgcgaccagatgggcaacaaggcttcttacatacacctccaggggtcggatctgagaccacagtttcaccaatttaccgccgtcccgcacccgaatgtcaaacctatggcttacgcgaatactttattgcaactgggcatgatgtag

SEQ ID NO: 81111 - DNA, 1116 bp, Artificial Sequence
  derived and/or modified sequence
atggcgcttgggaaattcagggcagccctgagggactatgaaacagtggtgaaagtcaagccccacgacaaggatgctaagatgaagtaccaggagtgtaacaaaatagttaagcaaaaggcctttgagcgagctattgcaggcgatgagcataagaggtcagtcgtggacagtctcgacatcgaatccatgacaattgaagatgaatattcggggcctaaactggaagatggcaaagttaccatttcgttcatgaaggagctgatgcagtggtacaaggaccagaaaaagctgcaccgtaagtgcgcatatcagaccgaaaagatcaccgtctgcggagacacccacggccagttctatgacctcctgaacatttttgaacttaatggtcttccgagtgaaactaatccctacatcttcaacggcgatttcgtggacagggggtctttttcagtcgaagtgattttaacactgtttggcttcaagttgctgtatccggatcatttccacctgttaagaggaaaccacgagacggacaacatgaatcagatctacggcttcgagggagaagtcaaagcaaaatacaccgctcagatgtatgaactgttctcagaggtctttgaatggctgcccctagcccagtgtattaacggtaaggttctgattatgcacgggggactgttctccgaggacggggttacactggatgacatccggaaaatcgaaagaaaccgccagccaccggactctggtcctatgtgtgatctgctgtggtcagacccacagccacagaatggcagaagtatctctaaacggggagtgagctgccaattcggcccagacgtaactaaagccttccttgaggaaaacaacctggattacattattagatcccatgaagtgaaagctgagggctacgaagtggcccacgggggtcggtgtgtaaccgtgttttcagcacccaattactgtgaccaaatgggcaataaagcctcctatatccacctccaaggctcagacctgagaccacagtttcatcaatttaccgccgtgccacaccctaacgtgaagcccatggcctacgcaaatacccttctacagcttggtatgatgtag

SEQ ID NO: 81112 - DNA, 1929 bp, Artificial Sequence
  derived and/or modified sequence
ggagggcgagaggactgagtgtgctgagcccccccgggacgaacccccggctgatggagctctgaagcgggcagaggagctcaagactcaggccaatgactacttcaaagccaaggactacgagaacgccatcaagttctacagccaggccatcgagctgaaccccagcaatgccatctactatggcaaccgcagcctggcctacctgcgcactgagtgctatggctacgcgctgggagacgccacgcgggccattgagctggacaagaagtacatcaagggttattaccgccgggctgccagcaacatggcactgggcaagttccgggccgcgctgcgagactacgagacggtggtcaaggtgaagccccatgacaaggatgccaaaatgaaataccaggagtgcaacaagatcgtgaagcagaaggcctttgagcgggccatcgcgggcgacgagcacaagcgctccgtggtggactcgctggacatcgagagcatgaccattgaggatgagtacagcggacccaagcttgaagacggcaaagtgacaatcagtttcatgaaggagctcatgcagtggtacaaggaccagaagaaactgcaccggaaatgtgcctaccagacagagaagattacagtatgtggggacacccatggccagttctatgacctcctcaacatattcgagctcaacggtttaccctcggagaccaacccctatatatttaatggtgactttgtggaccgaggctccttctctgtagaagtgatcctcacccttttcggcttcaagctcctgtacccagatcactttcacctccttcgaggcaaccacgagacagacaacatgaaccagatctacggtttcgagggtgaggtgaaggccaagtacacagcccagatgtacgagctctttagcgaggtgttcgagtggctcccgttggcccagtgcatcaacggcaaagtgctgatcatgcacggaggcctgttcagtgaagacggtgtcaccctggatgacatccggaaaattgagcggaatcgacaacccccagattcagggcccatgtgtgacctgctctggtcagatccacagccacagaacgggcgctcgatcagcaagcggggcgtgagctgtcagtttgggcctgacgtcaccaaggccttcttggaagagaacaacctggactatatcatccgcagccacgaagtcaaggccgagggctacgaggtggctcacggaggccgctgtgtcaccgtcttctctgcccccaactactgcgaccagatggggaacaaagcctcctacatccacctccagggctctgacctacggcctcagttccaccagttcacagcagtgcctcatcccaacgtcaagcccatggcctatgccaacacgctgctgcagctaggaatgatgtgaggtgacgggcggggcggcctgcatcccagggcccctccaatcccaccggacccaggccctgggctaggggcagagcaggccccgccccagggcaatgttggacccccttttactttgtaaagtttgtatttattcccctttaggtttgcagagggggtaggggcagagtcaggggctggccagagggtctgctccctggacagagaggaaggaggtggagcagctggggctgggggcacagcctgggcattctgtggggaggccgtcctcggggtggggtggggccgagtggctgccctgcccccctcatttgcatggctcctcccccactcaagcaatagggccccgccataggaagacccccagagagagggtcagcaggggggccccgcctgcgcctcccctcctatagccccatggtggggctaggctggggctcacccccctccccagctattttatgtctgtaattaaatatgttaaaataaagtcattatcggaagtca

SEQ ID NO: 81113 - DNA, 1116 bp, Artificial Sequence
  derived and/or modified sequence
atggccctgggcaagttcagagccgccctgagagactacgagaccgtggtgaaggtgaagccccacgacaaggacgccaagatgaagtaccaggagtgcaacaagatcgtgaagcagaaggccttcgagagagccatcgccggcgacgagcacaagagaagcgtggtggacagcctggacatcgagagcatgaccatcgaggacgagtacagcggccccaagctggaggacggcaaggtgaccatcagcttcatgaaggagctgatgcagtggtacaaggaccagaagaagctgcacagaaagtgcgcctaccagaccgagaagatcaccgtgtgcggcgacacccacggccagttctacgacctgctgaacatcttcgagctgaacggcctgcccagcgagaccaacccctacatcttcaacggcgacttcgtggacagaggcagcttcagcgtggaggtgatcctgaccctgttcggcttcaagctgctgtaccccgaccacttccacctgctgagaggcaaccacgagaccgacaacatgaaccagatctacggcttcgagggcgaggtgaaggccaagtacaccgcccagatgtacgagctgttcagcgaggtgttcgagtggctgcccctggcccagtgcatcaacggcaaggtgctgatcatgcacggcggcctgttcagcgaggacggcgtgaccctggacgacatcagaaagatcgagagaaacagacagccccccgacagcggccccatgtgcgacctgctgtggagcgacccccagccccagaacggcagaagcatcagcaagagaggcgtgagctgccagttcggccccgacgtgaccaaggccttcctggaggagaacaacctggactacatcatcagaagccacgaggtgaaggccgagggctacgaggtggcccacggcggcagatgcgtgaccgtgttcagcgcccccaactactgcgaccagatgggcaacaaggccagctacatccacctgcagggcagcgacctgagaccccagttccaccagttcaccgccgtgccccaccccaacgtgaagcccatggcctacgccaacaccctgctgcagctgggcatgatgtag

SEQ ID NO: 81114 - protein, 475 aa, Artificial Sequence
  derived and/or modified sequence
MTPGTQSPFFLLLLLTVLTVVTGSGHASSTPGGEKETSATQRSSVPSSTEKNAVSMTSSVLSSHSPGSGSSTTQGQDVTLAPATEPASGSAATWGQDVTSVPVTRPALGSTTPPAHDVTSAPDNKPAPGSTAPPAHGVTSAPDTRPAPGSTAPPAHGVTSAPDNRPALGSTAPPVHNVTSASGSASGSASTLVHNGTSARATTTPASKSTPFSIPSHHSDTPTTLASHSTKTDASSTHHSTVPPLTSSNHSTSPQLSTGVSFFFLSFHISNLQFNSSLEDPSTDYYQELQRDISEMFLQIYKQGGFLGLSNIKFRPGSVVVQLTLAFREGTINVHDVETQFNQYKTEAASRYNLTISDVSVSDVPFPFSAQSGAGVPGWGIALLVLVCVLVALAIVYLIALAVCQCRRKNYGQLDIFPARDTYHPMSEYPTYHTHGRYVPPSSTDRSPYEKVSAGNGGSSLSYTNPAVAATSANL

SEQ ID NO: 81115 - protein, 561 aa, Artificial Sequence
  derived and/or modified sequence
MTPGTQSPFFLLLLLTVLTVVTGSGHASSTPGGEKETSATQRSSVPSSTEKNAVSMTSSVLSSHSPGSGSSTTQGQDVTLAPATEPASGSAATWGQDVTSVPVTRPALGSTTPPAHDVTSAPDTRPAPGSTAPPAHGVTSAPDTRPAPGSTAPPAHGVTSAPDTRPAPGSTAPPAHGVTSAPDTRPAPGSTAPPAHGVTSAPDTRRAPGSTPAPGSTAPPAHGVTSAPDTRPAPGSTAPPAHGVTSAPDNRPALGSTAPPVHNVTSASGSASGSASTLVHNGTSARATTTPASKSTPFSIPSHHSDTPTTLASHSTKTDASSTHHSTVPPLTSSNHSTSPQLSTGVSFFFLSFHISNLQFNSSLEDPSTDYYQELQRDISEMFLQIYKQGGFLGLSNIKFRPGSVVVQLTLAFREGTINVHDVETQFNQYKTEAASRYNLTISDVSVSDVPFPFSAQSGAGVPGWGIALLVLVCVLVALAIVYLIALAVCQCRRKNYGQLDIFPARDTYHPMSEYPTYHTHGRYVPPSSTDRSPYEKVSAGNGGSSLSYTNPAVAATSANL

SEQ ID NO: 81116 - DNA, 1428 bp, Artificial Sequence
  derived and/or modified sequence
atgacccccggcacccagagccccttcttcctgctgctgctgctgaccgtgctgaccgtggtgaccggcagcggccacgccagcagcacccccggcggcgagaaggagaccagcgccacccagagaagcagcgtgcccagcagcaccgagaagaacgccgtgagcatgaccagcagcgtgctgagcagccacagccccggcagcggcagcagcaccacccagggccaggacgtgaccctggcccccgccaccgagcccgccagcggcagcgccgccacctggggccaggacgtgaccagcgtgcccgtgaccagacccgccctgggcagcaccaccccccccgcccacgacgtgaccagcgcccccgacaacaagcccgcccccggcagcaccgccccccccgcccacggcgtgaccagcgcccccgacaccagacccgcccccggcagcaccgccccccccgcccacggcgtgaccagcgcccccgacaacagacccgccctgggcagcaccgccccccccgtgcacaacgtgaccagcgccagcggcagcgccagcggcagcgccagcaccctggtgcacaacggcaccagcgccagagccaccaccacccccgccagcaagagcacccccttcagcatccccagccaccacagcgacacccccaccaccctggccagccacagcaccaagaccgacgccagcagcacccaccacagcaccgtgccccccctgaccagcagcaaccacagcaccagcccccagctgagcaccggcgtgagcttcttcttcctgagcttccacatcagcaacctgcagttcaacagcagcctggaggaccccagcaccgactactaccaggagctgcagagagacatcagcgagatgttcctgcagatctacaagcagggcggcttcctgggcctgagcaacatcaagttcagacccggcagcgtggtggtgcagctgaccctggccttcagagagggcaccatcaacgtgcacgacgtggagacccagttcaaccagtacaagaccgaggccgccagcagatacaacctgaccatcagcgacgtgagcgtgagcgacgtgcccttccccttcagcgcccagagcggcgccggcgtgcccggctggggcatcgccctgctggtgctggtgtgcgtgctggtggccctggccatcgtgtacctgatcgccctggccgtgtgccagtgcagaagaaagaactacggccagctggacatcttccccgccagagacacctaccaccccatgagcgagtaccccacctaccacacccacggcagatacgtgccccccagcagcaccgacagaagcccctacgagaaggtgagcgccggcaacggcggcagcagcctgagctacaccaaccccgccgtggccgccaccagcgccaacctgtag

SEQ ID NO: 81117 - DNA, 1686 bp, Artificial Sequence
  derived and/or modified sequence
atgacccccggcacccagagccccttcttcctgctgctgctgctgaccgtgctgaccgtggtgaccggcagcggccacgccagcagcacccccggcggcgagaaggagaccagcgccacccagagaagcagcgtgcccagcagcaccgagaagaacgccgtgagcatgaccagcagcgtgctgagcagccacagccccggcagcggcagcagcaccacccagggccaggacgtgaccctggcccccgccaccgagcccgccagcggcagcgccgccacctggggccaggacgtgaccagcgtgcccgtgaccagacccgccctgggcagcaccaccccccccgcccacgacgtgaccagcgcccccgacaccagacccgcccccggcagcaccgccccccccgcccacggcgtgaccagcgcccccgacaccagacccgcccccggcagcaccgccccccccgcccacggcgtgaccagcgcccccgacaccagacccgcccccggcagcaccgccccccccgcccacggcgtgaccagcgcccccgacaccagacccgcccccggcagcaccgccccccccgcccacggcgtgaccagcgcccccgacaccagaagagcccccggcagcacccccgcccccggcagcaccgccccccccgcccacggcgtgaccagcgcccccgacaccagacccgcccccggcagcaccgccccccccgcccacggcgtgaccagcgcccccgacaacagacccgccctgggcagcaccgccccccccgtgcacaacgtgaccagcgccagcggcagcgccagcggcagcgccagcaccctggtgcacaacggcaccagcgccagagccaccaccacccccgccagcaagagcacccccttcagcatccccagccaccacagcgacacccccaccaccctggccagccacagcaccaagaccgacgccagcagcacccaccacagcaccgtgccccccctgaccagcagcaaccacagcaccagcccccagctgagcaccggcgtgagcttcttcttcctgagcttccacatcagcaacctgcagttcaacagcagcctggaggaccccagcaccgactactaccaggagctgcagagagacatcagcgagatgttcctgcagatctacaagcagggcggcttcctgggcctgagcaacatcaagttcagacccggcagcgtggtggtgcagctgaccctggccttcagagagggcaccatcaacgtgcacgacgtggagacccagttcaaccagtacaagaccgaggccgccagcagatacaacctgaccatcagcgacgtgagcgtgagcgacgtgcccttccccttcagcgcccagagcggcgccggcgtgcccggctggggcatcgccctgctggtgctggtgtgcgtgctggtggccctggccatcgtgtacctgatcgccctggccgtgtgccagtgcagaagaaagaactacggccagctggacatcttccccgccagagacacctaccaccccatgagcgagtaccccacctaccacacccacggcagatacgtgccccccagcagcaccgacagaagcccctacgagaaggtgagcgccggcaacggcggcagcagcctgagctacaccaaccccgccgtggccgccaccagcgccaacctgtag

SEQ ID NO: 81118 - DNA, 1428 bp, Artificial Sequence
  derived and/or modified sequence
atgaccccgggcacccaatctccctttttccttctgttgctcctgaccgtgttgaccgtggtgacgggctctggacatgcgagttccacaccgggaggcgaaaaggagaccagcgcgactcagagaagcagcgtcccttctagtacagagaagaatgccgtgtccatgacttcctcagttctgtcgagccactccccagggtccggctcctctacgacccaggggcaagatgtgactctcgcgcccgcaactgagcctgccagcggaagtgcagccacatggggtcaggacgttaccagtgttcccgttactaggcctgcattgggatcaaccactccacctgcccacgatgtcacctctgcgccagacaataaaccggctccaggatctactgcccctccggctcatggggtaacctctgcccccgacacccggcccgcacctggaagcacagccccccctgcacacggtgttacatccgccccggataatagaccggccctgggctccactgctcccccggtacataatgtcacatcagcatcaggtagtgcttccggctcagcctcgacactggtgcacaatggaacatctgctagggccactaccacacctgcttctaaatcaacaccattttctattccatctcatcattccgacaccccgacaacactcgcctcgcactccaccaagaccgacgcctcttcaacgcaccactcaactgtgcccccacttaccagttctaaccatagcactagccctcagctctccaccggtgtgtcgttcttttttctctcattccacatttctaacctgcaatttaacagttctctggaagatccgtccacggactattaccaagaactgcaacgggacatcagcgaaatgtttctccaaatctataagcagggtggttttttgggcctcagcaatattaaattccggccgggctctgttgttgtgcagttaacactcgcatttcgggaaggaactattaacgtgcatgacgtggaaacacaatttaaccagtacaaaacagaggcggcttcccgttataatctgaccatctctgatgtgagtgtctctgatgtgccattcccttttagcgcacaatctggtgctggggttccaggttgggggattgccttactggtcttggtctgcgtgcttgtggccctggctatagtatacctcatcgcactcgcagtttgccagtgtcgccggaaaaattatggtcaactggacattttcccggcccgcgacacttatcacccgatgagtgagtacccgacttaccacacacacgggagatacgtgcccccatcctctacagacagaagtccttatgagaaagtgtccgctggtaatggcggttccagtctcagttatacgaatcctgccgtcgctgctaccagcgcaaatctatag

SEQ ID NO: 81119 - DNA, 1686 bp, Artificial Sequence
  derived and/or modified sequence
atgaccccgggaacgcagagtcctttcttccttctcctgcttctgacggtgctgacagtagttaccgggagtggccatgctagcagcacacctggcggcgagaaagagacaagtgcaacacagcggagctctgtacccagcagcaccgaaaaaaatgccgtgtccatgaccagtagcgtgctgagctctcacagccctggcagcggatctagcactactcaagggcaggatgttaccctggctcccgcgaccgagcccgcctctggtagcgccgctacctggggacaggacgtcacgtccgtcccagtgacgcgacccgccctgggcagcacaactcctcccgctcatgatgtaacgagtgcccctgatacacggcctgcgccggggagtaccgcccccccagcccatggggtcacctctgcacctgatacgcgccctgcgcccgggtccactgcccctcctgcacacggagtgacgtctgccccagatacacgaccagctcccggatccactgccccacctgcccatggcgttacatctgcaccagatacccggccagctccgggaagcactgcccctcccgcacacggggttacatcagcaccagataccaggcgcgctccaggttcaactcccgcccctgggagcactgccccgccagcccatggggttacctctgcaccggacacccgccccgccccagggtctacagctccccccgcgcatggggtgacgtcggccccagacaacagaccagccctgggatcgacggcaccgcccgtgcataatgtgaccagtgcaagcggctcggcctccggttctgcctctacactggtgcataacggcacctccgcacgcgctaccacgactcccgcgtcaaaaagcacaccattctcgatcccctcccatcactcggacacccccaccactctggcctcacacagcactaagaccgacgcctcctcaacacaccatagcaccgtgcctcctcttactagttctaatcattcaacctccccgcaactctccaccggggtgagctttttcttcctaagctttcacatctccaacttgcagtttaacagctctttggaggatccctcaacagattactaccaggaacttcagagagatattagtgaaatgttcctccagatctataaacaggggggcttcttgggcctctctaacattaagtttaggcccgggtccgtggtggtacagctgacattggctttcagggagggtactattaatgtgcatgatgtcgagactcaatttaaccagtacaaaaccgaggccgccagtcggtataatttgaccatctcagacgtgtcagtaagcgatgtgccgtttcccttttctgcacagagtggcgcaggagttcccggctggggcattgctctgcttgtgcttgtttgcgtcctggtcgcgcttgctattgtgtatctcattgcgctggctgtgtgtcagtgcaggagaaagaattatgggcagctcgatatattccctgctagagatacgtaccaccccatgtcagaatatccaacctatcatacccacgggcgatacgtgcctccaagttccaccgaccggagcccgtatgagaaggtgagcgctgggaacgggggctcatcgctcagctacacgaaccctgcagtagcagccacctccgccaatttatag

SEQ ID NO: 81120 - DNA, 1428 bp, Artificial Sequence
  derived and/or modified sequence
atgaccccaggcacccagagccccttcttcctgctgctgctgctgactgtgctgactgtggtgacaggcagcggccacgccagcagcaccccaggaggagagaaggagaccagcgccacccagaggagctctgtgcccagcagcacagagaagaatgctgtgtccatgaccagctctgtgctgagcagccacagccctggcagcggcagcagcaccacccagggccaggatgtgaccctggccccagccacagagcccgccagcggcagcgctgccacctggggccaggatgtgacctctgtgcctgtgaccaggcctgccctgggcagcaccaccccaccagcccatgatgtgaccagcgccccagacaacaagccagcccctggcagcacagcccccccagcccacggcgtgaccagcgccccagacaccaggcctgcccctggcagcacagcccccccagcccacggcgtgaccagcgccccagacaacagacctgccctgggcagcacagcccctcctgtgcacaacgtgaccagcgccagcggcagcgccagcggcagcgccagcaccctggtgcacaacggcaccagcgcccgggccaccaccaccccagccagcaagagcacccccttcagcatccccagccaccacagcgacacccccaccaccctggccagccacagcaccaagacagatgccagcagcacccaccacagcacagtgccccccctgaccagcagcaaccacagcaccagcccccagctgagcactggagtgtccttcttcttcctgtccttccacatcagcaacctgcagttcaacagcagcctggaggaccccagcacagactactaccaggagctgcagagggacatcagcgagatgttcctgcagatctacaagcagggcggcttcctgggcctgagcaacatcaagttccggcccggctctgtggtggtgcagctgaccctggccttccgggagggcaccatcaacgtgcatgatgtggagacccagttcaaccagtacaagacagaggccgccagccgctacaacctgaccatcagtgatgtgtctgtgtctgatgtgcccttccccttcagcgcccagagcggggccggcgtgcccggctggggcatcgccctgctggtgctggtgtgtgtgctggtggccctggccatcgtgtacctgattgccctggccgtgtgccagtgcaggaggaagaactacggccagctggacatcttccctgcccgggacacctaccaccccatgtctgagtaccccacctaccacacccacggccgctacgtgccccccagcagcacagacaggagcccctatgagaaggtgtctgctggaaatggaggcagcagcctgagctacaccaacccagctgtggccgccaccagcgccaacctgtag

SEQ ID NO: 81121 - DNA, 1686 bp, Artificial Sequence
  derived and/or modified sequence
atgaccccaggcacccagagccccttcttcctgctgctgctgctgactgtgctgactgtggtgacaggcagcggccacgccagcagcaccccaggaggagagaaggagaccagcgccacccagaggagctctgtgcccagcagcacagagaagaatgctgtgtccatgaccagctctgtgctgagcagccacagccctggcagcggcagcagcaccacccagggccaggatgtgaccctggccccagccacagagcccgccagcggcagcgctgccacctggggccaggatgtgacctctgtgcctgtgaccaggcctgccctgggcagcaccaccccaccagcccatgatgtgaccagcgccccagacaccaggcctgcccctggcagcacagcccccccagcccacggcgtgaccagcgccccagacaccaggcctgcccctggcagcacagcccccccagcccacggcgtgaccagcgccccagacaccaggcctgcccctggcagcacagcccccccagcccacggcgtgaccagcgccccagacaccaggcctgcccctggcagcacagcccccccagcccacggcgtgaccagcgccccagacacccggcgggcccctggcagcaccccagcccctggcagcacagcccccccagcccacggcgtgaccagcgccccagacaccaggcctgcccctggcagcacagcccccccagcccacggcgtgaccagcgccccagacaacagacctgccctgggcagcacagcccctcctgtgcacaacgtgaccagcgccagcggcagcgccagcggcagcgccagcaccctggtgcacaacggcaccagcgcccgggccaccaccaccccagccagcaagagcacccccttcagcatccccagccaccacagcgacacccccaccaccctggccagccacagcaccaagacagatgccagcagcacccaccacagcacagtgccccccctgaccagcagcaaccacagcaccagcccccagctgagcactggagtgtccttcttcttcctgtccttccacatcagcaacctgcagttcaacagcagcctggaggaccccagcacagactactaccaggagctgcagagggacatcagcgagatgttcctgcagatctacaagcagggcggcttcctgggcctgagcaacatcaagttccggcccggctctgtggtggtgcagctgaccctggccttccgggagggcaccatcaacgtgcatgatgtggagacccagttcaaccagtacaagacagaggccgccagccgctacaacctgaccatcagtgatgtgtctgtgtctgatgtgcccttccccttcagcgcccagagcggggccggcgtgcccggctggggcatcgccctgctggtgctggtgtgtgtgctggtggccctggccatcgtgtacctgattgccctggccgtgtgccagtgcaggaggaagaactacggccagctggacatcttccctgcccgggacacctaccaccccatgtctgagtaccccacctaccacacccacggccgctacgtgccccccagcagcacagacaggagcccctatgagaaggtgtctgctggaaatggaggcagcagcctgagctacaccaacccagctgtggccgccaccagcgccaacctgtag

SEQ ID NO: 81122 - DNA, 1428 bp, Artificial Sequence
  derived and/or modified sequence
atgacccccggcacccagagccccttcttcctgctgctgctgctgactgttttgacggtggttacgggttctgggcacgcctcttctacgcccggaggtgagaaggaaacgtccgccacccaaagatcctccgttccctcgtccactgagaagaatgcagtgagcatgacaagttccgtgctctcgtctcactctcccgggagtggcagtagtaccactcaaggacaggatgtcacgctcgcacccgccaccgagccagccagcggtagtgccgccacctggggccaggatgttacctctgtgcccgttacacggccagccctcgggagcacgacacctcccgcccatgacgtcacgtccgcccccgacaataagcctgcgccgggctcaacagcccctcccgcacacggagtgaccagtgctcccgataccaggcctgcgcctggttctacagccccgccagcccacggagtaacgagcgcgcctgataaccgtcccgccctcggatctaccgccccccccgttcataacgttacatcggcgagcggtagcgcctctggcagcgcctctacccttgtgcacaacgggacatccgcccgcgccaccaccacacctgcgagcaaatcgaccccgttctctattcctagccatcattccgacacaccgaccacactggctagccattccactaaaacagacgcctcttcgactcatcattccacagttcctccgctgacctctagtaaccacagtacctccccgcagctatccacaggggtttctttctttttcctcagttttcatatcagtaatctgcagtttaactcgtctctggaggatcctagtacagattattatcaagaactccagcgtgatatctctgagatgttcctacagatatataagcaaggcgggtttcttggcctgtccaacattaagtttcgtccgggctctgtcgttgttcagctgacccttgccttcagggaggggaccattaatgttcatgatgtcgaaacccagttcaatcagtataagaccgaagccgctagccggtataacctgacaatctctgatgtgtcagtgagcgatgtccctttccctttttcagcccagagtggtgcgggggtgccaggatggggtatcgccctcctggtcctagtttgtgtgctagtggccctggcgatcgtctacctgattgccctagctgtttgtcagtgccgccgtaagaattacgggcagctggatatctttccagcgcgtgatacctaccacccgatgagcgagtatccaacatatcatacccatggccgctatgttccccccagtagcacagataggtccccatatgaaaaagtgagtgcgggcaacggagggagtagcctgagctataccaatccagcagtggctgctacttctgcgaacctatag

SEQ ID NO: 81123 - DNA, 1686 bp, Artificial Sequence
  derived and/or modified sequence
atgacccccggcacccagagccccttcttcctgctgctgctgctgacagtgctgaccgtggtgacgggcagtggtcacgcctctagcacccccggtggcgagaaagaaacctccgcaacacagcggtctagtgtgccttcctctaccgaaaagaacgccgtaagtatgacaagctccgtccttagctctcactcaccaggcagtggctcgtcaacgactcaaggccaggatgtgacactggccccggccacagaaccagcgtctggaagcgcggccacatgggggcaagatgtaacctccgtcccagttacccgaccagctttaggatcaaccactccccccgcacatgacgttacatcagctccagatacacggccggcacctggctctacagcgccgccggctcatggcgtgacctcggctcccgataccaggcccgcccccgggagcacagccccacccgcccacggagtaacatcagcccccgatacgaggccagcacccggctctacggcgccccccgctcatggagtcacgtcagcccccgacaccagaccagccccgggatccacagctccccctgcccacggggtgacttccgcgcccgacacaaggagagcacccgggagtacccctgcgccaggttccacagcgcctcccgcccacggagtgacctcggctcctgacacccggcccgcccctggctcaaccgcacctcctgctcacggcgtcaccagcgccccagacaatcgtcctgcgttgggcagtacagctcctcccgtgcataacgttacatcagcctcaggtagcgcttcaggatccgctagtaccctggtacacaacgggacatcagcccgcgcgactaccacacccgcatctaagtctaccccattttctattccctcccatcactcggacacaccaaccactctggccagccactcgacaaagaccgatgctagcagtacacaccactccaccgtcccaccactgacaagctcaaatcattccacctccccacagttgagcactggagtttcattcttttttctgagtttccacatcagcaatctgcagttcaacagtagtctggaagaccccagtaccgactactatcaagaacttcagcgggatatctctgagatgtttctgcagatttacaaacagggaggttttcttgggctgagcaacatcaaatttagacctggaagcgttgtggtgcaactgacattagcatttcgcgaggggactatcaatgtgcatgacgtcgagacgcagtttaaccagtataaaaccgaggctgccagcaggtacaatctgaccatctcagatgtttccgtatccgatgtgccttttccgttttccgcccagagtggcgccggcgttccagggtgggggatcgccctgctggtcctggtatgtgtcttggtcgccttagcaattgtatacttaatcgcgctggccgtctgtcagtgccgtcggaagaactatggacagctggacatctttccagcccgcgatacatatcatcccatgagtgaatacccgacctatcacacccacggaaggtacgtgccaccctcctccaccgatcgctctccctatgaaaaggtgagcgcaggtaacggggggtcttcactgtcatatactaatcccgccgtggccgcaacttctgccaacctgtag

SEQ ID NO: 81124 - DNA, 1811 bp, Artificial Sequence
  derived and/or modified sequence
cgctccacctctcaagcagccagcgcctgcctgaatctgttctgccccctccccacccatttcaccaccaccatgacaccgggcacccagtctcctttcttcctgctgctgctcctcacagtgcttacagttgttacgggttctggtcatgcaagctctaccccaggtggagaaaaggagacttcggctacccagagaagttcagtgcccagctctactgagaagaatgctgtgagtatgaccagcagcgtactctccagccacagccccggttcaggctcctccaccactcagggacaggatgtcactctggccccggccacggaaccagcttcaggttcagctgccacctggggacaggatgtcacctcggtcccagtcaccaggccagccctgggctccaccaccccgccagcccacgatgtcacctcagccccggacaacaagccagccccgggctccaccgcccccccagcccacggtgtcacctcggccccggacaccaggccggccccgggctccaccgcccccccagcccatggtgtcacctcggccccggacaacaggcccgccttgggctccaccgcccctccagtccacaatgtcacctcggcctcaggctctgcatcaggctcagcttctactctggtgcacaacggcacctctgccagggctaccacaaccccagccagcaagagcactccattctcaattcccagccaccactctgatactcctaccacccttgccagccatagcaccaagactgatgccagtagcactcaccatagcacggtacctcctctcacctcctccaatcacagcacttctccccagttgtctactggggtctctttctttttcctgtcttttcacatttcaaacctccagtttaattcctctctggaagatcccagcaccgactactaccaagagctgcagagagacatttctgaaatgtttttgcagatttataaacaagggggttttctgggcctctccaatattaagttcaggccaggatctgtggtggtacaattgactctggccttccgagaaggtaccatcaatgtccacgacgtggagacacagttcaatcagtataaaacggaagcagcctctcgatataacctgacgatctcagacgtcagcgtgagtgatgtgccatttcctttctctgcccagtctggggctggggtgccaggctggggcatcgcgctgctggtgctggtctgtgttctggttgcgctggccattgtctatctcattgccttggctgtctgtcagtgccgccgaaagaactacgggcagctggacatctttccagcccgggatacctaccatcctatgagcgagtaccccacctaccacacccatgggcgctatgtgccccctagcagtaccgatcgtagcccctatgagaaggtttctgcaggtaatggtggcagcagcctctcttacacaaacccagcagtggcagccacttctgccaacttgtaggggcacgtcgcccgctgagctgagtggccagccagtgccattccactccactcaggttcttcagggccagagcccctgcaccctgtttgggctggtgagctgggagttcaggtgggctgctcacagcctccttcagaggccccaccaatttctcggacacttctcagtgtgtggaagctcatgtgggcccctgagggctcatgcctgggaagtgttgtggtgggggctcccaggaggactggcccagagagccctgagatagcggggatcctgaactggactgaataaaacgtggtctcccactgcgccaa

SEQ ID NO: 81125 - DNA, 1923 bp, Artificial Sequence
  derived and/or modified sequence
acctctcaagcagccagcgcctgcctgaatctgttctgccccctccccacccatttcaccaccaccatgacaccgggcacccagtctcctttcttcctgctgctgctcctcacagtgcttacagttgttacgggttctggtcatgcaagctctaccccaggtggagaaaaggagacttcggctacccagagaagttcagtgcccagctctactgagaagaatgctgtgagtatgaccagcagcgtactctccagccacagccccggttcaggctcctccaccactcagggacaggatgtcactctggccccggccacggaaccagcttcaggttcagctgccacctggggacaggatgtcacctcggtcccagtcaccaggccagccctgggctccaccaccccgccagcccacgatgtcacctcggccccggacaccaggccggccccgggctccaccgcccccccagcccacggtgtcacctcggccccggacaccaggccggccccgggctccaccgcccccccagcccacggtgtcacctcggccccggacaccaggccggccccgggctccaccgcccccccagcccacggtgtcacctcggccccggacaccaggccggccccgggctccaccgcacccccagcccacggtgtcacctcggccccggacaccaggcgggccccgggctccaccccggccccgggctccaccgcccccccagcccacggtgtcacctcggccccggacaccaggccggccccgggctccaccgcccccccagcccatggtgtcacctcggccccggacaacaggcccgccttgggctccaccgcccctccagtccacaatgtcacctcggcctcaggctctgcatcaggctcagcttctactctggtgcacaacggcacctctgccagggctaccacaaccccagccagcaagagcactccattctcaattcccagccaccactctgatactcctaccacccttgccagccatagcaccaagactgatgccagtagcactcaccatagcacggtacctcctctcacctcctccaatcacagcacttctccccagttgtctactggggtctctttctttttcctgtcttttcacatttcaaacctccagtttaattcctctctggaagatcccagcaccgactactaccaagagctgcagagagacatttctgaaatgtttttgcagatttataaacaagggggttttctgggcctctccaatattaagttcaggccaggatctgtggtggtacaattgactctggccttccgagaaggtaccatcaatgtccacgacgtggagacacagttcaatcagtataaaacggaagcagcctctcgatataacctgacgatctcagacgtcagcgtgagtgatgtgccatttcctttctctgcccagtctggggctggggtgccaggctggggcatcgcgctgctggtgctggtctgtgttctggttgcgctggccattgtctatctcattgccttggctgtctgtcagtgccgccgaaagaactacgggcagctggacatctttccagcccgggatacctaccatcctatgagcgagtaccccacctaccacacccatgggcgctatgtgccccctagcagtaccgatcgtagcccctatgagaaggtttctgcaggtaatggtggcagcagcctctcttacacaaacccagcagtggcagccacttctgccaacttgtaggggcacgtcgcccgctgagctgagtggccagccagtgccattccactccactcaggttcttcagggccagagcccctgcaccctgtttgggctggtgagctgggagttcaggtgggctgctcacagcctccttcagaggccccaccaatttctcggacacttctcagtgtg

SEQ ID NO: 81126 - DNA, 1428 bp, Artificial Sequence
  derived and/or modified sequence
atgacacccggaacacagtcaccatttttcctgttgcttctgttgacagtcctcaccgtggtgacagggagcggccacgcaagttctacccccggaggagaaaaggaaacctctgcaacacagcgatcatcggtgccgtcaagtaccgagaaaaacgccgtgtccatgacctcaagcgtattatctagccacagccccggaagtggctcgtcgaccacccaaggccaggatgtgaccctggcgcctgctaccgagcccgcatcagggtcagccgctacgtggggacaagacgtcaccagcgtgcccgtcacaaggccagcccttggctctacaacgccgcctgctcatgatgtgacttccgccccagacaataagcccgctcctggcagtactgcgccacctgctcacggcgtcacctccgcaccagacacccggcctgcacccggttctacagctcccccagcccatggagtgacgtcggctcccgacaaccgccctgcccttggctcaaccgccccaccggttcacaacgtcaccagcgccagcggtagcgccagtggtagtgcttccacccttgtccacaacggcacttccgctcgagctacgactacgccagcatctaagagcaccccattctccatcccctctcatcacagcgacaccccaactacactcgcaagccattccacaaagacggacgcctcaagcactcaccacagcacggtgccccctctaacctcctcaaaccattccaccagcccccaactctcaactggtgtgagctttttctttctgtctttccacattagcaacctgcaatttaatagcagcctcgaggatcccagtaccgactattaccaggaattacagcgagacatcagcgagatgtttctgcaaatctacaagcagggaggatttctcggattgagcaatatcaaatttagacctggttccgttgttgtgcaactcactctcgcttttcgggaagggacgattaatgtgcatgacgtggagactcagttcaatcagtacaaaaccgaggccgcatctagatacaacctcaccattagtgatgtcagtgtgtctgacgtaccatttccattttctgctcagagcggagctggggtccccggatggggcattgccttacttgtcctcgtgtgtgttctggtcgctctggccatcgtatatcttatcgccctggctgtctgccaatgcagacggaaaaactacggtcagctggatattttccccgcaagggacacatatcaccctatgtctgaatacccaacctatcacacgcacggacgatatgtgccccctagctcaacagacagatcaccgtacgagaaggtcagcgccggaaatgggggatcatctctgagttacacaaatcccgctgttgccgctacatctgcaaacctgtag

SEQ ID NO: 81127 - DNA, 1686 bp, Artificial Sequence
  derived and/or modified sequence
atgacacctggcacccagagcccctttttcctccttctcctgctcacagtactcaccgtcgtgaccggctctggccacgctagctctactcctggtggtgaaaaagaaacaagcgcaacccaaagaagcagtgtgccatcatctaccgagaagaatgctgttagcatgactagcagtgtactgagtagccatagccccggatctgggagctcaaccacccaggggcaagatgttacgctcgccccagccacagaacccgcaagcggcagcgccgctacttgggggcaagacgtgaccagcgtcccagtgacaagaccagccttgggctctactacaccacctgcgcatgatgtaacgtcagcacccgacacaagacctgcccctggctcgactgcacctcccgctcacggggtaacaagcgccccagacacccgccctgcacctggttccaccgccccacctgcccatggggttacctcagcccctgatactaggcctgcgccaggatcgactgcgccacctgctcacggcgtgactagcgcgcctgatacgagaccagccccagggagcaccgcccctcccgctcatggagttacaagtgcccctgatactagaagagcaccagggtcaacccccgcaccaggatctacagctccaccggctcacggcgtcacgtccgcccctgatacccgaccagctccaggttctaccgctcccccagcccacggagtgacctcggctccagacaatagacccgcactcggctcaacagctccgccagtccacaatgtaacttccgcttcagggagcgccagtggaagtgcgtccacactggtccataacggaacatcagccagagccactacgacgcccgcaagcaaatcaaccccttttagcattccgagccaccactctgatacaccaactaccctggccagccatagcacaaaaaccgatgccagctcaactcatcatagcaccgttcctcccctaacgtcatccaatcattccacctccccccagctctcaactggagtgtcctttttttttctaagttttcacatatcaaatcttcaatttaattctagcctggaagacccctccacggattattaccaagagctccagcgcgatatatcagaaatgttcctccaaatctacaagcagggtggattcctgggcctcagtaacatcaagtttagacctggctctgtcgtcgttcagctaacactggctttccgagagggcacaataaacgtacacgacgtcgaaactcagttcaatcagtacaaaacggaggcggcatctcggtataatttgaccatctctgacgtctccgtatccgacgtcccattcccgtttagtgcccagagcggtgccggtgttcccggttgggggattgccctactcgtgctcgtttgcgtcctggtggcacttgctatagtttacctgatcgctttagccgtctgtcaatgcagaagaaagaattatggtcaattggatatatttcctgcccgagatacataccaccctatgagcgagtaccccacctaccatacacatggcaggtatgtgcctccttcctcaacggaccggagcccttacgaaaaggtgagcgctgggaatgggggatcatccctttcttatacaaatccagctgttgcagcaacttctgcaaacctgtag

SEQ ID NO: 81128 - protein, 224 aa, Artificial Sequence
  derived and/or modified sequence
MTPGTQSPFFLLLLLTVLTATTAPKPATVVTGSGHASSTPGGEKETSATQRSSVPSSTEKNAFRPGSVVVQLTLAFREGTINVHDVETQFNQYKTEAASRYNLTISDVSVSDVPFPFSAQSGAGVPGWGIALLVLVCVLVALAIVYLIALAVCQCRRKNYGQLDIFPARDTYHPMSEYPTYHTHGRYVPPSSTDRSPYEKVSAGNGGSSLSYTNPAVAATSANL

SEQ ID NO: 81129 - protein, 229 aa, Artificial Sequence
  derived and/or modified sequence
MTPGTQSPFFLLLLLTVLTVVTGSGHASSTPGGEKETSATQRSSVPSSTEKNAIYKQGGFLGLSNIKFRPGSVVVQLTLAFREGTINVHDVETQFNQYKTEAASRYNLTISDVSVSDVPFPFSAQSGAGVPGWGIALLVLVCVLVALAIVYLIALAVCQCRRKNYGQLDIFPARDTYHPMSEYPTYHTHGRYVPPSSTDRSPYEKVSAGNGGSSLSYTNPAVAATSANL

SEQ ID NO: 81130 - DNA, 675 bp, Artificial Sequence
  derived and/or modified sequence
atgacccccggcacccagagccccttcttcctgctgctgctgctgaccgtgctgaccgccaccaccgcccccaagcccgccaccgtggtgaccggcagcggccacgccagcagcacccccggcggcgagaaggagaccagcgccacccagagaagcagcgtgcccagcagcaccgagaagaacgccttcagacccggcagcgtggtggtgcagctgaccctggccttcagagagggcaccatcaacgtgcacgacgtggagacccagttcaaccagtacaagaccgaggccgccagcagatacaacctgaccatcagcgacgtgagcgtgagcgacgtgcccttccccttcagcgcccagagcggcgccggcgtgcccggctggggcatcgccctgctggtgctggtgtgcgtgctggtggccctggccatcgtgtacctgatcgccctggccgtgtgccagtgcagaagaaagaactacggccagctggacatcttccccgccagagacacctaccaccccatgagcgagtaccccacctaccacacccacggcagatacgtgccccccagcagcaccgacagaagcccctacgagaaggtgagcgccggcaacggcggcagcagcctgagctacaccaaccccgccgtggccgccaccagcgccaacctgtag

SEQ ID NO: 81131 - DNA, 690 bp, Artificial Sequence
  derived and/or modified sequence
atgacccccggcacccagagccccttcttcctgctgctgctgctgaccgtgctgaccgtggtgaccggcagcggccacgccagcagcacccccggcggcgagaaggagaccagcgccacccagagaagcagcgtgcccagcagcaccgagaagaacgccatctacaagcagggcggcttcctgggcctgagcaacatcaagttcagacccggcagcgtggtggtgcagctgaccctggccttcagagagggcaccatcaacgtgcacgacgtggagacccagttcaaccagtacaagaccgaggccgccagcagatacaacctgaccatcagcgacgtgagcgtgagcgacgtgcccttccccttcagcgcccagagcggcgccggcgtgcccggctggggcatcgccctgctggtgctggtgtgcgtgctggtggccctggccatcgtgtacctgatcgccctggccgtgtgccagtgcagaagaaagaactacggccagctggacatcttccccgccagagacacctaccaccccatgagcgagtaccccacctaccacacccacggcagatacgtgccccccagcagcaccgacagaagcccctacgagaaggtgagcgccggcaacggcggcagcagcctgagctacaccaaccccgccgtggccgccaccagcgccaacctgtag

SEQ ID NO: 81132 - DNA, 675 bp, Artificial Sequence
  derived and/or modified sequence
atgacacccggcacacagagtccattctttctgctgctcctactaacagtgcttaccgccaccacagctcctaaaccggctactgtggtgaccggtagtgggcacgcgtcaagtacaccaggcggagagaaagagacctccgcaacacaacgatcaagtgtgccgtccagtaccgagaagaacgcctttcggcctggaagcgttgtagtccagctcaccctggctttcagggagggcacaattaacgttcacgacgtggaaacacaattcaatcagtataaaacagaggccgcctcaagatacaacctcactatatctgatgtctcagtgagtgacgtaccctttccttttagcgcccagagtggagctggagttccgggctggggaatagccttacttgtgctcgtatgtgtgctcgttgccctggccatagtctacctgatagccttagctgtttgtcaatgccgaaggaagaattatgggcagctagacatttttcccgcgagggatacataccacccaatgtctgagtatcccacttatcatactcatggaagatatgtgccccccagttctaccgataggagcccatacgagaaagtcagtgcggggaatggcggttctagcttaagttatacgaaccccgcagtggccgccacctcagccaacctgtag

SEQ ID NO: 81133 - DNA, 690 bp, Artificial Sequence
  derived and/or modified sequence
atgacacctggaactcagtcccctttcttccttttgctattactcaccgtcctgaccgtggttaccgggtccgggcatgcgagcagcaccccaggtggggagaaggagacgagcgcgactcaaaggtctagtgttcctagtagcactgagaaaaacgctatttacaaacagggaggatttctgggtctcagtaacatcaaattcagacccggcagtgtggtagtgcagctgaccttagccttcagggaggggacaatcaacgtgcacgacgtggagacacaattcaatcagtacaagacagaggcagctagtagatacaatctaactatctccgatgtgtcagtgagtgatgtgccctttccctttagcgcccaaagcggagcgggcgtacccggttggggaatcgccctgctggtcctggtgtgcgtcctcgtggctcttgcgattgtgtatttaattgcactcgccgtctgccagtgccggcggaaaaattatggccagcttgacatcttcccagcaagggacacgtaccaccctatgagcgagtacccaacgtaccatacgcacggccggtacgtgcccccatccagcaccgaccgtagcccatacgagaaggtgagcgccggcaacgggggcagtagtctcagctacacgaaccccgccgtggccgcaacctcggcgaacctgtag

SEQ ID NO: 81134 - DNA, 675 bp, Artificial Sequence
  derived and/or modified sequence
atgaccccaggcacccagagccccttcttcctgctgctgctgctgactgtgctgacagccaccacagcccccaagccagccaccgtggtgactggaagtggccacgccagcagcaccccaggaggagagaaggagaccagcgccacccagaggagctctgtgcccagcagcacagagaagaatgccttccggcccggctctgtggtggtgcagctgaccctggccttccgggagggcaccatcaacgtgcatgatgtggagacccagttcaaccagtacaagacagaagctgccagccgctacaacctgaccatcagtgatgtgtctgtgtctgatgtgcccttccccttcagcgcccagagcggggccggcgtgcccggctggggcatcgccctgctggtgctggtgtgtgtgctggtggccctggccatcgtgtacctgattgccctggccgtgtgccagtgcaggaggaagaactacggccagctggacatcttccctgcccgggacacctaccaccccatgtctgagtaccccacctaccacacccacggccgctacgtgccccccagcagcacagacaggagcccctatgagaaggtgtctgctggaaatggaggcagcagcctgagctacaccaacccagctgtggccgccaccagcgccaacctgtag

SEQ ID NO: 81135 - DNA, 690 bp, Artificial Sequence
  derived and/or modified sequence
atgaccccaggcacccagagccccttcttcctgctgctgctgctgactgtgctgactgtggtgacaggcagcggccacgccagcagcaccccaggaggagagaaggagaccagcgccacccagaggagctctgtgcccagcagcacagagaagaatgccatctacaagcagggcggcttcctgggcctgagcaacatcaagttccggcccggctctgtggtggtgcagctgaccctggccttccgggagggcaccatcaacgtgcatgatgtggagacccagttcaaccagtacaagacagaggccgccagccgctacaacctgaccatcagtgatgtgtctgtgtctgatgtgcccttccccttcagcgcccagagcggggccggcgtgcccggctggggcatcgccctgctggtgctggtgtgtgtgctggtggccctggccatcgtgtacctgattgccctggccgtgtgccagtgcaggaggaagaactacggccagctggacatcttccctgcccgggacacctaccaccccatgtctgagtaccccacctaccacacccacggccgctacgtgccccccagcagcacagacaggagcccctatgagaaggtgtctgctggaaatggaggcagcagcctgagctacaccaacccagctgtggccgccaccagcgccaacctgtag

SEQ ID NO: 81136 - DNA, 675 bp, Artificial Sequence
  derived and/or modified sequence
atgacccccggcacccagagccccttcttcctgctgctgctgctgaccgtgctgaccgccaccaccgccccgaaacccgctacagtggtgaccggctccgggcatgccagctccacccctgggggcgagaaagaaacaagtgccacacagcgctcttccgttccaagttctaccgaaaagaacgccttccgccctggaagcgtggtagtgcaattgactctggcgtttagggaggggaccattaatgtgcacgatgttgagacccagttcaatcagtataagacggaagccgcttctaggtacaacttgacaatatccgacgtatccgtgtctgatgtgccctttcctttcagtgcccagagtggtgccggggtcccgggctggggaatcgccttgctggtgctagtctgcgtgttggtggcactggcaatagtctatctgattgccttggctgtctgtcaatgtcggcggaagaattatggccagctggatatattcccagccagagacacatatcatccgatgtccgagtaccctacataccacacacatggccgctacgtgccccctagctccacggatcgtagtccttatgaaaaggtgtcggctggaaacggcggcagctctctgagctacacaaaccctgccgtggccgccacaagtgcaaatctttag

SEQ ID NO: 81137 - DNA, 690 bp, Artificial Sequence
  derived and/or modified sequence
atgacccccggcacccagagccccttcttcctgctgctgctgctgaccgttctgacggtcgttaccggatctggccacgcctcttcaactcctggcggggagaaggagacttcagccacccagcggagctctgtaccaagttctacggagaaaaatgccatttataaacaaggagggttcttggggttatccaacattaagtttcgaccgggctctgtcgtggttcagttgactctggctttccgggagggaacaataaacgtgcatgacgtcgagacccagtttaatcaatataaaaccgaagccgcctctaggtacaatctgacaatctcggacgtgtcggttagcgacgtcccgtttccattctctgctcagtctggggctggagtgccagggtggggcatcgcactgctcgtccttgtgtgtgtgcttgtggccttggccatagtctatttaatcgccctagcagtgtgccaatgcaggcgaaagaactacgggcagctcgacatctttcccgcacgagatacataccacccaatgagcgaataccccacgtaccatacacacggaaggtatgtgcccccgtctagtactgatcggagtccttacgagaaggtgagtgcggggaacggtgggtcatcactctcctacacaaaccccgccgtggctgcgacatccgctaatctgtag

SEQ ID NO: 81138 - DNA, 1050 bp, Artificial Sequence
  derived and/or modified sequence
acctctcaagcagccagcgcctgcctgaatctgttctgccccctccccacccatttcaccaccaccatgacaccgggcacccagtctcctttcttcctgctgctgctcctcacagtgcttacagctaccacagcccctaaacccgcaacagttgttacgggttctggtcatgcaagctctaccccaggtggagaaaaggagacttcggctacccagagaagttcagtgcccagctctactgagaagaatgctttcaggccaggatctgtggtggtacaattgactctggccttccgagaaggtaccatcaatgtccacgacgtggagacacagttcaatcagtataaaacggaagcagcctctcgatataacctgacgatctcagacgtcagcgtgagtgatgtgccatttcctttctctgcccagtctggggctggggtgccaggctggggcatcgcgctgctggtgctggtctgtgttctggttgcgctggccattgtctatctcattgccttggctgtctgtcagtgccgccgaaagaactacgggcagctggacatctttccagcccgggatacctaccatcctatgagcgagtaccccacctaccacacccatgggcgctatgtgccccctagcagtaccgatcgtagcccctatgagaaggtttctgcaggtaatggtggcagcagcctctcttacacaaacccagcagtggcagccacttctgccaacttgtaggggcacgtcgcccgctgagctgagtggccagccagtgccattccactccactcaggttcttcagggccagagcccctgcaccctgtttgggctggtgagctgggagttcaggtgggctgctcacagcctccttcagaggccccaccaatttctcggacacttctcagtgtgtggaagctcatgtgggcccctgagggctcatgcctgggaagtgttgtggtgggggctcccaggaggactggcccagagagccctgagatagcggggatcctgaactggactgaataaaacgtggtctcccactgcgcc

SEQ ID NO: 81139 - DNA, 927 bp, Artificial Sequence
  derived and/or modified sequence
gcgcctgcctgaatctgttctgccccctccccacccatttcaccaccaccatgacaccgggcacccagtctcctttcttcctgctgctgctcctcacagtgcttacagttgttacgggttctggtcatgcaagctctaccccaggtggagaaaaggagacttcggctacccagagaagttcagtgcccagctctactgagaagaatgctatttataaacaagggggttttctgggcctctccaatattaagttcaggccaggatctgtggtggtacaattgactctggccttccgagaaggtaccatcaatgtccacgacgtggagacacagttcaatcagtataaaacggaagcagcctctcgatataacctgacgatctcagacgtcagcgtgagtgatgtgccatttcctttctctgcccagtctggggctggggtgccaggctggggcatcgcgctgctggtgctggtctgtgttctggttgcgctggccattgtctatctcattgccttggctgtctgtcagtgccgccgaaagaactacgggcagctggacatctttccagcccgggatacctaccatcctatgagcgagtaccccacctaccacacccatgggcgctatgtgccccctagcagtaccgatcgtagcccctatgagaaggtttctgcaggtaatggtggcagcagcctctcttacacaaacccagcagtggcagccacttctgccaacttgtaggggcacgtcgcccgctgagctgagtggccagccagtgccattccactccactcaggttcttcagggccagagcccctgcaccctgtttgggctggtgagctgggagttcaggtgggctgctcacagcctccttcagaggccccaccaatttctcggacacttctcagtgtgtggaagctcatgtggg

SEQ ID NO: 81140 - DNA, 675 bp, Artificial Sequence
  derived and/or modified sequence
atgacccccggtacccagagccctttttttctccttttgctacttaccgttctgaccgccactacagcgcctaaaccagcaactgtggtcactggctctgggcacgctagttcaactcctggtggagaaaaggaaaccagcgcgacgcagaggtcaagcgtcccttcttctaccgagaagaacgcctttaggcccggttccgttgtggtgcagctaacactggctttcagagaggggacaataaacgtccatgacgtggaaactcaatttaatcagtacaagacggaggccgcttcccggtacaacttgactatttccgacgtgtctgttagcgacgtaccgtttcctttcagcgctcagtccggggctggggtccccggttggggaattgctttgctggtccttgtttgcgttctcgtagccctggctatcgtgtacttaatagccctggcggtctgtcagtgcaggaggaaaaattacggccaattagacatcttccctgctcgtgacacttatcaccccatgagtgaatatcctacctaccacactcacggcaggtatgtcccaccatccagcactgaccggtccccttacgaaaaagtcagcgccggtaacgggggatcctccctgtcctatacaaatcccgctgttgccgcaacatctgcgaatctgtag

SEQ ID NO: 81141 - DNA, 690 bp, Artificial Sequence
  derived and/or modified sequence
atgactcctggtacccagagtcccttctttctgctactgctcctgaccgtccttaccgtggttactggatccggacatgcctcatcaactccgggtggggagaaggaaacatcagccacacagcggtcctctgttcccagttctaccgaaaagaacgctatctataaacagggaggattcctcggattaagcaatatcaagttccgcccaggtagcgtcgtggtccagctgactctcgcttttagagaaggtaccatcaacgtacacgacgtcgaaactcaattcaatcagtacaaaaccgaggcggctagccggtacaatctgacaatctctgatgtgagtgtgagtgacgttccctttccttttagcgcccagtccggcgctggtgtgcccggatggggcattgcgcttctggttttggtgtgcgttttggtcgcactcgcgattgtttatttaattgctttggctgtatgccagtgtcggagaaaaaactatggccaactagatatctttccagctcgagatacctatcaccccatgtccgaatacccgacataccatacccatggacggtacgtcccaccatcctcgaccgataggtcaccttacgagaaagtgagcgccggaaacgggggaagttcattgtcctatacgaacccagccgttgccgctacgtccgctaacctgtag

SEQ ID NO: 81142 - protein, 198 aa, Artificial Sequence
  derived and/or modified sequence
MTPGTQSPFFLLLLLTVLTVVTGSGHASSTPGGEKETSATQRSSVPSSTEKNALSTGVSFFFLSFHISNLQFNSSLEDPSTDYYQELQRDISEMFLQIYKQGGFLGLSNIKFRPGSVVVQLTLAFREGTINVHDVETQFNQYKTEAASRYNLTISDVSGCLSVPPKELRAAGHLSSPGYLPSYERVPHLPHPWALCAP

SEQ ID NO: 81143 - DNA, 597 bp, Artificial Sequence
  derived and/or modified sequence
atgacccccggcacccagagccccttcttcctgctgctgctgctgaccgtgctgaccgtggtgaccggcagcggccacgccagcagcacccccggcggcgagaaggagaccagcgccacccagagaagcagcgtgcccagcagcaccgagaagaacgccctgagcaccggcgtgagcttcttcttcctgagcttccacatcagcaacctgcagttcaacagcagcctggaggaccccagcaccgactactaccaggagctgcagagagacatcagcgagatgttcctgcagatctacaagcagggcggcttcctgggcctgagcaacatcaagttcagacccggcagcgtggtggtgcagctgaccctggccttcagagagggcaccatcaacgtgcacgacgtggagacccagttcaaccagtacaagaccgaggccgccagcagatacaacctgaccatcagcgacgtgagcggctgcctgagcgtgccccccaaggagctgagagccgccggccacctgagcagccccggctacctgcccagctacgagagagtgccccacctgccccacccctgggccctgtgcgccccctag

SEQ ID NO: 81144 - DNA, 597 bp, Artificial Sequence
  derived and/or modified sequence
atgacccctggtactcagtccccatttttcttactccttctgctgaccgtgttgacagtggtcaccggcagcggccacgcaagttccacgcccggcggcgaaaaggaaacgagtgcgacccaaaggagttctgttccaagctctacggaaaagaacgctttgagcactggcgtcagttttttcttcctgtcttttcacatcagcaacctgcagtttaattcctctctggaagatcccagtactgattactatcaggaacttcaaagggatatttctgagatgttccttcaaatttataagcagggcggctttctggggctcagtaatatcaagtttagacccggctccgttgtggtacagttgactctcgccttcagagaagggacgattaatgtgcatgatgttgagacgcagttcaatcaatacaagacagaggcagctagtagatacaacttaacgatttcggatgtgagcggttgcctgtctgtcccaccgaaagagctgcgggccgctggccatctgtcctccccgggctacttgccctcctacgaaagggtcccgcacctgccccatccctgggctctgtgtgcgccctag

SEQ ID NO: 81145 - DNA, 597 bp, Artificial Sequence
  derived and/or modified sequence
atgaccccaggcacccagagccccttcttcctgctgctgctgctgactgtgctgactgtggtgacaggcagcggccacgccagcagcaccccaggaggagagaaggagaccagcgccacccagaggagctctgtgcccagcagcacagagaagaatgccctgagcactggagtgtccttcttcttcctgtccttccacatcagcaacctgcagttcaacagcagcctggaggaccccagcacagactactaccaggagctgcagagggacatcagcgagatgttcctgcagatctacaagcagggcggcttcctgggcctgagcaacatcaagttccggcccggctctgtggtggtgcagctgaccctggccttccgggagggcaccatcaacgtgcatgatgtggagacccagttcaaccagtacaagacagaggccgccagccgctacaacctgaccatcagtgatgtgtctggctgcctgtctgtgccccccaaggagctgcgggctgctggccacctgagcagccctggctacctgcccagctatgagcgggtgccccacctgccccacccctgggccctgtgtgccccctag

SEQ ID NO: 81146 - DNA, 597 bp, Artificial Sequence
  derived and/or modified sequence
atgacccccggcacccagagccccttcttcctgctgctgctgctgactgtcctgactgtagtcactgggagtggccacgccagctccacacctggcggagagaaagaaacgtcagcaacacaaagaagctccgtgcccagctcaaccgagaagaacgcactgtcaactggagtgtcattttttttcctctcttttcacatcagcaatctgcagtttaattcttccttggaagatcccagtactgactactaccaggaattgcagagggatatctctgagatgttccttcagatctacaaacagggcggctttcttggactgtcaaatataaagttcaggcctggctccgttgtggtccagctcactcttgcatttagagaagggactatcaacgtgcatgacgtcgagacacagtttaaccagtacaaaactgaagcagccagtagatataacctaacaatcagcgacgtgagtggctgtttgagcgtccctccaaaggaactgcgagccgctgggcacctcagttcaccaggctatctcccatcctatgagagggtcccgcacctgccacacccctgggccctatgtgccccttag

SEQ ID NO: 81147 - DNA, 937 bp, Artificial Sequence
  derived and/or modified sequence
gcgcctgcctgaatctgttctgccccctccccacccatttcaccaccaccatgacaccgggcacccagtctcctttcttcctgctgctgctcctcacagtgcttacagttgttacgggttctggtcatgcaagctctaccccaggtggagaaaaggagacttcggctacccagagaagttcagtgcccagctctactgagaagaatgctttgtctactggggtctctttctttttcctgtcttttcacatttcaaacctccagtttaattcctctctggaagatcccagcaccgactactaccaagagctgcagagagacatttctgaaatgtttttgcagatttataaacaagggggttttctgggcctctccaatattaagttcaggccaggatctgtggtggtacaattgactctggccttccgagaaggtaccatcaatgtccacgacgtggagacacagttcaatcagtataaaacggaagcagcctctcgatataacctgacgatctcagacgtcagcggctgtctgtcagtgccgccgaaagaactacgggcagctggacatctttccagcccgggatacctaccatcctatgagcgagtaccccacctaccacacccatgggcgctatgtgccccctagcagtaccgatcgtagcccctatgagaaggtttctgcaggtaatggtggcagcagcctctcttacacaaacccagcagtggcagccacttctgccaacttgtaggggcacgtcgcccgctgagctgagtggccagccagtgccattccactccactcaggttcttcagggccagagcccctgcaccctgtttgggctggtgagctgggagttcaggtgggctgctcacagcctccttcagaggccccaccaatttctcggacacttctcagtgtgtggaagctcatgtggg

SEQ ID NO: 81148 - DNA, 597 bp, Artificial Sequence
  derived and/or modified sequence
atgacccccggaactcagtccccattctttttactcttgctgctcaccgtgctgaccgtggtaactgggagtggccatgcatctagtactcccggtggggaaaaggaaacatcagcaacccagagatcttccgtccctagcagcaccgagaagaacgctctcagtacgggcgtgagctttttctttctcagcttccatataagcaacctgcagttcaattccagcctggaagatccatctactgactattatcaggaactccaacgtgatatcagcgagatgttcttgcagatatacaaacagggcggttttctaggtctttccaatattaagtttaggccaggcagcgtcgtggtacaactgactctcgctttcagggaaggcaccataaacgtgcatgatgtggaaactcagtttaaccagtataagaccgaagccgcttcccgttacaacctcaccatttccgatgtgagtggctgcttgtccgttcccccaaaggaactgcgggctgcaggccatcttagctctccgggatatctcccatcgtacgaacgggtccctcatctgccacatccatgggccttgtgcgccccatag

SEQ ID NO: 81149 - protein, 230 aa, Artificial Sequence
  derived and/or modified sequence
MTPGTQSPFFLLLLLTVLTVVTGSGHASSTPGGEKETSATQRSSVPSSTEKNAIPAPTTTKSCRETFLKWPGSVVVQLTLAFREGTINVHDVETQFNQYKTEAASRYNLTISDVSVSDVPFPFSAQSGAGVPGWGIALLVLVCVLVALAIVYLIALAVCQCRRKNYGQLDIFPARDTYHPMSEYPTYHTHGRYVPPSSTDRSPYEKVSAGNGGSSLSYTNPAVAATSANL

SEQ ID NO: 81150 - DNA, 693 bp, Artificial Sequence
  derived and/or modified sequence
atgacccccggcacccagagccccttcttcctgctgctgctgctgaccgtgctgaccgtggtgaccggcagcggccacgccagcagcacccccggcggcgagaaggagaccagcgccacccagagaagcagcgtgcccagcagcaccgagaagaacgccatccccgcccccaccaccaccaagagctgcagagagaccttcctgaagtggcccggcagcgtggtggtgcagctgaccctggccttcagagagggcaccatcaacgtgcacgacgtggagacccagttcaaccagtacaagaccgaggccgccagcagatacaacctgaccatcagcgacgtgagcgtgagcgacgtgcccttccccttcagcgcccagagcggcgccggcgtgcccggctggggcatcgccctgctggtgctggtgtgcgtgctggtggccctggccatcgtgtacctgatcgccctggccgtgtgccagtgcagaagaaagaactacggccagctggacatcttccccgccagagacacctaccaccccatgagcgagtaccccacctaccacacccacggcagatacgtgccccccagcagcaccgacagaagcccctacgagaaggtgagcgccggcaacggcggcagcagcctgagctacaccaaccccgccgtggccgccaccagcgccaacctgtag

SEQ ID NO: 81151 - DNA, 693 bp, Artificial Sequence
  derived and/or modified sequence
atgactccgggtactcaaagcccatttttcctcctcctcctgcttacggttttgacagtcgtgactggcagcggccatgcctcctccactcctggtggcgagaaggaaacctcagctacccagcggtccagcgttcctagttcaaccgaaaaaaatgccattccagcacctacgactacaaaaagttgccgagaaacatttctcaagtggcccggcagcgtggtggtgcagttgactctagctttccgcgagggcacaattaacgtgcatgacgtagagacgcagttcaatcagtacaagaccgaggccgcatcccgctacaatctgactatatcagatgtgagcgtgagtgacgttccgttcccctttagcgcgcagagcggggccggcgtgcctgggtggggaatagcattacttgtacttgtatgcgtgcttgtcgctctggcaatcgtctacctgatcgcgctggcagtatgccagtgcaggcgaaagaattacggtcaactggatatcttccccgccagagatacttaccacccgatgtcggaataccccacttatcacacacacggacgctatgtcccaccttcatctactgaccgatccccgtatgagaaggtgtctgcaggaaacggtggttcttcactctcctatacaaaccctgccgtggccgcgactagcgccaacctatag

SEQ ID NO: 81152 - DNA, 693 bp, Artificial Sequence
  derived and/or modified sequence
atgaccccaggcacccagagccccttcttcctgctgctgctgctgactgtgctgactgtggtgacaggcagcggccacgccagcagcaccccaggaggagagaaggagaccagcgccacccagaggagctctgtgcccagcagcacagagaagaatgccatcccagcccccaccaccaccaagagctgccgggagaccttcctgaagtggccaggctctgtggtggtgcagctgaccctggccttccgggagggcaccatcaacgtgcatgatgtggagacccagttcaaccagtacaagacagaagctgccagccgctacaacctgaccatcagtgatgtgtctgtgtctgatgtgcccttccccttcagcgcccagagcggggccggcgtgcccggctggggcatcgccctgctggtgctggtgtgtgtgctggtggccctggccatcgtgtacctgattgccctggccgtgtgccagtgcaggaggaagaactacggccagctggacatcttccctgcccgggacacctaccaccccatgtctgagtaccccacctaccacacccacggccgctacgtgccccccagcagcacagacaggagcccctatgagaaggtgtctgctggaaatggaggcagcagcctgagctacaccaacccagctgtggccgccaccagcgccaacctgtag

SEQ ID NO: 81153 - DNA, 693 bp, Artificial Sequence
  derived and/or modified sequence
atgacccccggcacccagagccccttcttcctgctgctgctgctgactgtgttaacggtcgtgaccggatcaggacacgcttcatctacccccggaggagaaaaagaaacctctgccacgcagcgcagtagcgtgccttcctcaaccgagaaaaatgcaattcccgctcctactactaccaaatcttgtcgtgagacattcctaaagtggccgggctccgtcgtagtgcaactgacactcgcattccgggaaggcaccattaatgtacacgatgtcgaaacccagttcaaccaatataaaaccgaggctgcctctcgttacaacctcacaatctcggacgtttctgtatcagatgtgccattcccgttctctgcccagtctggagctggtgtgcccgggtggggaatcgctctgttggtcctagtgtgcgtactggttgcgctcgccattgtctacctgatcgccctagccgtctgccagtgtagaaggaagaactatggccaactggatatttttcccgctcgagacacgtatcacccaatgagcgagtacccaacataccacacgcacggtaggtacgtgcctcccagtagcaccgatcgatcgccctacgagaaggtgagcgccgggaacggcggctcatccctatcttacacaaatcctgcagtggccgcaacgtcagctaacctatag

SEQ ID NO: 81154 - DNA, 729 bp, Artificial Sequence
  derived and/or modified sequence
ctccccacccatttcaccaccaccatgacaccgggcacccagtctcctttcttcctgctgctgctcctcacagtgcttacagttgttacgggttctggtcatgcaagctctaccccaggtggagaaaaggagacttcggctacccagagaagttcagtgcccagctctactgagaagaatgctatcccagcaccgactactaccaagagctgcagagagacatttctgaaatggccaggatctgtggtggtacaattgactctggccttccgagaaggtaccatcaatgtccacgacgtggagacacagttcaatcagtataaaacggaagcagcctctcgatataacctgacgatctcagacgtcagcgtgagtgatgtgccatttcctttctctgcccagtctggggctggggtgccaggctggggcatcgcgctgctggtgctggtctgtgttctggttgcgctggccattgtctatctcattgccttggctgtctgtcagtgccgccgaaagaactacgggcagctggacatctttccagcccgggatacctaccatcctatgagcgagtaccccacctaccacacccatgggcgctatgtgccccctagcagtaccgatcgtagcccctatgagaaggtttctgcaggtaatggtggcagcagcctctcttacacaaacccagcagtggcagccacttctgccaacttgtaggggcacgtcgcc

SEQ ID NO: 81155 - DNA, 693 bp, Artificial Sequence
  derived and/or modified sequence
atgacccctggtacgcaaagcccattttttttgcttctgctgctcacagtgctgactgtagtgacggggtctgggcacgcctcttctacgcccggaggggaaaaggaaacttctgcaactcagcgtagttccgttccatcctctacagagaaaaatgccattcccgctcccacaacgacaaagagttgcagagaaacgttcctaaagtggcccggaagcgtagttgtgcagctaactctcgcgtttcgagagggcaccataaacgtgcacgatgtcgaaacacagttcaatcagtacaaaacagaggcggcttcaagatataacctgaccatctccgacgtgtcagtaagtgacgtgcccttcccttttagcgctcagtccggagcaggggtgccagggtggggcatcgctctgcttgtgctcgtctgcgtgctggttgccttggccattgtttatcttattgcattagccgtttgccagtgtaggcgcaaaaactatgggcagctggacatattccccgctagggacacataccacccgatgtctgagtaccccacctaccatacccatggccgatatgtgcctcccagctccaccgatcgatccccttacgaaaaggtgagcgccggaaatggcggtagtagcctgtcttatacgaaccctgccgtcgctgccacctctgccaacctctag

SEQ ID NO: 81156 - protein, 166 aa, Artificial Sequence
  derived and/or modified sequence
MTPGTQSPFFLLLLLTVLTATTAPKPATVVTGSGHASSTPGGEKETSATQRSSVPSSTEKNASGAGVPGWGIALLVLVCVLVALAIVYLIALAVCQCRRKNYGQLDIFPARDTYHPMSEYPTYHTHGRYVPPSSTDRSPYEKVSAGNGGSSLSYTNPAVAATSANL

SEQ ID NO: 81157 - DNA, 501 bp, Artificial Sequence
  derived and/or modified sequence
atgacccccggcacccagagccccttcttcctgctgctgctgctgaccgtgctgaccgccaccaccgcccccaagcccgccaccgtggtgaccggcagcggccacgccagcagcacccccggcggcgagaaggagaccagcgccacccagagaagcagcgtgcccagcagcaccgagaagaacgccagcggcgccggcgtgcccggctggggcatcgccctgctggtgctggtgtgcgtgctggtggccctggccatcgtgtacctgatcgccctggccgtgtgccagtgcagaagaaagaactacggccagctggacatcttccccgccagagacacctaccaccccatgagcgagtaccccacctaccacacccacggcagatacgtgccccccagcagcaccgacagaagcccctacgagaaggtgagcgccggcaacggcggcagcagcctgagctacaccaaccccgccgtggccgccaccagcgccaacctgtag

SEQ ID NO: 81158 - DNA, 501 bp, Artificial Sequence
  derived and/or modified sequence
atgactcctggaactcagtcaccttttttccttttgttgctgctcactgtccttacagcgaccacagcaccgaagccagccacagtggtgacaggctccggccatgcatcttctacaccagggggagaaaaagagacgtccgcaacccaacggtcaagcgtgcccagttccactgaaaagaatgcaagcggagcgggtgttcccggatggggaatcgccttactggtgcttgtgtgcgtgctggtcgcactagctatcgtgtatctcatagctctggcagtgtgtcagtgcagaaggaagaattatggccagctggacatctttcccgccagagacacctaccaccccatgtctgagtaccccacctaccacactcatggtcgttatgtcccgccatctagcaccgaccgcagtccatacgaaaaagtgtctgctggcaatgggggtagctccctctcgtatacaaaccccgccgtggccgccacttctgctaacctgtag

SEQ ID NO: 81159 - DNA, 501 bp, Artificial Sequence
  derived and/or modified sequence
atgaccccaggcacccagagccccttcttcctgctgctgctgctgactgtgctgacagccaccacagcccccaagccagccaccgtggtgactggaagtggccacgccagcagcaccccaggaggagagaaggagaccagcgccacccagaggagctctgtgcccagcagcacagagaagaatgccagcggggccggcgtgcccggctggggcatcgccctgctggtgctggtgtgtgtgctggtggccctggccatcgtgtacctgattgccctggccgtgtgccagtgcaggaggaagaactacggccagctggacatcttccctgcccgggacacctaccaccccatgtctgagtaccccacctaccacacccacggccgctacgtgccccccagcagcacagacaggagcccctatgagaaggtgtctgctggaaatggaggcagcagcctgagctacaccaacccagctgtggccgccaccagcgccaacctgtag

SEQ ID NO: 81160 - DNA, 501 bp, Artificial Sequence
  derived and/or modified sequence
atgacccccggcacccagagccccttcttcctgctgctgctgctgaccgttctaacagcaaccacagcccccaaacctgccacggtcgtgaccggctccggtcacgctagtagcactcccggcggcgagaaggaaactagcgccactcagcggtcttcggtgccaagcagcactgagaagaacgcttccggggcgggagtgcccggttggggaatcgccctgttggtgctagtgtgtgtccttgtcgctttggccattgtgtacctgatcgcactcgcggtgtgccaatgtaggagaaaaaactacggccagctggatatcttccctgcgagagacacctatcatcctatgtcggagtacccaacctaccacactcacgggagatatgttcctccttcctcgaccgatcggtctccttacgaaaaggtctcagccggaaacggcgggtcctcccttagctataccaatcccgccgttgcagccacaagcgccaatttatag

SEQ ID NO: 81161 - DNA, 537 bp, Artificial Sequence
  derived and/or modified sequence
ctccccacccatttcaccaccaccatgacaccgggcacccagtctcctttcttcctgctgctgctcctcacagtgcttacagctaccacagcccctaaacccgcaacagttgttacgggttctggtcatgcaagctctaccccaggtggagaaaaggagacttcggctacccagagaagttcagtgcccagctctactgagaagaatgcttctggggctggggtgccaggctggggcatcgcgctgctggtgctggtctgtgttctggttgcgctggccattgtctatctcattgccttggctgtctgtcagtgccgccgaaagaactacgggcagctggacatctttccagcccgggatacctaccatcctatgagcgagtaccccacctaccacacccatgggcgctatgtgccccctagcagtaccgatcgtagcccctatgagaaggtttctgcaggtaatggtggcagcagcctctcttacacaaacccagcagtggcagccacttctgccaacttgtaggggcacgtcgcc

SEQ ID NO: 81162 - DNA, 501 bp, Artificial Sequence
  derived and/or modified sequence
atgactcctggcactcagtcaccattttttctgctgctcctgttaacggttctcacagctactactgcaccaaaacctgcgactgtggtgaccggatcaggccatgcttccagtactccaggtggagagaaagagacgagcgccacacaacgcagctccgtgccaagcagtactgagaaaaatgcctctggagcaggagtccctggatggggtatagctctgttggtgctggtgtgtgtgttggtcgcgctagccatcgtctacctgattgccttagccgtctgtcagtgccggcgtaagaactatggccagctcgatatcttcccggctcgggacacctatcacccaatgtctgagtatcctacatatcatacccacggcaggtatgtgccacccagcagcactgacagaagcccttatgagaaagtgtccgccggaaacggcggatcctccctgtcctataccaaccccgctgttgccgctaccagcgcaaatctctag

SEQ ID NO: 81163 - protein, 168 aa, Artificial Sequence
  derived and/or modified sequence
MTPGTQSPFFLLLLLTVLTVVTGSGHASSTPGGEKETSATQRSSVPSSTEKNALSTGVSFFFLSFHISNLQFNSSLEDPSTDYYQELQRDISEMAVCQCRRKNYGQLDIFPARDTYHPMSEYPTYHTHGRYVPPSSTDRSPYEKVSAGNGGSSLSYTNPAVAATSANL

SEQ ID NO: 81164 - DNA, 507 bp, Artificial Sequence
  derived and/or modified sequence
atgacccccggcacccagagccccttcttcctgctgctgctgctgaccgtgctgaccgtggtgaccggcagcggccacgccagcagcacccccggcggcgagaaggagaccagcgccacccagagaagcagcgtgcccagcagcaccgagaagaacgccctgagcaccggcgtgagcttcttcttcctgagcttccacatcagcaacctgcagttcaacagcagcctggaggaccccagcaccgactactaccaggagctgcagagagacatcagcgagatggccgtgtgccagtgcagaagaaagaactacggccagctggacatcttccccgccagagacacctaccaccccatgagcgagtaccccacctaccacacccacggcagatacgtgccccccagcagcaccgacagaagcccctacgagaaggtgagcgccggcaacggcggcagcagcctgagctacaccaaccccgccgtggccgccaccagcgccaacctgtag

SEQ ID NO: 81165 - DNA, 507 bp, Artificial Sequence
  derived and/or modified sequence
atgacacccggcactcagagcccattcttcctccttctcctcttgaccgtactgacagtagtgacagggagtggacacgctagcagcacacccggcggagagaaggagacttccgcaacccagcgcagctcagtgccttccagcacagagaaaaacgcactgagcacaggggtgtctttctttttcctgagcttccacatttcaaacctgcaatttaactcatctctcgaagatccctcaacagattattatcaggagttgcagcgggacatttccgaaatggctgtgtgccaatgccggaggaagaactacggacagctggacattttccctgccagggacacctatcaccccatgtcagagtacccaacttaccatacccatggcaggtacgtacctccttcttccacagacaggtccccttacgagaaggtttcagctggcaacggagggagcagcctgtcttacacaaatccagctgtcgccgcgacttcagcaaacctgtag

SEQ ID NO: 81166 - DNA, 507 bp, Artificial Sequence
  derived and/or modified sequence
atgaccccaggcacccagagccccttcttcctgctgctgctgctgactgtgctgactgtggtgacaggcagcggccacgccagcagcaccccaggaggagagaaggagaccagcgccacccagaggagctctgtgcccagcagcacagagaagaatgccctgagcactggagtgtccttcttcttcctgtccttccacatcagcaacctgcagttcaacagcagcctggaggaccccagcacagactactaccaggagctgcagagggacatcagcgagatggctgtgtgccagtgcaggaggaagaactacggccagctggacatcttccctgcccgggacacctaccaccccatgtctgagtaccccacctaccacacccacggccgctacgtgccccccagcagcacagacaggagcccctatgagaaggtgtctgctggaaatggaggcagcagcctgagctacaccaacccagctgtggccgccaccagcgccaacctgtag

SEQ ID NO: 81167 - DNA, 507 bp, Artificial Sequence
  derived and/or modified sequence
atgacccccggcacccagagccccttcttcctgctgctgctgctgacagtgctcactgtcgtgactggcagcggacatgcgagttcaactcctggaggcgaaaaggagacaagcgctacacagagatcctctgtccctagcagtacagagaaaaatgcactgagtacaggagtgtcttttttttttttgtctttccacatcagtaaccttcagttcaatagcagcctcgaagatccatctacagactactatcaagaactgcagagggatatctccgaaatggccgtgtgtcaatgcaggaggaagaactatggccagctggacatattcccagctagggacacctatcaccccatgtccgaatatcctacttaccatacccacggaaggtatgtaccaccatcaagtacagaccgttctccttacgagaaggttagcgccgggaacggagggtcatcactctcatacaccaaccctgcagtagcagcaaccagcgccaatctctag

SEQ ID NO: 81168 - DNA, 543 bp, Artificial Sequence
  derived and/or modified sequence
ctccccacccatttcaccaccaccatgacaccgggcacccagtctcctttcttcctgctgctgctcctcacagtgcttacagttgttacgggttctggtcatgcaagctctaccccaggtggagaaaaggagacttcggctacccagagaagttcagtgcccagctctactgagaagaatgctttgtctactggggtctctttctttttcctgtcttttcacatttcaaacctccagtttaattcctctctggaagatcccagcaccgactactaccaagagctgcagagagacatttctgaaatggctgtctgtcagtgccgccgaaagaactacgggcagctggacatctttccagcccgggatacctaccatcctatgagcgagtaccccacctaccacacccatgggcgctatgtgccccctagcagtaccgatcgtagcccctatgagaaggtttctgcaggtaatggtggcagcagcctctcttacacaaacccagcagtggcagccacttctgccaacttgtaggggcacgtcgcc

SEQ ID NO: 81169 - DNA, 507 bp, Artificial Sequence
  derived and/or modified sequence
atgacccctggaacacagagcccatttttccttctgctgcttctgaccgttctgacggtggttaccggcagtggacatgcctcctcaacaccaggcggagagaaggaaacgtccgctacacaaagatccagtgtcccctcctccacagaaaagaatgcactgtcaactggggtctctttcttttttctctctttccacatctccaacctgcaattcaactcctcactggaagatccaagcacagattactaccaggagttacagagggatatttcggagatggccgtctgccaatgtaggagaaagaattacggccagctcgatatctttccagccagggacacataccacccaatgagcgaataccccacctatcacacccacggacgatacgttcctcctagcagcactgatcggagcccctacgagaaggtcagtgccggaaacggaggaagcagcctttcgtacacgaatccagctgtcgctgctactagtgcaaatctttag

SEQ ID NO: 81170 - protein, 752 aa, Artificial Sequence
  derived and/or modified sequence
MLPGLALLLLAAWTARALEVPTDGNAGLLAEPQIAMFCGRLNMHMNVQNGKWDSDPSGTKTCIDTKEGILQYCQEVYPELQITNVVEANQPVTIQNWCKRGRKQCKTHPHFVIPYRCLVGEFVSDALLVPDKCKFLHQERMDVCETHLHWHTVAKETCSEKSTNLHDYGMLLPCGIDKFRGVEFVCCPLAEESDNVDSADAEEDDSDVWWGGADTDYADGSEDKVVEVAEEEEVAEVEEEEADDDEDDEDGDEVEEEAEEPYEEATERTTSIATTTTTTTESVEEVVREVCSEQAETGPCRAMISRWYFDVTEGKCAPFFYGGCGGNRNNFDTEEYCMAVCGSAMSQSLLKTTQEPLARDPVKLPTTAASTPDAVDKYLETPGDENEHAHFQKAKERLEAKHRERMSQVMREWEEAERQAKNLPKADKKAVIQHFQEKVESLEQEAANERQQLVETHMARVEAMLNDRRRLALENYITALQAVPPRPRHVFNMLKKYVRAEQKDRQHTLKHFEHVRMVDPKKAAQIRSQVMTHLRVIYERMNQSLSLLYNVPAVAEEIQDEVDELLQKEQNYSDDVLANMISEPRISYGNDALMPSLTETKTTVELLPVNGEFSLDDLQPWHSFGADSVPANTENEGSGLTNIKTEEISEVKMDAEFRHDSGYEVHHQKLVFFAEDVGSNKGAIIGLMVGGVVIATVIVITLVMLKKKQYTSIHHGVVEVDAAVTPEERHLSKMQQNGYENPTYKFFEQMQN

SEQ ID NO: 81171 - DNA, 2259 bp, Artificial Sequence
  derived and/or modified sequence
atgctgcctggtctggctctgctgctcctggctgcctggacagcccgcgctctcgaagtgcccaccgacggcaatgccgggctgctggcagagcctcagatcgcaatgttttgtggacgactgaacatgcacatgaacgtccagaacggtaagtgggattccgacccttcaggtaccaagacctgtatcgatacaaaagaagggatccttcaatattgccaagaggtgtatcccgagcttcaaatcacgaacgtggtggaggccaatcaacctgttactatccagaactggtgcaaaagggggaggaagcaatgtaaaacccaccctcatttcgttattccctatcgatgcctggtgggcgaatttgttagcgacgccctgctggtgccagacaaatgcaagttcttgcatcaagaacggatggatgtttgcgaaacccacctccactggcacacggtggccaaagagacttgctcggagaaatccacgaacctgcacgactacgggatgctcctaccttgtggcatcgataaattccgaggggtcgagtttgtgtgttgtcccctggccgaggaaagcgataacgtcgactccgctgatgctgaggaggatgactctgatgtttggtggggtggggcagataccgactacgccgacggatcagaagataaggtggttgaggtggccgaagaggaggaggtggccgaggttgaagaggaagaggctgacgacgatgaggacgatgaggatggcgatgaggtcgaagaggaggcagaagaaccttatgaagaggccactgagcggacaacaagcattgctacaacgacaacaactactaccgagtccgtggaggaggttgtgcgggaagtatgttccgagcaggcagaaacaggtccctgtagggccatgatttcaagatggtacttcgacgttaccgaagggaaatgcgctcccttcttttatggagggtgcggagggaatcgcaacaacttcgacaccgaagaatattgcatggcagtttgtggttctgcaatgtctcagagccttctgaagacgacacaggagcccctagccagagatccagtgaaactgccaactaccgccgcctctacccccgatgccgtggataagtaccttgagacacccggcgatgagaacgagcacgcccacttccagaaggcaaaagaacgcttggaagccaagcaccgggaaaggatgagtcaagtgatgcgggaatgggaagaagcagaacgacaggccaaaaaccttccgaaggcagataagaaagccgtgatccagcactttcaggaaaaggtcgaatctctcgagcaggaggctgcgaacgaaagacaacagctagtggagacacacatggcgcgcgtggaggcgatgctgaacgatcgacggagacttgcactggagaactacatcacagccctacaagctgtcccaccgcggcccaggcacgttttcaatatgctgaagaagtacgttagggcggaacagaaggacaggcagcataccctcaagcacttcgagcacgttcgtatggttgaccccaagaaggcagcccagattcgctcccaagtgatgacacatctccgagtgatctacgaaagaatgaaccagtccctttctcttctttataacgtaccagccgttgcagaggaaattcaagatgaggtggacgagctactgcagaaagagcagaattactccgatgatgtcctggcaaacatgatctctgagcccaggattagctacgggaatgacgctctgatgccttcactgaccgaaacaaagacgactgtcgaactgctgccagtgaacggcgagtttagcttggatgatttacagccttggcatagctttggagccgatagcgtgcccgccaataccgagaatgagggatcaggcctcactaacatcaagaccgaggagatatctgaagtcaaaatggacgctgaatttagacacgactcgggctatgaagtgcatcatcagaaacttgtcttctttgcggaggacgtggggtcgaacaagggagcgataataggtctgatggtgggaggtgtcgtgatcgccacagtcattgtgattacactggtgatgctgaaaaaaaagcagtacacatcaattcaccatggcgttgtcgaggttgacgccgccgtcacgccagaggagcggcacctgtccaagatgcagcaaaatggctacgagaatcctacctacaagttctttgagcagatgcagaactag

SEQ ID NO: 81172 - DNA, 2259 bp, Artificial Sequence
  derived and/or modified sequence
atgctgcccggcctggccctgctgctgctggccgcctggacagcccgggccctggaggtgcccacagatggaaatgccggcctgctggccgagccccagatcgccatgttctgtggccgcctgaacatgcacatgaatgtgcagaatggcaagtgggacagcgaccccagcggcaccaagacctgcatcgacaccaaggagggcatcctgcagtactgccaggaggtgtacccagagctgcagatcaccaacgtggtggaggccaaccagcctgtgaccatccagaactggtgcaagaggggcaggaagcagtgcaagacccacccccactttgtgatcccctaccgctgcctggtgggggagtttgtgtctgatgccctgctggtgcctgacaagtgcaagttcctgcaccaggagaggatggatgtgtgtgagacccacctgcactggcacacagtggccaaggagacctgcagcgagaagagcaccaacctgcatgactatggcatgctgctgccctgtggcatcgacaagttccggggcgtggagtttgtgtgctgccccctggccgaggagagtgacaacgtggacagcgcagatgctgaagaagatgacagtgatgtgtggtggggcggcgctgacacagattatgcagatggcagcgaggacaaggtggtggaggtggccgaggaggaggaggtggccgaggtggaggaggaggaggctgatgatgatgaagatgatgaagatggagatgaggtggaggaggaggccgaggagccctatgaggaggccacagagaggaccaccagcatcgccaccaccaccaccaccaccacagagagcgtggaggaggtggtgcgggaggtgtgcagcgagcaggccgagaccggcccctgccgggccatgatcagccgctggtactttgatgtgacagagggcaaatgtgcccccttcttctatggaggctgcggcggcaacagaaacaactttgacacagaggagtactgcatggctgtgtgtggcagcgccatgagccagagcctgctgaagaccacccaggagcccctggcccgggaccctgtgaagctgcccaccacagctgccagcaccccagatgctgtggacaagtacctggagaccccaggagatgaaaatgagcacgcccacttccagaaggccaaggagcggctggaggccaagcaccgggagaggatgagccaggtgatgagggagtgggaggaggccgagcggcaggccaagaacctgcccaaggctgacaagaaggccgtcatccagcacttccaggagaaggtggagagcctggagcaggaggccgccaatgaaaggcagcagctggtggagacccacatggcccgggtggaggccatgctgaatgacagaagaaggctggccctggagaactacatcacagccctgcaggccgtgcccccccggcccaggcatgtgttcaacatgctgaagaagtatgtgcgggcagagcagaaggaccggcagcacaccctgaagcactttgagcacgtgaggatggtggaccccaagaaggccgcccagatccgcagccaggtgatgacccacctgcgggtcatctatgaaagaatgaaccagagcctgagcctgctgtacaacgtgcctgctgtggccgaggagatccaggatgaggtggatgagctgctgcagaaggagcagaactacagtgatgatgtgctggccaacatgatcagcgagccccgcatctcctatggaaatgatgccctgatgcccagcctgacagagaccaagaccaccgtggagctgctgcctgtgaatggagagttcagcctggatgacctgcagccctggcacagctttggagctgacagcgtgcctgccaacacagaaaatgaaggcagcggcctgaccaacatcaagacagaggagatcagcgaggtgaagatggatgctgagttcagacatgattctggctatgaggtgcaccaccagaagctggtgttctttgctgaagatgtgggcagcaacaagggggccatcatcggcctgatggtgggcggcgtggtgattgccaccgtcatcgtcatcaccctggtgatgctgaagaagaagcagtacaccagcatccaccacggcgtggtggaggtggatgctgctgtgaccccagaggagcggcacctgagcaagatgcagcagaatggctatgagaaccccacctacaagttctttgagcagatgcagaactag

SEQ ID NO: 81173 - DNA, 2259 bp, Artificial Sequence
  derived and/or modified sequence
atgctgcccggcctggccctgctgctgctggccgcctggaccgcccgggctcttgaggtgcccacagacggtaacgccggactgctggctgagccacagatcgctatgttttgtggcagacttaacatgcacatgaacgtgcagaatggcaagtgggatagcgacccaagcggcaccaaaacttgcatcgacacaaaggaggggatactgcagtactgtcaggaggtctaccctgagcttcaaataaccaacgtggtcgaggcaaaccagcccgtgaccattcagaattggtgtaaacgtgggagaaaacaatgcaagacgcatccccacttcgttataccttacaggtgtcttgtcggcgagtttgtgtcagacgccctgcttgtcccagataagtgcaagttcctgcaccaagaaagaatggacgtgtgcgaaacccatcttcattggcacaccgtggccaaagagacctgtagcgagaaatcgacaaacctgcatgactatggcatgctgctaccatgcgggattgataagtttcgcggcgtggaattcgtgtgctgtcccttggccgaggagtccgacaatgttgacagcgccgacgccgaggaggacgacagtgacgtatggtggggtggagctgatacggactacgctgacgggtcagaggataaggtggtcgaagtagcagaggaggaggaggtagcagaagtggaggaggaagaggctgatgacgacgaggacgatgaagatggagacgaagtggaggaggaggccgaagaaccctacgaggaggccaccgaaagaactacatcaatagcaacaaccaccacgactaccaccgagtccgtcgaggaagtggtgagagaggtttgttcagagcaagcagagaccggcccctgtagggctatgatctccagatggtattttgatgttacggagggcaaatgcgcgcccttcttttacggtggttgtgggggcaatcggaataactttgacactgaggaatattgtatggccgtatgcgggagcgctatgtcccagagcctgttgaagaccactcaggaaccattagcgcgcgaccctgtgaagctgcccacaacggccgccagtactcccgatgctgttgataaatatttagaaactcctggggacgagaacgagcacgcgcattttcaaaaagcgaaagaaagattagaagctaaacaccgcgagcggatgtcccaagtgatgcgcgagtgggaggaggctgaaaggcaagctaaaaatctgcctaaggcagataaaaaggctgtgattcagcattttcaagagaaggttgaatccttagagcaggaagctgcaaatgagaggcagcagctcgtggagactcacatggccagggtggaagccatgctgaacgaccgacgaaggctggcactcgagaactacatcacagccctgcaggccgtccctccacgcccgagacacgtgttcaacatgctgaagaaatacgtgagggccgagcagaaagatcggcaacacacacttaagcactttgagcatgtgcgtatggttgacccaaagaaagccgcccaaatccgctcacaggttatgacacacctgagggtaatctacgaaaggatgaaccagtctttgagcctcctgtacaatgtccctgccgtggcagaagaaattcaagacgaggtcgacgagctgttacagaaagagcaaaattatagtgatgacgtgctggctaacatgatcagtgagccacggatctcatatgggaatgacgccctgatgcccagcctgactgaaacaaaaaccaccgtggaactcctgccggtaaacggggaattctctctggatgatcttcagccttggcattcttttggtgctgattctgtgccggcaaacactgagaacgaggggtctggactcactaacattaagaccgaggaaatttccgaggttaaaatggacgcggagttccggcacgattctggatatgaggtacaccatcagaaacttgttttttttgccgaagacgtgggttctaataagggcgctattatcggcctgatggtcggcggggtcgtcatcgcgaccgtcatcgtgatcactctagtgatgctgaagaagaaacaatacacctcaatacaccatggggtggtagaggtcgatgctgctgtgacacccgaagagcgccacctctctaaaatgcagcagaatgggtatgagaacccaacttataaattctttgaacagatgcaaaattag

SEQ ID NO: 81174 - DNA, 3578 bp, Artificial Sequence
  derived and/or modified sequence
ggatcagctgactcgcctggctctgagccccgccgccgcgctcgggctccgtcagtttcctcggcagcggtaggcgagagcacgcggaggagcgtgcgcgggggccccgggagacggcggcggtggcggcgcgggcagagcaaggacgcggcggatcccactcgcacagcagcgcactcggtgccccgcgcagggtcgcgatgctgcccggtttggcactgctcctgctggccgcctggacggctcgggcgctggaggtacccactgatggtaatgctggcctgctggctgaaccccagattgccatgttctgtggcagactgaacatgcacatgaatgtccagaatgggaagtgggattcagatccatcagggaccaaaacctgcattgataccaaggaaggcatcctgcagtattgccaagaagtctaccctgaactgcagatcaccaatgtggtagaagccaaccaaccagtgaccatccagaactggtgcaagcggggccgcaagcagtgcaagacccatccccactttgtgattccctaccgctgcttagttggtgagtttgtaagtgatgcccttctcgttcctgacaagtgcaaattcttacaccaggagaggatggatgtttgcgaaactcatcttcactggcacaccgtcgccaaagagacatgcagtgagaagagtaccaacttgcatgactacggcatgttgctgccctgcggaattgacaagttccgaggggtagagtttgtgtgttgcccactggctgaagaaagtgacaatgtggattctgctgatgcggaggaggatgactcggatgtctggtggggcggagcagacacagactatgcagatgggagtgaagacaaagtagtagaagtagcagaggaggaagaagtggctgaggtggaagaagaagaagccgatgatgacgaggacgatgaggatggtgatgaggtagaggaagaggctgaggaaccctacgaagaagccacagagagaaccaccagcattgccaccaccaccaccaccaccacagagtctgtggaagaggtggttcgagaggtgtgctctgaacaagccgagacggggccgtgccgagcaatgatctcccgctggtactttgatgtgactgaagggaagtgtgccccattcttttacggcggatgtggcggcaaccggaacaactttgacacagaagagtactgcatggccgtgtgtggcagcgccatgtcccaaagtttactcaagactacccaggaacctcttgcccgagatcctgttaaacttcctacaacagcagccagtacccctgatgccgttgacaagtatctcgagacacctggggatgagaatgaacatgcccatttccagaaagccaaagagaggcttgaggccaagcaccgagagagaatgtcccaggtcatgagagaatgggaagaggcagaacgtcaagcaaagaacttgcctaaagctgataagaaggcagttatccagcatttccaggagaaagtggaatctttggaacaggaagcagccaacgagagacagcagctggtggagacacacatggccagagtggaagccatgctcaatgaccgccgccgcctggccctggagaactacatcaccgctctgcaggctgttcctcctcggcctcgtcacgtgttcaatatgctaaagaagtatgtccgcgcagaacagaaggacagacagcacaccctaaagcatttcgagcatgtgcgcatggtggatcccaagaaagccgctcagatccggtcccaggttatgacacacctccgtgtgatttatgagcgcatgaatcagtctctctccctgctctacaacgtgcctgcagtggccgaggagattcaggatgaagttgatgagctgcttcagaaagagcaaaactattcagatgacgtcttggccaacatgattagtgaaccaaggatcagttacggaaacgatgctctcatgccatctttgaccgaaacgaaaaccaccgtggagctccttcccgtgaatggagagttcagcctggacgatctccagccgtggcattcttttggggctgactctgtgccagccaacacagaaaacgaaggttctgggttgacaaatatcaagacggaggagatctctgaagtgaagatggatgcagaattccgacatgactcaggatatgaagttcatcatcaaaaattggtgttctttgcagaagatgtgggttcaaacaaaggtgcaatcattggactcatggtgggcggtgttgtcatagcgacagtgatcgtcatcaccttggtgatgctgaagaagaaacagtacacatccattcatcatggtgtggtggaggttgacgccgctgtcaccccagaggagcgccacctgtccaagatgcagcagaacggctacgaaaatccaacctacaagttctttgagcagatgcagaactagacccccgccacagcagcctctgaagttggacagcaaaaccattgcttcactacccatcggtgtccatttatagaataatgtgggaagaaacaaacccgttttatgatttactcattatcgccttttgacagctgtgctgtaacacaagtagatgcctgaacttgaattaatccacacatcagtaatgtattctatctctctttacattttggtctctatactacattattaatgggttttgtgtactgtaaagaatttagctgtatcaaactagtgcatgaatagattctctcctgattatttatcacatagccccttagccagttgtatattattcttgtggtttgtgacccaattaagtcctactttacatatgctttaagaatcgatgggggatgcttcatgtgaacgtgggagttcagctgcttctcttgcctaagtattcctttcctgatcactatgcattttaaagttaaacatttttaagtatttcagatgctttagagagattttttttccatgactgcattttactgtacagattgctgcttctgctatatttgtgatataggaattaagaggatacacacgtttgtttcttcgtgcctgttttatgtgcacacattaggcattgagacttcaagcttttctttttttgtccacgtatctttgggtctttgataaagaaaagaatccctgttcattgtaagcacttttacggggcgggtggggaggggtgctctgctggtcttcaattaccaagaattctccaaaacaattttctgcaggatgattgtacagaatcattgcttatgacatgatcgctttctacactgtattacataaataaattaaataaaataaccccgggcaagacttttctttgaaggatgactacagacattaaataatcgaagtaattttgggtggggagaagaggcagattcaattttctttaaccagtctgaagtttcatttatgatacaaaagaagatgaaaatggaagtggcaatataaggggatgaggaaggcatgcctggacaaacccttcttttaagatgtgtcttcaatttgtataaaatggtgttttcatgtaaataaatacattcttggaggagc

SEQ ID NO: 81175 - DNA, 2259 bp, Artificial Sequence
  derived and/or modified sequence
atgctacctggcttggcgcttctgttattggccgcttggactgctagagctctagaggtgcccaccgatggaaacgcaggcctcttggccgaacctcagattgccatgttctgcggccgactgaacatgcacatgaatgtgcaaaatggtaagtgggattcagacccatcgggaactaagacatgtattgataccaaagaggggattctgcaatattgtcaggaagtgtacccggagctgcagatcacgaatgtggtcgaggccaaccagccagtcaccattcagaattggtgcaagcggggacggaaacagtgtaagacacacccccattttgtcattccataccgctgcctcgtgggcgaattcgtctcagatgccctcctggtcccagataaatgcaaattcctgcaccaggaacgtatggacgtttgtgaaacccacttgcactggcacaccgttgcaaaggaaacctgctctgaaaagtctacaaacttgcacgactatggcatgttgctgccatgcgggattgacaagttccgtggggtcgaattcgtctgctgtcccctcgccgaagagtccgacaacgtggatagtgctgatgcagaggaagacgacagcgacgtctggtggggcggagctgatacggactatgccgatgggagtgaggataaagtagtggaagtcgccgaggaggaggaggtggcggaggtggaggaggaggaggctgacgacgacgaagatgacgaagacggggatgaggttgaggaagaagcagaagagccctacgaggaggccaccgaaagaactactagcattgccactaccaccacgactacaacagaaagcgttgaggaggtggtccgcgaggtctgctcggagcaggcggaaaccggtccttgcagagctatgatctcccggtggtacttcgatgtgactgaaggcaagtgtgctccatttttttatgggggttgtggtggaaacagaaacaattttgatacagaggagtactgcatggctgtctgcggcagcgctatgagtcaaagcctgctcaaaacgacccaggaaccactcgccagagatccagtaaagctccctactacagcagcttcgaccccggacgcggtggataaatacctagagacacctggagacgagaacgaacacgcacatttccaaaaggcaaaggaaaggctcgaagccaagcaccgtgaacggatgtcacaggtgatgcgcgaatgggaagaggctgagagacaggctaaaaacctgcccaaagcggacaagaaagcggttatccagcactttcaggagaaggtcgaatcgctcgagcaagaagctgccaacgaacggcaacagctcgtcgaaacccatatggctagagtcgaggctatgctgaatgaccggaggcggttggctctcgagaattacatcactgctttgcaagccgtgccccctcggcctaggcacgtttttaatatgctcaagaagtatgtgagggcagaacaaaaggacaggcagcatacccttaaacactttgaacacgtccggatggtcgatccaaagaaggcagcacagattaggtcacaggtgatgactcatctgagagtgatctatgaaaggatgaaccaatctttgagcctactatacaacgtcccggcagtagcggaggagattcaggatgaggtggacgaactcctccaaaaagaacaaaactattcagatgacgtgctggccaatatgatctcagaacccaggatatcatacggcaacgacgcccttatgccaagcctgactgaaactaaaactacagtcgagctactgcccgtcaatggcgaatttagtctggacgacctgcagccttggcatagcttcggtgcggattccgtccctgccaacaccgaaaatgagggctcaggtctaaccaatatcaagaccgaagagatcagtgaagttaaaatggacgcagagttccgccacgatagcggttatgaagttcatcatcagaaactagtttttttcgccgaagatgtcggctccaacaagggagcgatcatcggcctcatggtggggggtgtcgttatcgctacagtcattgtcattaccctcgtcatgttgaaaaaaaaacagtacacgagcattcaccacggggtggtggaggttgatgccgcagtgaccccggaggagcgccacttgagtaaaatgcagcagaatgggtacgaaaaccccacttataagttctttgaacagatgcaaaattag

SEQ ID NO: 81176 - DNA, 2259 bp, Artificial Sequence
  derived and/or modified sequence
atgctgcccggcctggccctgctgctgctggccgcctggaccgccagagccctggaggtgcccaccgacggcaacgccggcctgctggccgagccccagatcgccatgttctgcggcagactgaacatgcacatgaacgtgcagaacggcaagtgggacagcgaccccagcggcaccaagacctgcatcgacaccaaggagggcatcctgcagtactgccaggaggtgtaccccgagctgcagatcaccaacgtggtggaggccaaccagcccgtgaccatccagaactggtgcaagagaggcagaaagcagtgcaagacccacccccacttcgtgatcccctacagatgcctggtgggcgagttcgtgagcgacgccctgctggtgcccgacaagtgcaagttcctgcaccaggagagaatggacgtgtgcgagacccacctgcactggcacaccgtggccaaggagacctgcagcgagaagagcaccaacctgcacgactacggcatgctgctgccctgcggcatcgacaagttcagaggcgtggagttcgtgtgctgccccctggccgaggagagcgacaacgtggacagcgccgacgccgaggaggacgacagcgacgtgtggtggggcggcgccgacaccgactacgccgacggcagcgaggacaaggtggtggaggtggccgaggaggaggaggtggccgaggtggaggaggaggaggccgacgacgacgaggacgacgaggacggcgacgaggtggaggaggaggccgaggagccctacgaggaggccaccgagagaaccaccagcatcgccaccaccaccaccaccaccaccgagagcgtggaggaggtggtgagagaggtgtgcagcgagcaggccgagaccggcccctgcagagccatgatcagcagatggtacttcgacgtgaccgagggcaagtgcgcccccttcttctacggcggctgcggcggcaacagaaacaacttcgacaccgaggagtactgcatggccgtgtgcggcagcgccatgagccagagcctgctgaagaccacccaggagcccctggccagagaccccgtgaagctgcccaccaccgccgccagcacccccgacgccgtggacaagtacctggagacccccggcgacgagaacgagcacgcccacttccagaaggccaaggagagactggaggccaagcacagagagagaatgagccaggtgatgagagagtgggaggaggccgagagacaggccaagaacctgcccaaggccgacaagaaggccgtgatccagcacttccaggagaaggtggagagcctggagcaggaggccgccaacgagagacagcagctggtggagacccacatggccagagtggaggccatgctgaacgacagaagaagactggccctggagaactacatcaccgccctgcaggccgtgccccccagacccagacacgtgttcaacatgctgaagaagtacgtgagagccgagcagaaggacagacagcacaccctgaagcacttcgagcacgtgagaatggtggaccccaagaaggccgcccagatcagaagccaggtgatgacccacctgagagtgatctacgagagaatgaaccagagcctgagcctgctgtacaacgtgcccgccgtggccgaggagatccaggacgaggtggacgagctgctgcagaaggagcagaactacagcgacgacgtgctggccaacatgatcagcgagcccagaatcagctacggcaacgacgccctgatgcccagcctgaccgagaccaagaccaccgtggagctgctgcccgtgaacggcgagttcagcctggacgacctgcagccctggcacagcttcggcgccgacagcgtgcccgccaacaccgagaacgagggcagcggcctgaccaacatcaagaccgaggagatcagcgaggtgaagatggacgccgagttcagacacgacagcggctacgaggtgcaccaccagaagctggtgttcttcgccgaggacgtgggcagcaacaagggcgccatcatcggcctgatggtgggcggcgtggtgatcgccaccgtgatcgtgatcaccctggtgatgctgaagaagaagcagtacaccagcatccaccacggcgtggtggaggtggacgccgccgtgacccccgaggagagacacctgagcaagatgcagcagaacggctacgagaaccccacctacaagttcttcgagcagatgcagaactag

SEQ ID NO: 81177 - protein, 474 aa, Artificial Sequence
  derived and/or modified sequence
MKRVLVLLLAVAFGHALERGRDYEKNKVCKEFSHLGKEDFTSLSLVLYSRKFPSGTFEQVSQLVKEVVSLTEACCAEGADPDCYDTRTSALSAKSCESNSPFPVHPGTAECCTKEGLERKLCMAALKHQPQEFPTYVEPTNDEICEAFRKDPKEYANQFMWEYSTNYGQAPLSLLVSYTKSYLSMVGSCCTSASPTVCFLKERLQLKHLSLLTTLSNRVCSQYAAYGEKKSRLSNLIKLAQKVPTADLEDVLPLAEDITNILSKCCESASEDCMAKELPEHTVKLCDNLSTKNSKFEDCCQEKTAMDVFVCTYFMPAAQLPELPDVELPTNKDVCDPGNTKVMDKYTFELSRRTHLPEVFLSKVLEPTLKSLGECCDVEDSTTCFNAKGPLLKKELSSFIDKGQELCADYSENTFTEYKKKLAERLKAKLPDATPTELAKLVNKHSDFASNCCSINSPPLYCDSEIDAELKNIL

SEQ ID NO: 81178 - protein, 145 aa, Artificial Sequence
  derived and/or modified sequence
MKRVLVLLLAVAFGHALERGRDYEKNKVCKEFSHLGKEDFTSLSLVLYSRKFPSGTFEQVSQLVKEVVSLTEACCAEGADPDCYDTRTSALSAKSCESNSPFPVHPGTAECCTKEGLERKLCMAALKHQPQEFPTYVEPTNDEIC

SEQ ID NO: 81179 - protein, 493 aa, Artificial Sequence
  derived and/or modified sequence
MLWSWSEERGGAARLSGRKMKRVLVLLLAVAFGHALERGRDYEKNKVCKEFSHLGKEDFTSLSLVLYSRKFPSGTFEQVSQLVKEVVSLTEACCAEGADPDCYDTRTSALSAKSCESNSPFPVHPGTAECCTKEGLERKLCMAALKHQPQEFPTYVEPTNDEICEAFRKDPKEYANQFMWEYSTNYGQAPLSLLVSYTKSYLSMVGSCCTSASPTVCFLKERLQLKHLSLLTTLSNRVCSQYAAYGEKKSRLSNLIKLAQKVPTADLEDVLPLAEDITNILSKCCESASEDCMAKELPEHTVKLCDNLSTKNSKFEDCCQEKTAMDVFVCTYFMPAAQLPELPDVELPTNKDVCDPGNTKVMDKYTFELSRRTHLPEVFLSKVLEPTLKSLGECCDVEDSTTCFNAKGPLLKKELSSFIDKGQELCADYSENTFTEYKKKLAERLKAKLPDATPTELAKLVNKHSDFASNCCSINSPPLYCDSEIDAELKNIL

SEQ ID NO: 81180 - DNA, 1482 bp, Artificial Sequence
  derived and/or modified sequence
atgctgtggtcctggtccgaggagagaggcggcgctgcacgtctcagcggccgaaaaatgaagagagtgttggtactcttgcttgccgtggcgttcggacatgctttggaacgagggagagactacgagaagaacaaggtatgcaaggaatttagccatctggggaaggaggactttacctccctgagtctcgtactgtacagcaggaagttcccatctggaacattcgagcaggtctcacagctggtgaaagaggtagtgtcgctgaccgaggcctgctgtgccgagggagccgatcctgattgttatgacactcgtaccagtgctctgtccgcgaaaagctgtgaaagcaattccccttttcccgttcacccgggtacagcagagtgctgcacaaaggagggcctggaaagaaagctgtgcatggcggctctaaaacatcagccacaggagttccccacttatgtagagccaacaaatgacgaaatctgtgaggcattcaggaaagaccctaaagagtacgcaaaccagtttatgtgggagtactctactaactacggtcaagccccgttatcacttcttgtgagctacaccaaaagttacttgtccatggtggggagctgctgcactagtgccagtccaactgtttgttttttaaaagagaggttacaactaaagcacctttctctcctgaccactcttagcaatagggtatgctcacagtacgctgcttatggggagaagaagtctagattgagtaacctgatcaagttggcacagaaggtgcccacagctgatctcgaggatgtccttccgctggccgaggatatcacaaatattctgagcaaatgctgtgaatccgcctccgaggattgcatggctaaggagttgcccgagcacacggtaaagctgtgtgacaacctctccacaaaaaactccaagttcgaagactgctgtcaggaaaagaccgctatggacgtgttcgtgtgtacctactttatgcccgccgctcaactacccgaacttcccgacgtggagctccctaccaacaaagatgtgtgtgatccaggaaataccaaggttatggataaatacacttttgagctttccagacgaacacacctgcctgaggtgttcctgtccaaggtcctcgagcccaccctcaagagcctgggggaatgctgtgacgtcgaagatagcacaacgtgcttcaacgccaaaggccctttgctgaaaaaggagctgtcatcattcattgataaagggcaagagctgtgtgcggattatagcgaaaatacgttcacggagtacaaaaaaaaactggccgaacgattaaaggcgaaactccccgatgcgacccctacagaactggctaaactggttaacaaacacagtgactttgccagtaactgctgctctataaactccccccccctttattgtgattcagagatcgatgcagagttaaaaaatatcttgtag

SEQ ID NO: 81181 - DNA, 1972 bp, Artificial Sequence
  derived and/or modified sequence
atattaagtaaactttagtgaggaacagcagtggaaaataatctatataccttggctcttttgcagtttgacaaagttaatgattaaaatctcctagattttccactacagtatccccagggtgtctatttaccttgattgatattattttatctcttttgggccaaagataacagccccttgcttctgtgtttaataataattctgtgttgcttctgagattaataattgattaattcatagtcaggaatctttgtaaaaaggaaaccaattacttttggctaccacttttacatggtcacctacaggagagaggaggtgctgcaagactctctggtagaaaaatgaagagggtcctggtactactgcttgctgtggcatttggacatgctttagagagaggccgggattatgaaaagaataaagtctgcaaggaattctcccatctgggaaaggaggacttcacatctctgtcactagtcctgtacagtagaaaatttcccagtggcacgtttgaacaggtcagccaacttgtgaaggaagttgtctccttgaccgaagcctgctgtgcggaaggggctgaccctgactgctatgacaccaggacctcagcactgtctgccaagtcctgtgaaagtaattctccattccccgttcacccaggcactgctgagtgctgcaccaaagagggcctggaacgaaagctctgcatggctgctctgaaacaccagccacaggaattccctacctacgtggaacccacaaatgatgaaatctgtgaggcgttcaggaaagatccaaaggaatatgctaatcaatttatgtgggaatattccactaattacggacaagctcctctgtcacttttagtcagttacaccaagagttatctttctatggtagggtcctgctgtacctctgcaagcccaactgtatgctttttgaaagagagactccagcttaaacatttatcacttctcaccactctgtcaaatagagtctgctcacaatatgctgcttatggggagaagaaatcaaggctcagcaatctcataaagttagcccaaaaagtgcctactgctgatctggaggatgttttgccactagctgaagatattactaacatcctctccaaatgctgtgagtctgcctctgaagattgcatggccaaagagctgcctgaacacacagtaaaactctgtgacaatttatccacaaagaattctaagtttgaagactgttgtcaagaaaaaacagccatggacgtttttgtgtgcacttacttcatgccagctgcccaactccccgagcttccagatgtagagttgcccacaaacaaagatgtgtgtgatccaggaaacaccaaagtcatggataagtatacatttgaactaagcagaaggactcatcttccggaagtattcctcagtaaggtacttgagccaaccctaaaaagccttggtgaatgctgtgatgttgaagactcaactacctgttttaatgctaagggccctctactaaagaaggaactatcttctttcattgacaagggacaagaactatgtgcagattattcagaaaatacatttactgagtacaagaaaaaactggcagagcgactaaaagcaaaattgcctgatgccacacccacggaactggcaaagctggttaacaagcactcagactttgcctccaactgctgttccataaactcacctcctctttactgtgattcagagattgatgctgaattgaagaatatcctgtagtcctgaagcatgtttattaactttgaccagagttggagccacccaggggaatgatctctgatgacctaacctaagcaaaaccactgagcttctgggaagacaactaggatactttctactttttctagctacaatatcttcatacaatgacaagtatgatgatttgctatcaaaataaattgaaatataatgcaaaccataaa

SEQ ID NO: 81182 - DNA, 562 bp, Artificial Sequence
  derived and/or modified sequence
atcaaaattcgtagaaaataatctgagtgtgtctttttgaatgaactaatcagaagatgacgaaatacagttgaataaaagggatacagaagagagaggaggtgctgcaagactctctggtagaaaaatgaagagggtcctggtactactgcttgctgtggcatttggacatgctttagagagaggccgggattatgaaaagaataaagtctgcaaggaattctcccatctgggaaaggaggacttcacatctctgtcactagtcctgtacagtagaaaatttcccagtggcacgtttgaacaggtcagccaacttgtgaaggaagttgtctccttgaccgaagcctgctgtgcggaaggggctgaccctgactgctatgacaccaggacctcagcactgtctgccaagtcctgtgaaagtaattctccattccccgttcacccaggcactgctgagtgctgcaccaaagagggcctggaacgaaagctctgcatggctgctctgaaacaccagccacaggaattccctacctacgtggaacccacaaatgatgaaatctgt

SEQ ID NO: 81183 - DNA, 1777 bp, Artificial Sequence
  derived and/or modified sequence
actgttttttcaaagagattgcttactccaccaggagaatgatatctacctattctaccactggtgatgatctggactagtccaactggtaggaaatgctgtggtcttggagtgaggagagaggaggtgctgcaagactctctggtagaaaaatgaagagggtcctggtactactgcttgctgtggcatttggacatgctttagagagaggccgggattatgaaaagaataaagtctgcaaggaattctcccatctgggaaaggaggacttcacatctctgtcactagtcctgtacagtagaaaatttcccagtggcacgtttgaacaggtcagccaacttgtgaaggaagttgtctccttgaccgaagcctgctgtgcggaaggggctgaccctgactgctatgacaccaggacctcagcactgtctgccaagtcctgtgaaagtaattctccattccccgttcacccaggcactgctgagtgctgcaccaaagagggcctggaacgaaagctctgcatggctgctctgaaacaccagccacaggaattccctacctacgtggaacccacaaatgatgaaatctgtgaggcgttcaggaaagatccaaaggaatatgctaatcaatttatgtgggaatattccactaattacggacaagctcctctgtcacttttagtcagttacaccaagagttatctttctatggtagggtcctgctgtacctctgcaagcccaactgtatgctttttgaaagagagactccagcttaaacatttatcacttctcaccactctgtcaaatagagtctgctcacaatatgctgcttatggggagaagaaatcaaggctcagcaatctcataaagttagcccaaaaagtgcctactgctgatctggaggatgttttgccactagctgaagatattactaacatcctctccaaatgctgtgagtctgcctctgaagattgcatggccaaagagctgcctgaacacacagtaaaactctgtgacaatttatccacaaagaattctaagtttgaagactgttgtcaagaaaaaacagccatggacgtttttgtgtgcacttacttcatgccagctgcccaactccccgagcttccagatgtagagttgcccacaaacaaagatgtgtgtgatccaggaaacaccaaagtcatggataagtatacatttgaactaagcagaaggactcatcttccggaagtattcctcagtaaggtacttgagccaaccctaaaaagccttggtgaatgctgtgatgttgaagactcaactacctgttttaatgctaagggccctctactaaagaaggaactatcttctttcattgacaagggacaagaactatgtgcagattattcagaaaatacatttactgagtacaagaaaaaactggcagagcgactaaaagcaaaattgcctgatgccacacccacggaactggcaaagctggttaacaagcactcagactttgcctccaactgctgttccataaactcacctcctctttactgtgattcagagattgatgctgaattgaagaatatcctgtagtcctgaagcatgtttattaactttgaccagagttggagccacccaggggaatgatctctgatgacctaacctaagcaaaaccactgagcttctgggaagacaactaggatactttctactttttctagctacaatatcttcatacaatgacaagtatgatgatttgctatcaaaataaattgaaatataatgcaaaccat

SEQ ID NO: 81184 - DNA, 1482 bp, Artificial Sequence
  derived and/or modified sequence
atgctgtggagctggagcgaggagcggggcggggccgcccggctgagcggcaggaagatgaagagggtgctggtgctgctgctggccgtggccttcggccacgccctggagcggggccgggactatgagaagaacaaggtgtgcaaggagttcagccacctgggcaaggaggacttcaccagcctgagcctggtgctgtacagcaggaagttccccagcggcacctttgagcaggtgtcccagctggtgaaggaggtggtgtccctgacagaggcctgctgtgccgagggcgctgaccctgactgctatgacaccaggaccagcgccctgagcgccaagagctgtgagagcaacagccccttccctgtgcaccctggaacagctgagtgctgcaccaaggagggcctggagaggaagctgtgcatggccgccctgaagcaccagccccaggagttccccacctacgtggagcccaccaatgatgagatctgtgaggccttcaggaaggaccccaaggagtatgccaaccagttcatgtgggagtacagcaccaactacggccaggcccccctgagcctgctggtgtcctacaccaagagctacctgtccatggtgggcagctgctgcaccagcgccagccccaccgtgtgcttcctgaaggagcggctgcagctgaagcacctgagcctgctgaccaccctgagcaacagagtgtgcagccagtatgctgcctatggagagaagaagagccggctgagcaacctgatcaagctggcccagaaggtgcccacagctgacctggaggatgtgctgcccctggccgaggacatcaccaacatcctgagcaagtgctgtgagagcgccagcgaggactgcatggccaaggagctgcctgagcacacagtgaagctgtgtgacaacctgagcaccaagaacagcaagtttgaggactgctgccaggagaagacagccatggatgtgtttgtgtgcacctacttcatgcctgctgcccagctgcctgagctgcctgatgtggagctgcccaccaacaaggatgtgtgtgaccccggcaacaccaaggtgatggacaagtacacctttgagctgagcaggaggacccacctgcctgaggtgttcctgagcaaggtgctggagcccaccctgaagagcctgggggagtgctgtgatgtggaggacagcaccacctgcttcaatgccaagggccccctgctgaagaaggagctgagcagcttcatcgacaagggccaggagctgtgtgccgactacagcgagaacaccttcacagagtacaagaagaagctggccgagcggctgaaggccaagctgcctgatgccacccccacagagctggccaagctggtgaacaagcacagcgactttgccagcaactgctgcagcatcaacagcccccccctgtactgtgacagcgagattgatgctgagctgaagaacatcctgtag

SEQ ID NO: 81185 - DNA, 1482 bp, Artificial Sequence
  derived and/or modified sequence
atgctgtggagctggagcgaggagcggggcggcgccgcccggctgtctggccggaagatgaaacgagtgctcgtcctactacttgcagttgcatttggacatgctctagagaggggccgagattacgaaaaaaataaagtgtgtaaagaattttcgcaccttgggaaggaagacttcaccagcctatctttagttctgtattctaggaagttccccagcggtacttttgagcaagtgtctcagttagtcaaggaggtagtctcccttaccgaggcatgttgcgccgagggtgcagatccagattgctatgatactcgcacatcagccctgagtgcaaaatcttgtgagagcaatagcccctttcctgtgcacccaggtaccgcagaatgctgcaccaaagaaggactggagaggaaactgtgcatggcggccctgaaacaccagccccaagagtttccaacctatgttgaacctacaaacgacgaaatctgcgaggctttcagaaaggacccgaaggagtatgctaatcagtttatgtgggagtattccacaaattacggccaggccccgctgagtctgttggtctcttacacgaagagctatctttccatggttggatcttgttgcacttcagcaagtcccacggtctgttttctgaaggaacggctgcagctgaaacatttaagtctcctcaccacgctgagtaacagagtttgttcacagtacgccgcttatggcgaaaaaaagagcaggctcagtaatctaattaaactggcacaaaaggtcccaacggctgatctggaagacgtgctgcctctggctgaagatatcaccaatattttgtcaaaatgctgcgagtcggcttcagaggattgtatggccaaagaactgcctgaacacactgtgaagctgtgcgataatctctccactaagaatagcaaattcgaggactgctgccaggagaaaaccgctatggacgtgtttgtatgcacctactttatgcctgccgcacaattgcccgagctgcccgacgtggagttacccacaaacaaggacgtgtgcgatcccggaaacacaaaggtcatggacaaatacactttcgagttatctcgcagaacacacctgcccgaggtatttctatcgaaggttttggaaccgactcttaaaagcttaggcgagtgctgcgacgtcgaggacagcacaacctgctttaacgcaaaaggtccacttctcaaaaaagagctgtcttcctttatagacaaagggcaagaactatgtgccgactactccgagaacacattcaccgagtataaaaaaaagcttgcggagcggctgaaggccaaactaccggatgccactccgactgagctggccaagttggtgaataaacatagcgatttcgcgtccaactgttgctcgatcaacagcccgccactgtattgcgacagcgaaatagatgctgagctgaagaatatcctgtag

SEQ ID NO: 81186 - DNA, 1482 bp, Artificial Sequence
  derived and/or modified sequence
atgctatggtcctggagtgaggagagaggaggtgccgctcggttgtcaggacggaaaatgaaaagagtattggtcctgctcttggcagttgcgttcgggcatgcactggagagaggtcgcgactatgagaaaaacaaagtctgcaaagagttctcacacctaggcaaggaagatttcacgtccctcagcctggtcctttattctcgaaagttcccttccggcacgtttgagcaggtgtcacagctggtgaaggaggttgtttcgctcactgaagcttgctgcgccgaaggggctgacccagactgctatgacacacgaacctccgccctatccgctaagagttgcgaatccaattccccttttccagtgcatcctggaacggctgagtgttgtactaaggagggacttgagagaaagctctgtatggccgcactcaaacatcagccacaggaattccccacctacgtcgagccaacaaatgatgagatctgtgaggcctttcggaaggatcccaaggagtacgctaaccagttcatgtgggagtatagtacaaattacgggcaggcccctctatcactcctggtgagttatactaagtcctatcttagcatggttggatcctgttgcacctcggccagccccacagtgtgtttcctgaaggagcgcctccagctcaagcacctaagcttacttactaccctatcgaacagggtgtgctctcaatatgccgcatacggggagaagaagagccgcctgtccaatttgataaagctagcccagaaagttcccaccgccgatctggaagatgtccttcccctggctgaggatatcaccaatattctgtcaaagtgctgtgagtctgcgagcgaagactgtatggcaaaagagcttccggaacacactgtgaaactgtgcgacaaccttagcacaaaaaactcaaaattcgaggactgttgccaggagaagacggcaatggacgtttttgtgtgtacttactttatgcccgctgcacagttgcctgaactgcccgatgtggagctgccgacaaacaaagacgtctgcgacccgggaaatacaaaggtgatggacaaatatacctttgagctctcaaggcgcacacaccttcctgaggtgttcttgtccaaggtcctcgagcccaccttgaagagtctgggagaatgctgtgacgtggaggacagtaccacatgcttcaatgcgaaaggccctttactgaagaaagaactgtcttcctttattgacaagggacaggaactgtgtgcagactattctgagaacacattcacagagtataaaaaaaaattagcggaaaggttgaaggccaaacttcctgacgcaactcccaccgagcttgctaagctcgtgaataagcactccgatttcgcctctaactgttgctcaataaacagccctcccctttattgcgacagcgagatagatgctgagctgaagaatatcctatag

SEQ ID NO: 81187 - DNA, 1482 bp, Artificial Sequence
  derived and/or modified sequence
atgctgtggagctggagcgaggagagaggcggcgccgccagactgagcggcagaaagatgaagagagtgctggtgctgctgctggccgtggccttcggccacgccctggagagaggcagagactacgagaagaacaaggtgtgcaaggagttcagccacctgggcaaggaggacttcaccagcctgagcctggtgctgtacagcagaaagttccccagcggcaccttcgagcaggtgagccagctggtgaaggaggtggtgagcctgaccgaggcctgctgcgccgagggcgccgaccccgactgctacgacaccagaaccagcgccctgagcgccaagagctgcgagagcaacagccccttccccgtgcaccccggcaccgccgagtgctgcaccaaggagggcctggagagaaagctgtgcatggccgccctgaagcaccagccccaggagttccccacctacgtggagcccaccaacgacgagatctgcgaggccttcagaaaggaccccaaggagtacgccaaccagttcatgtgggagtacagcaccaactacggccaggcccccctgagcctgctggtgagctacaccaagagctacctgagcatggtgggcagctgctgcaccagcgccagccccaccgtgtgcttcctgaaggagagactgcagctgaagcacctgagcctgctgaccaccctgagcaacagagtgtgcagccagtacgccgcctacggcgagaagaagagcagactgagcaacctgatcaagctggcccagaaggtgcccaccgccgacctggaggacgtgctgcccctggccgaggacatcaccaacatcctgagcaagtgctgcgagagcgccagcgaggactgcatggccaaggagctgcccgagcacaccgtgaagctgtgcgacaacctgagcaccaagaacagcaagttcgaggactgctgccaggagaagaccgccatggacgtgttcgtgtgcacctacttcatgcccgccgcccagctgcccgagctgcccgacgtggagctgcccaccaacaaggacgtgtgcgaccccggcaacaccaaggtgatggacaagtacaccttcgagctgagcagaagaacccacctgcccgaggtgttcctgagcaaggtgctggagcccaccctgaagagcctgggcgagtgctgcgacgtggaggacagcaccacctgcttcaacgccaagggccccctgctgaagaaggagctgagcagcttcatcgacaagggccaggagctgtgcgccgactacagcgagaacaccttcaccgagtacaagaagaagctggccgagagactgaaggccaagctgcccgacgccacccccaccgagctggccaagctggtgaacaagcacagcgacttcgccagcaactgctgcagcatcaacagcccccccctgtactgcgacagcgagatcgacgccgagctgaagaacatcctgtag

SEQ ID NO: 81188 - protein, 521 aa, Artificial Sequence
  derived and/or modified sequence
MKENVASATVFTLLLFLNTCLLNVQPDPPLELAVEVKQPEDRKPYLWIKWSPPTLIDLKTGWFTLLYEIRLKPEKAAEWEIHFAGQQTEFKILSLHPGQKYLVQVRCKPDHGYWSAWSPATFIQIPSDFTMNDTTVWISVAVLSAVICLIIVWAVALKGYSMVTCIFPPVPGPKIKGFDAHLLEKGKSEELLSALGCQDFPPTSDYEDLLVEYLEVDDSEDQHLMSVHSKEHPSQGMKPTYLDPDTDSGRGSCDSPSLLSEKCEEPQANPSTFYDPEVIEKPENPETTHTWDPQCISMEGKIPYFHAGGSKCSTWPLPQPSQHNPRSSYHNITDVCELAVGPAGAPATLLNEAGKDALKSSQTIKSREEGKATQQREVESFHSETDQDTPWLLPQEKTPFGSAKPLDYVEIHKVNKDGALSLLPKQRENSGKPKKPGTPENNKEYAKVSGVMDNNILVLVPDPHAKNVACFEESAKEAPPSLEQNQAEKALANFTATSSKCRLQLGGLDYLDPACFTHSFH

SEQ ID NO: 81189 - DNA, 1566 bp, Artificial Sequence
  derived and/or modified sequence
atgaaagagaacgttgcaagcgctacggtgtttacactactgctatttttgaacacatgcctgctgaatgttcagccagatccaccactggagttagcagtggaagtcaagcagccagaggaccgtaaaccatacctatggataaaatggagcccacccaccctgatagatttaaaaaccggatggtttaccttgctgtatgagatcagacttaaacctgagaaagccgccgagtgggagattcactttgcgggacagcaaacagaattcaaaattttatccctgcatccaggacagaagtatctcgtgcaggttaggtgcaagccagaccacgggtactggtcagcgtggtctcccgccacgttcatacaaatccccagtgacttcactatgaatgacacgactgtctggattagtgtcgcagtactcagcgcagtcatctgcctcataattgtctgggccgtggccctgaaggggtactcaatggttacatgtatctttcccccagtgccgggacccaagatcaaggggttcgacgcgcacctgctcgagaagggcaagtcagaagaacttctttccgcgttagggtgccaggatttccctcccacatccgattacgaggacctacttgttgaatacctcgaggtggatgatagcgaagatcagcacctgatgtcggtccacagcaaggagcaccccagccagggtatgaaaccaacatacctggatcccgacactgattctggaagagggagctgcgactccccatctctcttaagtgagaagtgcgaggaaccacaagctaacccttccaccttttatgaccccgaggtgatcgagaagccggagaacccggagacaacccatacttgggacccccaatgtattagcatggagggtaagataccttacttccacgcgggcgggagcaaatgctctacctggcccctgccgcagccaagtcagcataacccaaggtcctcctaccataacataaccgatgtctgcgagctggcggtgggccctgcaggagctccggccactctcctgaatgaggctggtaaggacgccctcaagtctagccagactatcaaatcaagggaagaagggaaggctacacaacagagagaagtcgaaagttttcattccgaaaccgatcaggataccccttggttgctcccccaggaaaaaacaccattcggctctgctaaacctctcgattacgtcgaaatacacaaggttaataaggacggggccctgtcccttctaccaaagcagcgggagaattccggcaagccaaagaaacctgggactcccgaaaacaataaggagtatgcaaaagtctccggagttatggacaacaatattctggtgctggtccctgacccgcatgctaagaatgtggcttgttttgaagagagtgctaaagaggccccgccgtccctggagcagaatcaggccgagaaggcactggctaacttcaccgcaactagctccaagtgtcgattacaattaggcggcctcgactatttagaccctgcctgcttcactcactcctttcactag

SEQ ID NO: 81190 - DNA, 1566 bp, Artificial Sequence
  derived and/or modified sequence
atgaaggagaatgtggcttccgcaaccgtttttaccttgctcctctttctaaacacctgtctgttgaatgtgcagcctgacccacctcttgagttggccgttgaggtgaagcaaccagaggataggaaaccatacctctggatcaagtggtcccctcccacgctaattgaccttaagacaggttggtttactcttctctacgaaatacgccttaagccagagaaagcagcagagtgggagattcattttgccggccagcagacagagttcaagatcttgtctctgcatcctgggcaaaagtacctcgttcaggtgcgctgtaaacccgaccacggatactggtccgcctggagccccgcaacctttattcaaattccgtccgacttcaccatgaacgatactactgtttggatttctgtggccgtcctgtccgctgttatttgtctgatcattgtgtgggccgtggctttaaaagggtactcaatggtcacctgtatcttcccccccgtcccaggccctaaaataaaagggttcgatgcacacctgcttgaaaaggggaaaagtgaagaattgcttagtgcgctgggctgccaagactttcccccaacttctgactacgaggacctcctggtggaatatcttgaggtcgatgactcagaggaccagcacctgatgtccgttcactccaaagagcatccctcccagggtatgaagcccacctacctcgacccagatacggattcaggccgcggatcatgtgactccccctccttgctgtcagagaaatgcgaggagccgcaggcgaacccctccacattttatgacccagaagtgattgagaaaccagagaatccagaaacaacacacacttgggatccccagtgtattagcatggaaggtaagattccatactttcacgctggggggtctaagtgctcgacttggcccctcccacagcctagtcagcacaatcctcggtcgagttaccataatattacagatgtttgtgaattagctgtaggccccgccggcgccccagctacactcttgaatgaagccggcaaggatgcgttgaagtcctctcagactatcaagtcccgagaggagggcaaagctacgcagcagcgcgaggttgagagtttccactcggaaaccgatcaggacactccctggctcctacctcaggagaagacaccttttggaagtgcaaagcccttggactatgtggagatccataaggtgaataaggacggggccctgtcccttctacctaaacaaagagagaactctggcaagccaaaaaaacctggcacacccgagaataacaaagaatatgctaaggtctcaggagtaatggacaacaatatactggtactggtgcctgacccgcatgcgaaaaacgttgcttgtttcgaggaaagcgcaaaggaggcacctccatctctggagcagaatcaggctgagaaggcccttgccaatttcacagcgacctcttctaagtgcagactccagttgggtggccttgactatcttgacccagcttgttttacacattccttccactag

SEQ ID NO: 81191 - DNA, 1566 bp, Artificial Sequence
  derived and/or modified sequence
atgaaggaaaatgtggccagcgccaccgtcttcaccctgctgctcttcctgaacacctgcctgctgaatgtgcagcctgacccccccctggagctggccgtggaggtgaagcagcctgaggacaggaagccctacctgtggatcaagtggagcccccccaccctgattgacctgaagacaggctggttcaccctgctgtatgagatccggctgaagccagagaaggctgctgagtgggagatccactttgctggccagcagacagagttcaagatcctgagcctgcaccctggccagaagtacctggtgcaggtgcgctgcaagccagaccacggctactggagcgcctggagccctgccaccttcatccagatccccagcgacttcaccatgaatgacaccaccgtgtggatctctgtggccgtgctgtctgctgtgatctgcctgatcatcgtgtgggccgtggccctgaagggctacagcatggtgacctgcatcttcccccctgtgcccggccccaagatcaagggctttgatgcccacctgctggagaagggcaagtctgaggagctgctgagcgccctgggctgccaggacttcccccccaccagtgactatgaggacctgctggtggagtacctggaggtggatgattctgaggaccagcacctgatgtctgtgcacagcaaggagcaccccagccagggcatgaagcccacctacctggaccctgacacagacagcggccggggcagctgtgacagccccagcctgctgtctgagaagtgtgaggagccccaggccaaccccagcaccttctatgaccctgaggtgattgagaagccagaaaatcctgagaccacccacacctgggacccccagtgcatctccatggagggcaagatcccctacttccacgccggcggcagcaagtgcagcacctggcccctgccccagcccagccagcacaaccccaggagcagctaccacaacatcacagatgtgtgtgagctggccgtgggccctgctggggccccagccaccctgctgaatgaagctgggaaggatgccctgaagagcagccagaccatcaagagccgggaggagggcaaggccacccagcagcgggaggtggagagcttccacagcgagacagaccaggacaccccctggctgctgccccaggagaagacccccttcggcagcgccaagcccctggactatgtggagatccacaaggtgaacaaggatggagccctgagcctgctgcccaagcagcgggagaacagcggcaagcccaagaagccaggcaccccagagaacaacaaggagtatgccaaggtgtctggagtgatggacaacaacatcctggtgctggtgcctgacccccacgccaagaatgtggcctgctttgaggagagcgccaaggaggccccacccagcctggagcagaaccaggccgagaaggccctggccaacttcaccgccaccagcagcaagtgccgcctgcagctgggcggcctggactacctggaccctgcctgcttcacccacagcttccactag

SEQ ID NO: 81192 - DNA, 1566 bp, Artificial Sequence
  derived and/or modified sequence
atgaaggagaacgtggccagcgccaccgtgttcaccctgctgctgttcctgaacacctgcctgctgaatgtgcagccggatcctccactcgagctcgcagtggaggtgaaacagcctgaggaccgcaaaccttatctctggatcaaatggagcccaccgacactgatcgacctcaagaccggatggttcaccctattgtatgagataagactcaagcccgagaaagccgccgaatgggagattcatttcgccggccagcagacagaattcaaaatcctgtcgttgcatccaggtcagaaatacctcgttcaggtcagatgcaaacccgatcacggctactggagcgcatggagccccgcaacattcatccagatccccagcgactttacaatgaacgataccaccgtatggataagcgtagccgtccttagcgcagttatatgtctgattatcgtgtgggctgtggccttaaaagggtacagtatggtgacttgtatttttccccctgttcccggaccaaaaatcaagggttttgacgcacacctgctagagaaggggaaaagtgaagagctgctgtcagcactcggatgtcaggactttccgcctacaagtgactacgaggatctcttggttgagtatctagaagtggatgactcagaggaccagcacctgatgagtgttcatagtaaagagcacccatcgcagggcatgaagccgacctacttagaccctgataccgactccggcaggggcagctgcgactcacccagcctgctgagtgaaaagtgtgaggagccgcaggctaatccctctaccttctatgaccctgaggtcattgagaaacccgaaaacccagagaccacacacacgtgggatcctcagtgtatcagtatggaaggcaaaataccatactttcacgccggaggtagcaagtgcagcacatggcccctaccccagccatcccaacacaatccacggtcctcatatcacaatatcacagacgtgtgtgagctggcagtgggacccgccggggccccggccacactactgaatgaggccgggaaggacgcactgaagagcagccagactatcaaatcaagggaggagggtaaagccacccagcagcgagaagtcgaatctttccatagtgagaccgaccaagacactccatggcttctgccccaagagaagactccattcggcagtgccaagcctttagattatgttgagatacacaaagtcaacaaggatggcgctctctctctcctccccaaacagcgggaaaactccgggaagccaaaaaaaccgggtacccctgaaaataataaggagtacgctaaggtgtctggcgtgatggataacaatattctggtgctggtgccggacccccacgcaaagaacgtggcctgctttgaggagagcgctaaggaagctccacccagcctggagcagaaccaagccgaaaaagcactggcgaattttactgccacttcatctaaatgtcggctccagctgggcggtctcgactatttggaccctgcctgcttcacccacagtttccactag

SEQ ID NO: 81193 - DNA, 1566 bp, Artificial Sequence
  derived and/or modified sequence
atgaaggagaacgtggccagcgccaccgtgttcaccctgctgctgttcctcaatacttgtctacttaacgtgcagcccgatcccccacttgaattggcggtagaagttaagcaacccgaagatagaaagccttacctctggatcaaatggtcgccacctactcttatcgatctgaaaactggatggttcaccctgttgtatgagattagactgaagccagaaaaagctgcagagtgggaaatccatttcgcagggcagcaaacagagtttaaaatcctgtccttgcatccaggtcagaagtacctggtgcaggtccgctgcaagcccgaccacggctattggagcgcctggagtcccgcgacgttcatccagattccctctgactttacaatgaatgacacaacagtgtggatctcagtcgcagtcctcagcgcggtcatttgtctgattatcgtttgggctgtggctctgaaaggatattccatggtcacatgcatcttcccacccgtgccgggccctaagattaaaggcttcgacgcccacttgctggaaaagggtaaatcggaggaactcctgagtgctctgggctgccaggactttccacccactagtgattatgaagatcttctggtggagtacctggaggtagatgatagcgaagaccagcatctcatgtcagttcattcaaaagaacacccaagccagggcatgaaacccacctatttagacccagataccgatagcggacggggaagttgtgatagccctagcctgctgtccgagaaatgtgaagaacctcaagcgaatccaagtactttctacgatccagaggtgattgaaaagccagagaatcctgagaccacacatacctgggatccgcaatgtatctcaatggagggaaagatcccatactttcacgcaggagggtctaagtgttctacttggccactgccccagccatctcagcataatccgcggtcatcatatcacaatatcaccgacgtctgtgaactcgctgtggggcctgctggcgcacccgcaaccttgctcaacgaggctggaaaggacgcacttaagtccagtcagacaataaagtcccgagaagaggggaaggctacccagcagcgggaggtggaaagcttccactcagagacggatcaagacaccccttggctgttgccacaggaaaaaactccattcggtagcgccaagcctctagactatgtggaaatacacaaagttaataaagacggggctctctccctgctgcccaaacagcgggagaactctggaaagcccaaaaagcccggaaccccagagaacaataaggagtatgctaaggtctcaggcgtgatggacaataacatattagtgctggttccggacccacacgctaaaaatgtggcgtgctttgaggagagtgcgaaggaagcacctccttcgttagagcaaaatcaagccgaaaaggcgctcgcaaattttactgcgacgtccagcaagtgtaggctgcaacttggcggtttggattaccttgaccctgcgtgtttcactcactcgttccactag

SEQ ID NO: 81194 - DNA, 1566 bp, Artificial Sequence
  derived and/or modified sequence
atgaaagagaatgtcgctagtgcgacagtgttcaccctcctgctttttttgaatacgtgcctcctcaacgttcagcctgacccgcctctcgagcttgccgttgaagttaagcagccagaagaccgcaaaccatacctgtggatcaagtggtcaccgcctacattgattgaccttaaaacaggctggttcactctactttacgagataagacttaagcccgagaaagccgctgaatgggagattcacttcgcaggccaacagaccgagttcaaaatcctgtctctgcacccaggtcagaagtaccttgtgcaggtgcgatgtaaacctgaccacggctactggagcgcgtggtcccccgcaacattcatacagataccctccgactttactatgaatgacactaccgtatggattagcgtggccgtgctctccgccgtgatatgcctgatcattgtgtgggcagtggcgctaaaaggttatagcatggtgacatgcatctttccgccagtccccggacccaaaatcaagggattcgatgcccacctgcttgaaaagggtaagagtgaagagttattgtctgctttgggttgccaggattttccgccaacaagcgactacgaggatctcttagtagagtatcttgaggtcgatgacagcgaagaccagcacttaatgagcgtccattctaaagagcacccgtcccagggcatgaagccaacctacctagatcctgacaccgatagtgggagaggctcctgcgatagtccctcgctcttgtcagagaaatgtgaggagcctcaggctaatccctcaactttctacgaccccgaggtgatcgaaaagcctgagaatcccgagacaactcacacgtgggacccacagtgcatttccatggaagggaagataccatacttccatgcagggggaagtaagtgctccacatggcctctgccacagccttcacagcataaccctcgcagcagctaccataacattacagacgtgtgcgagctggcggtgggacccgcaggcgcacccgcaaccttgctaaacgaagcaggaaaagatgccctcaagtccagccaaaccattaaatcacgggaggaggggaaagccacgcaacaaagggaggtggaaagctttcacagcgagaccgatcaggacactccgtggttactgcctcaagagaaaacccctttcggctccgcgaaaccactggactacgttgagatccataaggtaaataaggatggggctttgagtctgcttccaaaacagcgtgagaacagcggtaagccaaaaaagcctggcactccagaaaataacaaggagtatgcaaaagtgtccggggtaatggacaacaatattctggtcctggttcccgatccacacgctaagaacgtggcctgcttcgaagaatccgccaaagaagctcccccttctctggaacaaaaccaggccgagaaagctcttgcaaattttaccgctacctcatctaagtgtcgactccagctggggggactagattatctggaccccgcatgtttcacccactcattccactag

SEQ ID NO: 81195 - DNA, 1566 bp, Artificial Sequence
  derived and/or modified sequence
atgaaggaaaacgtggcatccgcgacagtgttcacactgttactgttcctgaacacttgcctattaaacgtgcagccagatcctcccctggagctggcagtcgaggtaaagcagccagaagatagaaaaccgtacctgtggattaaatggtcccctcccaccctgatcgacctcaaaactggctggttcacccttttatacgaaattcgtcttaagccggaaaaggcggcagagtgggaaatccattttgccggacaacagaccgagttcaaaattctgagtctccatccaggacaaaaatatctcgttcaagttaggtgcaaacctgatcatgggtactggagtgcctggtcgcctgcgactttcattcagattcccagcgactttactatgaacgacaccactgtgtggatctctgtcgcagtactctctgcggtaatctgtctgattatcgtgtgggccgtagccctcaaggggtactcgatggtgacatgcatcttccccccagtgcccggacctaagattaagggcttcgacgcccaccttttggagaagggaaagagcgaagagcttctttccgcactgggttgccaggacttccctcctacaagcgactacgaagatctgctggtcgagtacctcgaagtggatgactctgaggaccagcatcttatgtcagttcactcaaaggagcacccttcccaggggatgaaaccgacttatctggaccccgatacagacagcgggagggggtcttgcgactcaccatcccttttatcggaaaagtgcgaggaaccacaggcaaacccctccactttttatgaccccgaggtgatagagaagccagaaaacccagagacaacacatacctgggaccctcagtgtatttcaatggagggcaagatcccctattttcatgccggtggatccaagtgctcaacgtggcctcttcctcaaccatctcaacacaacccccgtagcagctaccacaacataaccgacgtgtgcgaactagcggtcggtcctgccggagcaccagcgaccttgctgaacgaggcgggtaaagatgcgctgaaaagttcccagaccatcaagtctagagaggaaggcaaggccactcagcagagagaagttgagtcatttcacagcgagacagaccaggacacgccatggcttttgccacaggagaaaactcccttcggctctgctaagcctttagattatgttgaaatccacaaggttaacaaggacggcgcattgtctctattgcctaagcaaagggagaactcggggaaaccaaagaagccagggaccccagagaacaacaaggagtacgccaaggtgagcggcgtcatggataacaacatcctggtactcgtgcctgatccacatgccaaaaacgtggcctgctttgaagagtctgccaaagaagcaccacccagcttggagcagaatcaagccgagaaggctcttgccaactttaccgctacgtcatcaaaatgccgtttacaactgggcggactagattacctcgatccggcatgttttacacactcctttcattag

SEQ ID NO: 81196 - DNA, 11485 bp, Artificial Sequence
  derived and/or modified sequence
ccgatctggggggaatcagttgtttcttcaggtcttcgcaggattccagctcccccaactacctccgtcgccttctaaaactggcaggctctggacgttttgcatgctgaagaaaatcactgttttgcctccagcaaggaacataaatgttgcaacactgactcctcctctcatgaagaaagagtgaacaagtgcaccgagttgagcttcttctcacagagccaccgggctggggaccggggagcggaggctgaaatccccagacgccggttttctgggctgggctttctgccttactcactccttctccctctttctggattttaccgaccgttcgcgaaacagctttccacacaatggagcttcatgtcctcgtgcaggaagtactcatcgactgatgtggcagactttgctccctggcaaaactaaagaactctcctattcatggaggcgaacactgaggatgctttccacatgaaccctgaagtgaacttctgatacatttcctgcagcaagagaaggcagccaacatgaaggaaaatgtggcatctgcaaccgttttcactctgctactttttctcaacacctgccttctgaatgttcagccagaccctcctttggagctggctgtggaagtaaaacagccagaagacagaaaaccctacctgtggattaaatggtctccacctaccctgattgacttaaaaactggttggttcacgctcctgtatgaaattcgattaaaacccgagaaagcagctgagtgggagatccattttgctgggcagcaaacagagtttaagattctcagcctacatccaggacagaaataccttgtccaggttcgctgcaaaccagaccatggatactggagtgcatggagtccagcgaccttcattcagatacctagtgacttcaccatgaatgatacaaccgtgtggatctctgtggctgtcctttctgctgtcatctgtttgattattgtctgggcagtggctttgaagggctatagcatggtgacctgcatctttccgccagttcctgggccaaaaataaaaggatttgatgctcatctgttggagaagggcaagtctgaagaactactgagtgccttgggatgccaagactttcctcccacttctgactatgaggacttgctggtggagtatttagaagtagatgatagtgaggaccagcatctaatgtcagtccattcaaaagaacacccaagtcaaggtatgaaacccacatacctggatcctgacactgactcaggccgggggagctgtgacagcccttcccttttgtctgaaaagtgtgaggaaccccaggccaatccctccacattctatgatcctgaggtcattgagaagccagagaatcctgaaacaacccacacctgggacccccagtgcataagcatggaaggcaaaatcccctattttcatgctggtggatccaaatgttcaacatggcccttaccacagcccagccagcacaaccccagatcctcttaccacaatattactgatgtgtgtgagctggctgtgggccctgcaggtgcaccggccactctgttgaatgaagcaggtaaagatgctttaaaatcctctcaaaccattaagtctagagaagagggaaaggcaacccagcagagggaggtagaaagcttccattctgagactgaccaggatacgccctggctgctgccccaggagaaaaccccctttggctccgctaaacccttggattatgtggagattcacaaggtcaacaaagatggtgcattatcattgctaccaaaacagagagagaacagcggcaagcccaagaagcccgggactcctgagaacaataaggagtatgccaaggtgtccggggtcatggataacaacatcctggtgttggtgccagatccacatgctaaaaacgtggcttgctttgaagaatcagccaaagaggccccaccatcacttgaacagaatcaagctgagaaagccctggccaacttcactgcaacatcaagcaagtgcaggctccagctgggtggtttggattacctggatcccgcatgttttacacactcctttcactgatagcttgactaatggaatgattggttaaaatgtgatttttcttcaggtaacactacagagtacgtgaaatgctcaagaatgtagtcagactgacactactaaagctcccagctcctttcatgctccatttttaaccacttgcctctttctccagcagctgattccagaacaaatcattatgtttcctaactgtgatttgtagatttactttttgctgttagttataaaactatgtgttcaatgaaataaaagcacactgcttagtattcttgagggacaatgccaataggtatatcctctggaaaaggctttcatgatttggcatgggacagacggaaatgaaattgtcaaaattgtttaccatagaaagatgacaaaagaaaattttccacataggaaaatgccatgaaaattgcttttgaaaaacaactgcataacctttacactcctcgtccattttattaggattacccaaatataaccatttaaagaaagaatgcattccagaacaaattgtttacataagttcctataccttactgacacattgctgatatgcaagtaagaaataatgcctccaattttttcttaaaatagtttagatatgttaagcatggattttccccctaaattctactctaaagcttctataaaatatagtttggaaataaaaatgttcttacacaaggggcaaatgaatttcatgtgaatccctttaggatgttttcctccttcatttcagcatgatagataatttattatacaccttagtctttccttagttaaaaaaaaattccctaaagactaacttgaaaagaaaaccacagcaggatgctaatggaattactgccttactgtacatacaaattctactttaatataaacccataagtttaactgtatttttgaagactatttttctatgacttaggtaaaataaaagactattttctattttcccagtacagctgtttatgtattcagtgggtacagtattttctgctgcaaggttataatgtgtatttacagtacatagtagtatataaagttcccgtttgtggagtaaaatgccataccaacccaaagcccactgtgaaatatgaagtgaatgacaaaattcagttttcaacgcaatatagtatagtttatctgattcttttgatctccaggacactttaaacaactgctaccaccaccaccaacctagggatttaggattctccacagaccagaaattatttctcctttgagtttcaggctcctctgggactcctgttcatcaatgggtgaatcttcctaaagctaccataaaaagggagggcgacgatttctaacagctgtttaaaagagagaggttttgcttttgtgagaaatcttgggccacaaaaaaattttaagcaaagccaggagttagtgtctctctgaagtaaattcaattgcaaaatcttggcagaggcagaaatggctcatatcagaagtgtccaaataaaagttctgggaaactaggtatttgcttcccagagcaatgggaatagctccaaaggtcagagtaaggtaatgagaatctcccggtcaattccagtgccaggcttcctgaaagaagtcaaagcttggatcctcattttaaagggcgcatccatgactcatctagcagcccctctctatttttcccttcacttgatggtaaatccattctatatgtccatttactagctggacatagagaacttgagctcacctctgggagttaaatattccaccccaactatcccatattgatagcaactggactcagaggtccccctcctgtttgaaagtgaacacattgccaatgttttgagaatggcaaaagcaatagatacgaagctccatttttctaatatataaacaatatcatgtgagtaagggaagcgtgtgggaaagttgtccaagctcattcagtcccctaaatcctcgatactttaactgtctgagaaccaactgcataggcatcacctgggcagtgtttgaaaattccatttgcagaatcttaagcatcagaatctgcattttactaagatccccaaatgattcaattgcacactgaagtttgagaagcattgttctagacaaccatttccactaaaggttattttagttcatagtaacaatcctcttttggaaaggacagatcaagtctgtttgacttgcaatgaacaacactgcatgtaagcaggcaaaaaaagaaacatatcagtagtttaagattcacattatgctgaatcttatatgaattcacataaaagaatgacctgcaaaactacgcacaacttctgaaaggccaaggaatataatctaccttgagagacattaaccaaagacagtcaccctcaaagccaatgcagactaaatctttcctaacatagtctattctctaagaatagagaagatatgtatcagtcactcttatagtctgaaaacctaaacataaaagtaatctgcttttgacatataattttgtataatacgtatgaaaaaatgtgacagctaaggacttgaattaaatccctaaaaaacaattagccactcattaggccaagactttaattctatgatcaattagcactgtttatctgaattaagcttttttgtggtctaacaaaaagtttttttgtggtctatcaaggagacagctgttcaaatggaaggatacatgtggggcaggggggcggtgaagagacctagattctggtcctaactgctttgccttggagagattaattcccccctctaagcctcagtttcctctgaagatgttggaccagataacctctaaggtcctttgaaactgactccttgattccatgactcactgaatatttttctgcaaagataatcccaaccaatgccttctatcctaatctaacaaaaaattgctcttcatcatagaaatacaaagtaatcttcagtgatgtgctctttatactttgctttttaaaccgtccattccagttggtcttaatatattgcacaagtattttataagtgaaatgtgtacagaatcatattctaagattatgtgcaaatatatgtgtagaaagaggcatttaaaaaaagaggcaggagattgagaagagacatattgaatgaggcactaatctttagaaaaatgatcttttactgaatcaagccatgctcattccttgctgaatccaacagccccaaatctcttttcttatatttggctgttaatttttttccttgcaccatcctagattgttaacaaccattgcacagttggctcatgtatccttacactctgagttataataagttgtatttttataaacaaatacctaaatattcaagttttaaggcgcatggaaactgaatctaggcaacgggtgatttgtgtagcttacaacctgaacagcaagatgttccaattcattctaacagatgtgtataagcacaagttatatcagctgtgtcagatatttaacagatcctacatttattagctatataacagactctacattttcctaagtgcctaagaccaatcctggtagtcacttaagtacaaaagactcactttaactggcttggtctgaaggggtcaatcctttactgcctgtacaagatctgggcagttttgctctgtgtcttgtgatgacccagctgaatgtgaaaagcctatgagttattgagcaaccagaggtccctgcattccaagttgcagtttagctctggggaaactctggctttctctttcctcaagtgtccaccactgcccatcatttgcagaaagacttggccctgcctttagcaacttccctatctccttagagtagacaagaaagaaacagatttgtgcacattttacaaagtgccttcctctatttttttttaaagttttcattttgcaaggaaaaatgtattgattagaaagtaacatttgccttatagggattatatatatatatagatatagatatagatatgtatgaatggagagatgagaagaagccagaaagggcacaacaaaatggtctaagggccaaccagcaatgttcagtgaatgtttacgtattgtttaattgaatcaacacagagctgttgtgaatagtgtgacttactttgcctgataagaaattgaggctggctgtgatttggggataaacctgccaccctgtgatttgagactctccataccaaaacttattgatacatttttgaatgtcattggcttacatgcctaaacctgaagagaacaatgcatgcacattggaactttgtacacaaacagaaaaatataaatgactttgaattaccatcccaagcattgctaacgtagatgtgccattgacgaaagtctcatgtgttcttgagtgaacaaatttccttttcttcctttttggctcaagcacaataatgctgtcactgagacagtgactgagcactcaatgtccaagactaaatcacatcaccacgactaagtaggcactatgtcctgggatgagtcttttaaactctggccatcaggttccttacttgttaaataagtaggttggcctaaaaggtttctaagacctctcatgatctaggtaaaatccagggtttcaggtcagtgtccctggtgcagtgcaagaaagccttgctgacacacccttggcctgaagcagtgagcacatgagattgtgtgacaacgcttcagagaaaaacagagatctgttcctccaactcagattgatttaacatccttgcttctccttttccttcctggctttacatatttgtagggtttttactccttctccagagcctactattttcctaagagttagtagcaaccataggatccacaagaaatgaaattattcatcaacaatgactttggcactgcaaaagactgagtcaaaggttaaatcagtcacacagatatccaaggccaagttgaagatcacaagtatatcccatttagagatttgcatacttagagattaagcccatgttcattaattatttagttaattcaaaagccattaataaatccatgcccagcctacgcaacatagtaagacccagtctctacaaaaattttaaaaattagccagccatggtgacacgtacctgtagtcctagacacttgggaaggtgaagccagaggattgcttgagcccaggaggtcgaggctgcagtgaaccgtgattgtgtcactgcactccagcctgggtgagagagcaagaccttgtctcaataaataaacccaagttacttcgatgactagatactggaggtctgaaggagaagctttaaaaatacagattgattgcttcagagaaatcctatttataattatgatctgaacttattctatgattagcaaatatatcatctgaaaataaaacaggagttctctccccagacttttgtttttcaggatggtgagttttggtctgggaccctcatggcacccattttgataaaaggaaaaagatagtaaaacaggaaataggaagtttccagagatttgggcatctcaggattccatgaaatgctgagactaacccactaaatccaaattttattggctatggtaaatctaaatctgttcagtgttctgaacagattttatgagtttatgtctaagagtttatgtctaagagaggtacataattcacaaacactatcatgctggcagctgttttgtccacatcaattcccttgatttaatgctctgatttcaatttagaaagtactgagacatgtaaagtctcaaaataggaaaaacctatcctgtttataaggtgtggtcaataaatagaccacagataatcttagtctattaattaactctcagatcatcttagactattaattaacattctgcttgctgctgattaaaaagaaaaaaaccctaaaaccttcagcaactgaagtagtaatataaaaaataacctttaatagttatggtcaaattacgcttcacttggataaacctcaaaatgtagtctgagtttttttgtgcacacttcacaaatcctgggggaaaaatcttttttccacgttatctgaaaaactatatggcgaagataccgctgaaaaataatttgttttatgaaattcctgaaaagctaattttgaattttttaaagtaactacctcccttttgtgtcctaatgtccttccttcaaagctgcttatagtttagaaatgaaagatgtcatgtctcatgctttgactggttttcggtggcatatttgatgtatttgccaagtggcattactgactttacagtaactgttacattattttgtactatattgctttatgtggttcaaaaatagtatatgccatattgaaatatgtaatcctcatgttgtgaaactcatcatgtaatacaatgaaaatcattacttaataacttacaatttatccatatgtagtttcaatatgattgtgtctatgactgtaaaacaaactgaaaaaatatgtaatgtatttctgttgaaagcgtgaatgtactaattttttcctaatcttgtctagaagaaagattctatgtcattcattgtacagctgctctggggtgttacacatttaaagtacaatccaacagttgtttgaaagtcagcctctcggctttgtttcatgtgactgctgacacttctcaagtgttctttgcataatgaggctggattttgtgcttcatcgttcattttaaacaattgaaaagtctcatgtggaaaccaaagcaatctagaaccagcctgttgggtgactgtgtcttctgtaaagccatattgaagtgaagttatacataatagcataaggttccacattttcaaagctaccactacctctgcttttcctctttccctagaaaatgccaagcaaaattccccaacactaagtgagaaattagaagtaattgttttataattaagttgctgggttttttttttaacaccttctaattcatcactttgtagggttatgcaagagtttctgaataaccattcttacatgtttatattttataaaaaccggctgcaagaaagattcagaaagaatacttagtaagtcatcatatgaaaaaccaacaaaaccatagagtgcagattttttcctaactataagtcacctcatagttgtccaaagccatgataatgatatctcttacaaattgacttctgtaacccccctagaaataacccttttccttatttgattttagtcatcaaacatagtatgatatgggaaaagtcagccatttaccagaaattatcttattttgattttaaaaactcatttctatatgtagttattgtaatgtctatttttttagacttaaagatttatagaagactatagttatctgatttgttattttgcatttttcattctgtaaatctttgcttatggcacattgtgctctctgttttccatggttttattcatttatctcctcctattttgaggggacaacatgggtagttaaatctttgtcaatagtattggagataacactaactgctattatcataacatcttcatttttactgcatgccaaaaccaatgcctgccaaacaaaatcttagacatcccaatataatatgttagttatatttctattcacatcattattgaaaatacccagctcagtgcctggcttaataaatgtttaattcccttacctactcttgctctatttttttatttgaaatggagatgagcaaaataacacattcatggctgaagcaattttttggacatttcttgttaccaaaagatctataatcaggacattgtttatgtaagttggacaaaaaaaattcttcccctttatgtccacccttcctatgattgcaagacaaaatttccctcctttacctcatccctataacatgggaggctgagaaaaatgaggggagatggaaccagatacaaggagatccaataagagaagcttatttaaatattgtgaaataaaggaagaaccaaagcatttttttaagtggggaatccttttgaacagttattatttatccatattattaacaacatcttttctgacaaaatccatcagatgaagtgtaaatggataatcttttaatggatctaaacctagaaagtttcacttactgttcatgtccgtgttccagaattgtgaaatggtgtgtggttttgctttccaagttcttctctgcctcctcttaattctctaattccatgtcttacagaagaatgagaaatttctttcttacttgagtatcatgctctaaaaaacttggcttcagtcacagaaacgctggctctcctgtgcttatattgaagccaactgcctttaattcttgggccctcttatatttttaaggtgcaaaatttgaagtctcagtcaccagacacaggttctatacaattaatgatgagctggagaagtaatatgtagctaatttttcaaaagcattgaatatactttccggaaagaaaacagaaattaaatattgccacatcttgccagaatcccatctgacaccttaactttgtcaggtttcctacaacttgctaatcaagttttatacattctaaatctccccagtttctttggggctggaagatgcaacttccatttaatagaaactttgaaatcttggggtaagggagcagtggggggactagggagaaggataagaaatagaattattgaaaagcccccaccagggaccttcctggccagaatatgcagagtaattcctgctggcttcacctttgaaagtccctcgaaactatgcagatgaaactgagtctgtttttgatattgtcagatgtattctaccttggaagtcccaacacctaaactggaattcttgtatttacatctcctccactgtcccccacaccacccctcaattcctgctgcccctgctaatgttaagcatttttctcttgttatcatcaggttcacattaaaaacagatacttacaaactgacttgaagcacagatacttttacgaatgtgataaaatattttcttaagaaaaggaaagaggatgtgggtcaaataaaacaccgcatggatgttgattggtgaatactggtgtaagaaaagggagctcaggaatttttattactgtatttgtaaatgagtttgaaggaatttgtaaatgccactggtacatttttaaggtgacacatttgctccttataaagttattaaaaattacagggtaagcttaaatgacgtttgccagtagttttactttatataatcaatattgatattgttgctgaactatgtaactttatgatgcatttttcagtcccttttcagagcaaatgcttttgcaatggtagtaatgtttagtttaaattgacttaataaattattacctgagcaatggtt

SEQ ID NO: 81197 - DNA, 1566 bp, Artificial Sequence
  derived and/or modified sequence
atgaaggaaaatgtggcatctgcaaccgttttcactctgctactttttctcaacacctgccttctgaatgttcagccagaccctcctttggagctggctgtggaagtaaaacagccagaagacagaaaaccctacctgtggattaaatggtctccacctaccctgattgacttaaaaactggttggttcacgctcctgtatgaaattcgattaaaacccgagaaagcagctgagtgggagatccattttgctgggcagcaaacagagtttaagattctcagcctacatccaggacagaaataccttgtccaggttcgctgcaaaccagaccatggatactggagtgcatggagtccagcgaccttcattcagatacctagtgacttcaccatgaatgatacaaccgtgtggatctctgtggctgtcctttctgctgtcatctgtttgattattgtctgggcagtggctttgaagggctatagcatggtgacctgcatctttccgccagttcctgggccaaaaataaaaggatttgatgctcatctgttggagaagggcaagtctgaagaactactgagtgccttgggatgccaagactttcctcccacttctgactatgaggacttgctggtggagtatttagaagtagatgatagtgaggaccagcatctaatgtcagtccattcaaaagaacacccaagtcaaggtatgaaacccacatacctggatcctgacactgactcaggccgggggagctgtgacagcccttcccttttgtctgaaaagtgtgaggaaccccaggccaatccctccacattctatgatcctgaggtcattgagaagccagagaatcctgaaacaacccacacctgggacccccagtgcataagcatggaaggcaaaatcccctattttcatgctggtggatccaaatgttcaacatggcccttaccacagcccagccagcacaaccccagatcctcttaccacaatattactgatgtgtgtgagctggctgtgggccctgcaggtgcaccggccactctgttgaatgaagcaggtaaagatgctttaaaatcctctcaaaccattaagtctagagaagagggaaaggcaacccagcagagggaggtagaaagcttccattctgagactgaccaggatacgccctggctgctgccccaggagaaaaccccctttggctccgctaaacccttggattatgtggagattcacaaggtcaacaaagatggtgcattatcattgctaccaaaacagagagagaacagcggcaagcccaagaagcccgggactcctgagaacaataaggagtatgccaaggtgtccggggtcatggataacaacatcctggtgttggtgccagatccacatgctaaaaacgtggcttgctttgaagaatcagccaaagaggccccaccatcacttgaacagaatcaagctgagaaagccctggccaacttcactgcaacatcaagcaagtgcaggctccagctgggtggtttggattacctggatcccgcatgttttacacactcctttcactga

SEQ ID NO: 81198 - DNA, 1566 bp, Artificial Sequence
  derived and/or modified sequence
atgaaggagaacgtggccagcgccaccgtgttcaccctgctgctgttcctgaacacctgcctgctgaacgtgcagcccgacccccccctggagctggccgtggaggtgaagcagcccgaggacagaaagccctacctgtggatcaagtggagcccccccaccctgatcgacctgaagaccggctggttcaccctgctgtacgagatcagactgaagcccgagaaggccgccgagtgggagatccacttcgccggccagcagaccgagttcaagatcctgagcctgcaccccggccagaagtacctggtgcaggtgagatgcaagcccgaccacggctactggagcgcctggagccccgccaccttcatccagatccccagcgacttcaccatgaacgacaccaccgtgtggatcagcgtggccgtgctgagcgccgtgatctgcctgatcatcgtgtgggccgtggccctgaagggctacagcatggtgacctgcatcttcccccccgtgcccggccccaagatcaagggcttcgacgcccacctgctggagaagggcaagagcgaggagctgctgagcgccctgggctgccaggacttcccccccaccagcgactacgaggacctgctggtggagtacctggaggtggacgacagcgaggaccagcacctgatgagcgtgcacagcaaggagcaccccagccagggcatgaagcccacctacctggaccccgacaccgacagcggcagaggcagctgcgacagccccagcctgctgagcgagaagtgcgaggagccccaggccaaccccagcaccttctacgaccccgaggtgatcgagaagcccgagaaccccgagaccacccacacctgggacccccagtgcatcagcatggagggcaagatcccctacttccacgccggcggcagcaagtgcagcacctggcccctgccccagcccagccagcacaaccccagaagcagctaccacaacatcaccgacgtgtgcgagctggccgtgggccccgccggcgcccccgccaccctgctgaacgaggccggcaaggacgccctgaagagcagccagaccatcaagagcagagaggagggcaaggccacccagcagagagaggtggagagcttccacagcgagaccgaccaggacaccccctggctgctgccccaggagaagacccccttcggcagcgccaagcccctggactacgtggagatccacaaggtgaacaaggacggcgccctgagcctgctgcccaagcagagagagaacagcggcaagcccaagaagcccggcacccccgagaacaacaaggagtacgccaaggtgagcggcgtgatggacaacaacatcctggtgctggtgcccgacccccacgccaagaacgtggcctgcttcgaggagagcgccaaggaggccccccccagcctggagcagaaccaggccgagaaggccctggccaacttcaccgccaccagcagcaagtgcagactgcagctgggcggcctggactacctggaccccgcctgcttcacccacagcttccactag

SEQ ID NO: 81199 - protein, 349 aa, Artificial Sequence
  derived and/or modified sequence
MKENVASATVFTLLLFLNTCLLNGQLPPGKPEIFKCRSPNKETFTCWWRPGTDGGLPTNYSLTYHREGETLMHECPDYITGGPNSCHFGKQYTSMWRTYIMMVNATNQMGSSFSDELYVDVTYIVQPDPPLELAVEVKQPEDRKPYLWIKWSPPTLIDLKTGWFTLLYEIRLKPEKAAEWEIHFAGQQTEFKILSLHPGQKYLVQVRCKPDHGYWSAWSPATFIQIPSDFTMNDTTVWISVAVLSAVICLIIVWAVALKGYSMVTCIFPPVPGPKIKGFDAHLLEKGKSEELLSALGCQDFPPTSDYEDLLVEYLEVDDSEDQHLMSVHSKEHPSQEREQRQAQEARDS

SEQ ID NO: 81200 - protein, 34 aa, Artificial Sequence
  derived and/or modified sequence
MKENVASATVFTLLLFLNTCLLNGQLPPGKPEIF

SEQ ID NO: 81201 - DNA, 1050 bp, Artificial Sequence
  derived and/or modified sequence
atgaaagaaaatgtggcctccgccactgtattcacactgttactctttctcaatacgtgcctcctcaacggccaactacctcccgggaagccagaaatctttaagtgtaggagtcctaacaaagagacttttacttgctggtggcgacccggtacggacgggggcctccctactaattattccctcacttaccaccgagagggggagaccctcatgcacgaatgtcccgattatattaccgggggccctaacagttgtcatttcggcaaacagtacaccagtatgtggagaacgtatattatgatggttaacgccactaatcagatggggtcctctttcagcgatgagctgtacgtcgatgttacatatatcgtccaacccgacccaccactggagctggccgtagaagtgaagcaacctgaggatcggaaaccgtatctctggatcaaatggagccctccaacattgatagacttgaaaaccggatggtttactctgctgtatgaaatccgactcaaaccggagaaagcagccgagtgggaaatacatttcgcagggcaacagactgaattcaagattctgtctttgcacccaggacaaaaatatctggtgcaagtgcggtgcaagcccgaccatgggtattggagtgcctggtctccagctactttcattcaaatcccctctgactttaccatgaacgatacgacagtctggataagtgtagcagttttgagcgccgtgatttgcctcatcatcgtgtgggcggtggccctaaagggctatagcatggtgacttgtatctttcctcctgtccctggccctaaaatcaagggtttcgacgcccatctgctcgaaaagggaaagtcagaagaactgctatctgctctgggttgccaggacttcccacccactagcgattatgaggatttactggttgagtatctagaggtagatgatagcgaggatcagcacctaatgtccgtacatagcaaagaacacccatcacaggagcgcgagcagaggcaggcgcaggaggccagagattcctag

SEQ ID NO: 81202 - DNA, 1050 bp, Artificial Sequence
  derived and/or modified sequence
atgaaggaaaatgtggccagcgccaccgtcttcaccctgctgctcttcctgaacacctgcctgctgaatggccagctgcccccaggcaagccagagatcttcaagtgccgcagccccaacaaggagaccttcacctgctggtggaggcctggaacagatggcggcctgcccaccaactacagcctgacctaccaccgggagggggagaccctgatgcatgagtgcccagactacatcaccggcggccccaacagctgccactttgggaagcagtacacctccatgtggaggacctacatcatgatggtgaatgccaccaaccagatgggcagcagcttcagtgatgagctgtatgtggatgtgacctacatcgtgcagcctgacccccccctggagctggccgtggaggtgaagcagcctgaggacaggaagccctacctgtggatcaagtggagcccccccaccctgattgacctgaagacaggctggttcaccctgctgtatgagatccggctgaagccagagaaggctgctgagtgggagatccactttgctggccagcagacagagttcaagatcctgagcctgcaccctggccagaagtacctggtgcaggtgcgctgcaagccagaccacggctactggagcgcctggagccctgccaccttcatccagatccccagcgacttcaccatgaatgacaccaccgtgtggatctctgtggccgtgctgtctgctgtgatctgcctgatcatcgtgtgggccgtggccctgaagggctacagcatggtgacctgcatcttcccccctgtgcccggccccaagatcaagggctttgatgcccacctgctggagaagggcaagtctgaggagctgctgagcgccctgggctgccaggacttcccccccaccagtgactatgaggacctgctggtggagtacctggaggtggatgacagcgaggaccagcacctgatgtctgtgcacagcaaggagcaccccagccaggagcgggagcagaggcaggcccaggaggcccgggacagctag

SEQ ID NO: 81203 - DNA, 1050 bp, Artificial Sequence
  derived and/or modified sequence
atgaaggagaacgtggccagcgccaccgtgttcaccctgctgctgttcctgaacacatgcttactgaatggtcagctccctccaggaaaacccgagatctttaagtgccgcagcccaaataaggaaacttttacctgttggtggcggcctggaactgacggaggcttgcctaccaactatagcttaacataccacagagaaggcgaaactctaatgcatgaatgtccagattacatcacaggaggccctaattcgtgtcattttggcaaacaatacacgtccatgtggcgcacatatatcatgatggtgaatgccacaaatcaaatggggagtagtttttctgatgaactgtacgtggatgtaacgtacattgtgcagccagatccacccctggaattggctgtggaggtgaagcagccggaggaccgcaagccatacttgtggatcaagtggtctccacccaccctcattgacctaaaaaccggttggtttacactgctttatgaaattcgcctaaagcctgagaaagctgctgagtgggaaatccacttcgctgggcagcagaccgagtttaagatcctctctctgcacccaggacagaaatacctcgtgcaggtgagatgcaaaccggaccacggctattggagcgcttggagtcccgcaacattcattcagatcccatccgattttaccatgaatgatactacagtctggatctccgtggccgtactgagtgcagttatttgcctgattattgtctgggctgtcgccctcaagggttacagtatggtgacatgtatattccccccggtaccaggccccaaaattaagggcttcgatgcacacctcttagaaaaaggaaaatccgaggagctcctgtcagctctcggctgccaagacttccccccaacttccgactatgaagacttgctagtggagtacttagaagtcgatgactccgaggaccagcacctgatgtctgttcactccaaagagcacccttctcaggaacgcgagcaacgacaggcacaggaggcgcgagattcatag

SEQ ID NO: 81204 - DNA, 1050 bp, Artificial Sequence
  derived and/or modified sequence
atgaaggagaatgtggcgtcagcaaccgtgttcaccctccttctctttctgaacacttgccttcttaacggtcaactgccgcctggcaagcccgaaattttcaaatgtagatcacccaacaaggaaacattcacatgctggtggaggcctggcaccgatgggggtctcccgaccaattactccttaacatatcatcgcgagggtgagactcttatgcacgagtgtcccgattacattactggaggcccaaattcatgccactttggaaaacaatatacgagcatgtggcgtacctacattatgatggtgaatgctaccaatcaaatggggagcagttttagcgatgagctgtatgtggacgtcacatatatcgtgcaaccagacccacccttagagcttgccgtggaggtcaaacagcctgaagatcgcaaaccctacctctggattaagtggagcccccctactctcatcgatctgaaaacaggctggtttacactcctgtacgagatcaggctgaaacctgagaaggcagctgaatgggagattcacttcgcgggacaacagacagaattcaaaatcctgagcttgcatcccggacagaagtacctggtgcaggtccggtgcaaacctgatcatgggtactggagcgcttggtcacccgcaacatttatacaaattcctagtgatttcaccatgaatgacactaccgtttggatcagtgtggcagtgctttccgcagtgatctgtctgatcattgtgtgggccgtggcgctgaaggggtactcaatggtaacgtgtatcttcccgccagtccccggtccaaagatcaagggatttgacgcacatctgttagaaaagggaaagtccgaggaactgctgagcgccctcggatgtcaggatttcccccctacctctgattatgaggaccttttggtggagtatctggaggtggatgacagcgaggaccagcacctcatgtcagtacacagtaaggaacatcctagccaggagcgcgagcagaggcaagcacaggaggcacgcgactcatag

SEQ ID NO: 81205 - DNA, 1297 bp, Artificial Sequence
  derived and/or modified sequence
atgaaggaaaatgtggcatctgcaaccgttttcactctgctactttttctcaacacctgccttctgaatggacagttacctcctggaaaacctgagatctttaaatgtcgttctcccaataaggaaacattcacctgctggtggaggcctgggacagatggaggacttcctaccaattattcactgacttaccacagggaaggagagacactcatgcatgaatgtccagactacataaccggtggccccaactcctgccactttggcaagcagtacacctccatgtggaggacatacatcatgatggtcaatgccactaaccagatgggaagcagtttctcggatgaactttatgtggacgtgacttacatagttcagccagaccctcctttggagctggctgtggaagtaaaacagccagaagacagaaaaccctacctgtggattaaatggtctccacctaccctgattgacttaaaaactggttggttcacgctcctgtatgaaattcgattaaaacccgagaaagcagctgagtgggagatccattttgctgggcagcaaacagagtttaagattctcagcctacatccaggacagaaataccttgtccaggttcgctgcaaaccagaccatggatactggagtgcatggagtccagcgaccttcattcagatacctagtgacttcaccatgaatgatacaaccgtgtggatctctgtggctgtcctttctgctgtcatctgtttgattattgtctgggcagtggctttgaagggctatagcatggtgacctgcatctttccgccagttcctgggccaaaaataaaaggatttgatgctcatctgttggagaagggcaagtctgaagaactactgagtgccttgggatgccaagactttcctcccacttctgactatgaggacttgctggtggagtatttagaagtagatgatagtgaggaccagcatctaatgtcagtccattcaaaagaacacccaagtcaagagagagaacagcggcaagcccaagaagcccgggactcctgagaacaataaggagtatgccaaggtgtccggggtcatggataacaacatcctggtgttggtgccagatccacatgctaaaaacgtggcttgctttgaagaatcagccaaagaggccccaccatcacttgaacagaatcaagctgagaaagccctggccaacttcactgcaacatcaagcaagtgcaggctccagctgggtggtttggattacctggatcccgcatgttttacacactcctttcactga

SEQ ID NO: 81206 - DNA, 1050 bp, Artificial Sequence
  derived and/or modified sequence
atgaaggagaacgtggccagcgccaccgtgttcaccctgctgctgttcctgaacacctgcctgctgaacggccagctgccccccggcaagcccgagatcttcaagtgcagaagccccaacaaggagaccttcacctgctggtggagacccggcaccgacggcggcctgcccaccaactacagcctgacctaccacagagagggcgagaccctgatgcacgagtgccccgactacatcaccggcggccccaacagctgccacttcggcaagcagtacaccagcatgtggagaacctacatcatgatggtgaacgccaccaaccagatgggcagcagcttcagcgacgagctgtacgtggacgtgacctacatcgtgcagcccgacccccccctggagctggccgtggaggtgaagcagcccgaggacagaaagccctacctgtggatcaagtggagcccccccaccctgatcgacctgaagaccggctggttcaccctgctgtacgagatcagactgaagcccgagaaggccgccgagtgggagatccacttcgccggccagcagaccgagttcaagatcctgagcctgcaccccggccagaagtacctggtgcaggtgagatgcaagcccgaccacggctactggagcgcctggagccccgccaccttcatccagatccccagcgacttcaccatgaacgacaccaccgtgtggatcagcgtggccgtgctgagcgccgtgatctgcctgatcatcgtgtgggccgtggccctgaagggctacagcatggtgacctgcatcttcccccccgtgcccggccccaagatcaagggcttcgacgcccacctgctggagaagggcaagagcgaggagctgctgagcgccctgggctgccaggacttcccccccaccagcgactacgaggacctgctggtggagtacctggaggtggacgacagcgaggaccagcacctgatgagcgtgcacagcaaggagcaccccagccaggagagagagcagagacaggcccaggaggccagagacagctag

SEQ ID NO: 81207 - protein, 376 aa, Artificial Sequence
  derived and/or modified sequence
MKENVASATVFTLLLFLNTCLLNGQLPPGKPEIFKCRSPNKETFTCWWRPGTDGGLPTNYSLTYHREGETLMHECPDYITGGPNSCHFGKQYTSMWRTYIMMVNATNQMGSSFSDELYVDVTYIVQPDPPLELAVEVKQPEDRKPYLWIKWSPPTLIDLKTGWFTLLYEIRLKPEKAAEWEIHFAGQQTEFKILSLHPGQKYLVQVRCKPDHGYWSAWSPATFIQIPSDFTMNDTTVWISVAVLSAVICLIIVWAVALKGYSMVTCIFPPVPGPKIKGFDAHLLEKGKSEELLSALGCQDFPPTSDYEDLLVEYLEVDDSEDQHLMSVHSKEHPSQGDPLMLGASHYKNLKSYRPRKISSQGRLAVFTKATLTTVQ

SEQ ID NO: 81208 - DNA, 1131 bp, Artificial Sequence
  derived and/or modified sequence
atgaaggagaacgtggccagcgccaccgtgttcaccctgctgctgttcctgaacacctgcctgctgaacggccagctgccccccggcaagcccgagatcttcaagtgcagaagccccaacaaggagaccttcacctgctggtggagacccggcaccgacggcggcctgcccaccaactacagcctgacctaccacagagagggcgagaccctgatgcacgagtgccccgactacatcaccggcggccccaacagctgccacttcggcaagcagtacaccagcatgtggagaacctacatcatgatggtgaacgccaccaaccagatgggcagcagcttcagcgacgagctgtacgtggacgtgacctacatcgtgcagcccgacccccccctggagctggccgtggaggtgaagcagcccgaggacagaaagccctacctgtggatcaagtggagcccccccaccctgatcgacctgaagaccggctggttcaccctgctgtacgagatcagactgaagcccgagaaggccgccgagtgggagatccacttcgccggccagcagaccgagttcaagatcctgagcctgcaccccggccagaagtacctggtgcaggtgagatgcaagcccgaccacggctactggagcgcctggagccccgccaccttcatccagatccccagcgacttcaccatgaacgacaccaccgtgtggatcagcgtggccgtgctgagcgccgtgatctgcctgatcatcgtgtgggccgtggccctgaagggctacagcatggtgacctgcatcttcccccccgtgcccggccccaagatcaagggcttcgacgcccacctgctggagaagggcaagagcgaggagctgctgagcgccctgggctgccaggacttcccccccaccagcgactacgaggacctgctggtggagtacctggaggtggacgacagcgaggaccagcacctgatgagcgtgcacagcaaggagcaccccagccagggcgaccccctgatgctgggcgccagccactacaagaacctgaagagctacagacccagaaagatcagcagccagggcagactggccgtgttcaccaaggccaccctgaccaccgtgcagtag

SEQ ID NO: 81209 - DNA, 1131 bp, Artificial Sequence
  derived and/or modified sequence
atgaaagagaatgtcgcctctgccacagtcttcacactgctcctcttcctgaacacttgtcttcttaatggacagttgcctccaggaaagcctgagatatttaaatgccgttctccgaacaaggaaaccttcacatgttggtggagaccgggcacggacggcgggctgccaaccaactactcgctaacctatcatagggagggggaaaccttaatgcacgaatgcccagattatatcacaggcggtcctaactcctgccacttcgggaaacagtatactagcatgtggcgcacatatataatgatggtcaacgctacaaatcaaatgggtagttcttttagcgacgagctctatgtggatgttacgtatatcgtgcaacctgaccctccattagaactggccgtagaggtgaaacagccggaagatcgcaagccctacctgtggattaagtggtcccctccaacactgattgacctgaaaactggctggtttacacttctctatgaaatccggctcaaaccagagaaagctgctgaatgggaaattcattttgcagggcagcagacagagtttaaaatcctgtcgttgcaccccggacagaaatacttagtgcaagtacggtgcaaacctgaccacgggtattggtctgcctggtctcccgctacattcattcagatcccttcagattttaccatgaacgatacaactgtctggatttcagtagcagtgttgagcgcagtcatctgcttgattatcgtttgggcagtggccctgaaagggtactcaatggtcacatgcattttcccacctgtgcctgggcccaagatcaaaggatttgatgcccatctcctcgaaaaggggaaatcagaggaactgctttcagcactaggttgtcaggattttcccccaactagtgactacgaagatctgttggtggagtatctcgaagtagacgactccgaggaccaacacctcatgagcgtgcacagtaaagagcatccttcgcagggggatcccctaatgctgggagctagtcactacaagaacctcaagtcttatcgcccaaggaaaattagctcacagggcaggctagctgttttcacaaaggccacgctcactaccgttcagtag

SEQ ID NO: 81210 - DNA, 1131 bp, Artificial Sequence
  derived and/or modified sequence
atgaaggaaaatgtggccagcgccaccgtcttcaccctgctgctcttcctgaacacctgcctgctgaatggccagctgcccccaggcaagccagagatcttcaagtgccgcagccccaacaaggagaccttcacctgctggtggaggcctggaacagatggcggcctgcccaccaactacagcctgacctaccaccgggagggggagaccctgatgcatgagtgcccagactacatcaccggcggccccaacagctgccactttgggaagcagtacacctccatgtggaggacctacatcatgatggtgaatgccaccaaccagatgggcagcagcttcagtgatgagctgtatgtggatgtgacctacatcgtgcagcctgacccccccctggagctggccgtggaggtgaagcagcctgaggacaggaagccctacctgtggatcaagtggagcccccccaccctgattgacctgaagacaggctggttcaccctgctgtatgagatccggctgaagccagagaaggctgctgagtgggagatccactttgctggccagcagacagagttcaagatcctgagcctgcaccctggccagaagtacctggtgcaggtgcgctgcaagccagaccacggctactggagcgcctggagccctgccaccttcatccagatccccagcgacttcaccatgaatgacaccaccgtgtggatctctgtggccgtgctgtctgctgtgatctgcctgatcatcgtgtgggccgtggccctgaagggctacagcatggtgacctgcatcttcccccctgtgcccggccccaagatcaagggctttgatgcccacctgctggagaagggcaagtctgaggagctgctgagcgccctgggctgccaggacttcccccccaccagtgactatgaggacctgctggtggagtacctggaggtggatgacagcgaggaccagcacctgatgtctgtgcacagcaaggagcaccccagccagggcgaccccctgatgctgggcgccagccactacaagaacctgaagagctaccggcccaggaagatcagcagccagggccgcctggccgtgttcaccaaggccaccctgaccaccgtgcagtag

SEQ ID NO: 81211 - DNA, 1131 bp, Artificial Sequence
  derived and/or modified sequence
atgaaggagaacgtggccagcgccaccgtgttcaccctgctgctgttcctcaacacatgcctgctgaacggccaactcccaccaggcaaacctgagattttcaagtgccgatcccctaacaaggaaacgttcacatgctggtggcgccctggcacagacggcggactgccgacaaattattcactcacgtatcatcgcgagggcgagacactgatgcacgaatgtcctgattacatcaccggtggacctaatagttgccactttggcaagcagtacacctcaatgtggagaacctatataatgatggtcaacgccactaatcagatggggtcatctttttcggacgagctgtacgtggacgtgacttatattgtacagccggatccacccctagagctggccgtggaagttaagcagcccgaagaccgaaaaccgtacctttggataaaatggagtcccccgactctgatagacctgaaaaccggctggtttaccctgctctacgagattcggctcaagcccgagaaggctgccgaatgggagattcacttcgccgggcagcagactgagttcaaaattctcagccttcatccagggcagaaatacctggtccaagttaggtgtaagccggatcacgggtattggtcagcttggtcccccgccacttttattcagattccaagcgattttaccatgaacgacactacggtctggattagcgtcgctgtgctgagtgcagtgatctgcctgattattgtgtgggcagtggcgctaaagggctacagtatggtgacgtgcatctttcccccagtgccgggtcccaagattaaaggctttgatgctcatttgctggagaagggtaagtcagaggaactgctttcagccctgggatgccaagactttccaccaacctcagactacgaagacctgctggtcgaatatctggaagttgatgacagtgaagaccagcacctgatgtctgtgcattcaaaggagcatccatcacagggggatcccctgatgctgggtgcctcgcattacaagaacctgaagtcctacaggcctcggaaaatttcctcccagggcagactggcggtgttcaccaaggctactcttactaccgtccagtag

SEQ ID NO: 81212 - DNA, 1131 bp, Artificial Sequence
  derived and/or modified sequence
atgaaagagaatgtcgctagtgccactgtttttacgctgctgctgtttttaaacacttgtctcctcaatggtcagcttcctccgggaaagccagagatttttaagtgtcgctcccctaacaaggaaaccttcacatgttggtggagaccaggcaccgacggagggttacctactaactacagcctcacataccaccgggagggagagacactgatgcacgaatgtcctgactacatcaccgggggacccaatagttgtcacttcggcaagcagtacaccagtatgtggagaacttacatcatgatggttaacgctacaaaccagatggggtccagcttctctgatgagctctacgtggacgtgacctacattgtccagccagaccctccccttgagctggcagtggaagtgaagcagccagaagacaggaagccctacctatggatcaagtggagtccacctacgctgatcgatttaaagaccggatggtttactctgctatatgagattcgactcaagccagagaaagcagccgaatgggaaatacatttcgcagggcagcagaccgagttcaaaatattgagcctccatcctggccagaaatatcttgtccaggtgcgatgcaaacccgaccatgggtactggagcgcgtggtctcccgcaacatttattcagattccgtccgactttacaatgaacgacacgacagtgtggatctctgttgcggttctcagcgcagtcatctgcctgataatagtctgggctgtcgccctcaagggctatagtatggtgacttgtatctttcctccagtaccgggtccaaagatcaagggctttgacgcccacctgcttgagaagggaaagtccgaggaactgctctctgcactcggctgccaagatttcccacccacatcagattatgaggatcttctggtggaatatctggaggtggatgattctgaggaccaacaccttatgtccgtgcattccaaggagcacccaagtcagggcgatcccctgatgcttggagcttctcattacaagaacctgaaaagctacaggccgaggaagattagtagtcaaggccgtctggctgtttttaccaaggctacactcacaacagtccagtag

SEQ ID NO: 81213 - DNA, 1679 bp, Artificial Sequence
  derived and/or modified sequence
aagagaaggcagccaacatgaaggaaaatgtggcatctgcaaccgttttcactctgctactttttctcaacacctgccttctgaatggacagttacctcctggaaaacctgagatctttaaatgtcgttctcccaataaggaaacattcacctgctggtggaggcctgggacagatggaggacttcctaccaattattcactgacttaccacagggaaggagagacactcatgcatgaatgtccagactacataaccggtggccccaactcctgccactttggcaagcagtacacctccatgtggaggacatacatcatgatggtcaatgccactaaccagatgggaagcagtttctcggatgaactttatgtggacgtgacttacatagttcagccagaccctcctttggagctggctgtggaagtaaaacagccagaagacagaaaaccctacctgtggattaaatggtctccacctaccctgattgacttaaaaactggttggttcacgctcctgtatgaaattcgattaaaacccgagaaagcagctgagtgggagatccattttgctgggcagcaaacagagtttaagattctcagcctacatccaggacagaaataccttgtccaggttcgctgcaaaccagaccatggatactggagtgcatggagtccagcgaccttcattcagatacctagtgacttcaccatgaatgatacaaccgtgtggatctctgtggctgtcctttctgctgtcatctgtttgattattgtctgggcagtggctttgaagggctatagcatggtgacctgcatctttccgccagttcctgggccaaaaataaaaggatttgatgctcatctgttggagaagggcaagtctgaagaactactgagtgccttgggatgccaagactttcctcccacttctgactatgaggacttgctggtggagtatttagaagtagatgatagtgaggaccagcatctaatgtcagtccattcaaaagaacacccaagtcaaggtgaccccttgatgttgggtgcctctcattacaaaaatctcaaatcttacagaccaagaaaaatctcaagtcaaggaagacttgcggtgttcacaaaggcaacattgaccacagtccagtagagctgaagagcatataccagaattcaggaactcaacattttctcccctctgtccaaccacaggacagactgtgcaccccagggagatgctgtgtgtccactggcctcactgacttggattactcctgcagcacgtgaccagccagctcatatgatcactccctactgcccccaaagcagaattgactgggagctggaaacccacacaaaaagggacaattatattgaatgtaacatactccctctgcttacctagtgccttcacctcctatgggcatttggagtaaaaggttgttatgcaggtgtttgtgaaggatgtggccaagtcagttgtctcccttacagggtgacccaagattaatgatatctacccatccccagtccctcgaccccctagttgcaatcagctttgtcactgtcccccttaggcactgccatgtaaagcacgtggtcccccattctgaagcagtgggaaacctagaagagatgtactcttcgcaacctggttggatcttaaaaacatggttctaac

SEQ ID NO: 81214 - DNA, 867 bp, Artificial Sequence
  derived and/or modified sequence
atgaaagagaacgtggccagtgccacagtattcaccctgctcctgtttctcaacacctgccttctcaatgggcaactgccgcctgggaagccagagattttcaaatgtaggtctccaaacaaggaaacatttacatgctggtggcgaccaggaacagacggcggcctgccaacaaattactccttgacataccatcgcgagggcgagaccctcatgcacgaatgtccagactacatcactgggggccctaacagctgccacttcggaaagcagtatacatccatgtggcgtacctatatcatgatggtgaatgctaccaatcagatggggtcctctttcagtgatgagctctacgtggatgtcacctatatcgttcagcccgatcctccacttgagctcgccgtcgaggtgaaacagccggaagatcggaaaccgtacctgtggattaagtggagtccaccaacgctaattgacctgaagacaggatggttcaccctgctctatgaaattagactgaagccggagaaggccgctgaatgggagatccactttgctggccagcagactgaatttaagatccttagcttgcaccctggccagaaatatctggtgcaagtgcgctgcaagccggaccacgggtactggagtgcctggtctcccgccacattcatacaaatacctagcgactttaccatgaatgatacaacggtgtggatcagcgtagctgtgctgtccgctgtgatctgtcttataatagtctgggctgttgcactgaaagggtactcgatggtgacttgtatctttccccctgtccctggcccaaagataaagggattcgatgcccatttgctggaggttaccccatag

SEQ ID NO: 81215 - DNA, 930 bp, Artificial Sequence
  derived and/or modified sequence
atgaaggaaaatgtagcgagtgccacggtctttacactgttgcttttcctgaacacatgtttgttaaatgggcaattgccgcccggcaagcccgagatctttaaatgccgcagccccaataaagagacgttcacgtgctggtggcggcctggtacagatgggggtctgcctacaaactactcattgacataccatagggagggggagaccctcatgcacgagtgtccagattacatcacaggaggccctaattcatgtcactttggaaagcaatatacatccatgtggaggacgtatatcatgatggtcaacgcaacaaatcagatgggaagcagcttcagcgatgaactctacgtggacgtgacgtacatcgtgcagcctgacccaccgttggaacttgcggtggaagtgaagcagccagaagatagaaaaccctatctgtggattaaatggagccctccaaccctcatcgacctcaaaaccggatggtttaccctcttgtacgagatccggctcaaacctgaaaaggccgcagaatgggaaattcactttgctggacaacagacagagtttaagatactttcccttcacccgggccagaaatacctcgtacaagtgaggtgcaagcccgaccacggctactggtctgcatggtctcccgcaacttttattcagatccccagtgatttcacaatgaacgataccactgtttggataagcgtggctgtactgagtgccgtgatatgtctgattatcgtttgggcagttgccctgaaagggtattctatggtgacctgcatctttccacctgtaccaggccccaaaatcaaaggctttgatgcccacttactggaagaccgcctttgcacgcccgggcgctgctgcgtgtctactggtttgaccgacctggattacagctgtagcacctag

SEQ ID NO: 81216 - DNA, 867 bp, Artificial Sequence
  derived and/or modified sequence
atgaaggaaaatgtggccagcgccaccgtcttcaccctgctgctcttcctgaacacctgcctgctgaatggccagctgcccccaggcaagccagagatcttcaagtgccgcagccccaacaaggagaccttcacctgctggtggaggcctggaacagatggcggcctgcccaccaactacagcctgacctaccaccgggagggggagaccctgatgcatgagtgcccagactacatcaccggcggccccaacagctgccactttgggaagcagtacacctccatgtggaggacctacatcatgatggtgaatgccaccaaccagatgggcagcagcttcagtgatgagctgtatgtggatgtgacctacatcgtgcagcctgacccccccctggagctggccgtggaggtgaagcagcctgaggacaggaagccctacctgtggatcaagtggagcccccccaccctgattgacctgaagacaggctggttcaccctgctgtatgagatccggctgaagccagagaaggctgctgagtgggagatccactttgctggccagcagacagagttcaagatcctgagcctgcaccctggccagaagtacctggtgcaggtgcgctgcaagccagaccacggctactggagcgcctggagccctgccaccttcatccagatccccagcgacttcaccatgaatgacaccaccgtgtggatctctgtggccgtgctgtctgctgtgatctgcctgatcatcgtgtgggccgtggccctgaagggctacagcatggtgacctgcatcttcccccctgtgcccggccccaagatcaagggctttgatgcccacctgctggaggtgaccccctag

SEQ ID NO: 81217 - DNA, 930 bp, Artificial Sequence
  derived and/or modified sequence
atgaaggaaaatgtggccagcgccaccgtcttcaccctgctgctcttcctgaacacctgcctgctgaatggccagctgcccccaggcaagccagagatcttcaagtgccgcagccccaacaaggagaccttcacctgctggtggaggcctggaacagatggcggcctgcccaccaactacagcctgacctaccaccgggagggggagaccctgatgcatgagtgcccagactacatcaccggcggccccaacagctgccactttgggaagcagtacacctccatgtggaggacctacatcatgatggtgaatgccaccaaccagatgggcagcagcttcagtgatgagctgtatgtggatgtgacctacatcgtgcagcctgacccccccctggagctggccgtggaggtgaagcagcctgaggacaggaagccctacctgtggatcaagtggagcccccccaccctgattgacctgaagacaggctggttcaccctgctgtatgagatccggctgaagccagagaaggctgctgagtgggagatccactttgctggccagcagacagagttcaagatcctgagcctgcaccctggccagaagtacctggtgcaggtgcgctgcaagccagaccacggctactggagcgcctggagccctgccaccttcatccagatccccagcgacttcaccatgaatgacaccaccgtgtggatctctgtggccgtgctgtctgctgtgatctgcctgatcatcgtgtgggccgtggccctgaagggctacagcatggtgacctgcatcttcccccctgtgcccggccccaagatcaagggctttgatgcccacctgctggaggaccggctgtgcaccccaggccgctgctgcgtgtccacaggcctgacagacctggactacagctgcagcacctag

SEQ ID NO: 81218 - DNA, 867 bp, Artificial Sequence
  derived and/or modified sequence
atgaaggagaacgtggccagcgccaccgtgttcaccctgctgctgttcctgaacacatgtctgctgaatggccagctcccacctggaaagcctgaaatctttaaatgccgatccccaaacaaggaaaccttcacatgctggtggagacctgggaccgatggcgggctgcccaccaattactccctcacctaccacagagaaggagagacactgatgcacgagtgccctgattatattaccgggggcccaaacagctgccatttcgggaaacagtataccagtatgtggcgcacctacataatgatggttaatgcgaccaatcagatggggagctctttttcagatgaactgtatgtagatgtaacttatattgtgcagcctgatcctcccttagaattggcagtcgaagtgaagcagccagaagataggaaaccttatctatggattaagtggtcccccccaacacttatcgacctgaaaacaggctggtttacactattatatgagataagactgaagccagaaaaggctgcagagtgggaaatccatttcgcgggccagcagaccgagtttaaaattctctccttgcatccgggccagaagtatctagtgcaggtgcgttgcaaacccgatcatggttactggtccgcatggtcacctgcaacttttatacaaattccctctgacttcaccatgaatgacacaacagtttggatatccgtcgccgtactgtctgccgtgatttgtctgattatcgtttgggctgtggccttaaaaggctactctatggttacttgcatcttccctcccgttcccggccctaagattaagggcttcgatgcccacctattggaggttaccccgtag

SEQ ID NO: 81219 - DNA, 930 bp, Artificial Sequence
  derived and/or modified sequence
atgaaggagaacgtggccagcgccaccgtgttcaccctgctgctgtttctgaacacctgtttgttgaacggtcagctgccgcctgggaagcccgagatttttaagtgtcggtctccaaacaaggagaccttcacttgctggtggcggcctgggactgatggaggactgccaactaactattccctcacctaccatcgggaaggcgagaccctgatgcacgaatgtcccgattatatcaccggagggcctaatagctgtcatttcgggaaacagtatacatccatgtggaggacctacatcatgatggtgaacgccacaaaccagatgggctcatcttttagtgacgaactctatgtcgacgtgacttatattgtgcagcccgatcctcccctggaactcgcagtagaggtgaagcagccggaagaccggaagccttatctttggatcaaatggagcccccctacattgatcgatctcaagacagggtggtttactttgctgtatgagattcggcttaagcccgaaaaggctgctgagtgggaaatccatttcgcaggccagcagaccgagtttaagatcctcagccttcatcccgggcagaagtacctggtgcaggtgagatgtaagcctgatcatggatactggagtgcttggtcgcctgcaaccttcattcagatcccctcggatttcacaatgaatgacactaccgtttggatttctgtggctgtcttgtctgctgtaatctgcctgattattgtatgggccgtggccttgaaagggtatagcatggtgacctgcatcttccctccggttcccggtcctaaaatcaagggttttgacgcccatcttttggaagatcggctatgtacccctgggcggtgttgtgtgtcgaccggactcactgacctggattatagttgcagcacgtag

SEQ ID NO: 81220 - DNA, 867 bp, Artificial Sequence
  derived and/or modified sequence
atgaaagaaaatgttgcgtcagccactgtgttcacactactccttttcttgaatacatgtttattgaacggtcagctgccacctggtaaacctgaaatttttaaatgccggtcccctaataaagagactttcacgtgttggtggcgacccggtaccgacggaggcctgcctacgaactattctttaacataccacagagagggtgagacacttatgcacgagtgtccagattacatcactggtgggcctaactcatgtcactttgggaaacagtacaccagcatgtggaggacctacatcatgatggtgaatgccacgaaccaaatgggttcgtctttttccgatgaactgtacgtggacgttacatacatagtgcaacctgacccaccgctggagctcgctgttgaggtcaaacagcccgaggacaggaagccatatctatggatcaagtggagtccaccaacactgattgacttgaagactggatggtttactttgctgtatgagatccggttgaaaccagagaaggcagctgagtgggaaatccacttcgccggacagcaaactgaattcaagattctgtcactgcacccgggacagaagtatctggtgcaggtcagatgcaaaccagaccacggctattggagcgcgtggtcacctgcaacatttattcaaatcccctctgatttcaccatgaatgacactacagtatggattagtgtggctgtgctgtccgcagtgatctgtctgatcatcgtgtgggcggtggcactgaaaggatacagtatggtgacttgcatttttcctccagtccctgggcctaagataaaaggcttcgacgcacacctgctagaagtcactccatag

SEQ ID NO: 81221 - DNA, 930 bp, Artificial Sequence
  derived and/or modified sequence
atgaaagagaacgtggcctctgccacagtgttcaccctgctgctcttcctcaatacctgtctgctgaacggccagctgcccccaggcaagcccgagatctttaaatgccggagccccaacaaagagaccttcacctgttggtggcgtcccggaacagacgggggtctcccaaccaactattctcttacgtatcacagggagggcgaaactctgatgcatgagtgtcccgactacattacaggaggaccgaactcttgccactttggcaagcagtatacctccatgtggagaacctatattatgatggttaacgcaacaaaccaaatggggtccagcttctcagacgagctgtatgtggatgtgacttatatcgtccagccggacccacctctggaactggcagttgaagttaaacagccggaagatcgtaaaccctacctgtggatcaagtggtcacccccaactttgatagatctgaaaaccggctggttcactctcttatatgaaatcagactgaagccagagaaggccgctgagtgggagatacacttcgccggacagcagaccgagtttaagattctttcactgcatccaggtcaaaaatacctggttcaagtgaggtgcaagccagatcacggatattggtctgcatggagccctgcaacgttcatccagatcccttccgattttaccatgaacgatacgacagtctggatctccgtggctgtgctaagtgccgttatctgtttaattatcgtgtgggccgtggcgttgaaaggatactcgatggtgacttgtatttttccacctgtcccagggccaaagattaagggtttcgatgcccacttgttggaagataggttgtgtactcctggacgatgctgtgtaagcactggtctgacagacctggactacagttgctctacttag

SEQ ID NO: 81222 - DNA, 1525 bp, Artificial Sequence
  derived and/or modified sequence
aagagaaggcagccaacatgaaggaaaatgtggcatctgcaaccgttttcactctgctactttttctcaacacctgccttctgaatggacagttacctcctggaaaacctgagatctttaaatgtcgttctcccaataaggaaacattcacctgctggtggaggcctgggacagatggaggacttcctaccaattattcactgacttaccacagggaaggagagacactcatgcatgaatgtccagactacataaccggtggccccaactcctgccactttggcaagcagtacacctccatgtggaggacatacatcatgatggtcaatgccactaaccagatgggaagcagtttctcggatgaactttatgtggacgtgacttacatagttcagccagaccctcctttggagctggctgtggaagtaaaacagccagaagacagaaaaccctacctgtggattaaatggtctccacctaccctgattgacttaaaaactggttggttcacgctcctgtatgaaattcgattaaaacccgagaaagcagctgagtgggagatccattttgctgggcagcaaacagagtttaagattctcagcctacatccaggacagaaataccttgtccaggttcgctgcaaaccagaccatggatactggagtgcatggagtccagcgaccttcattcagatacctagtgacttcaccatgaatgatacaaccgtgtggatctctgtggctgtcctttctgctgtcatctgtttgattattgtctgggcagtggctttgaagggctatagcatggtgacctgcatctttccgccagttcctgggccaaaaataaaaggatttgatgctcatctgttggaggtgaccccttgatgttgggtgcctctcattacaaaaatctcaaatcttacagaccaagaaaaatctcaagtcaaggaagacttgcggtgttcacaaaggcaacattgaccacagtccagtagagctgaagagcatataccagaattcaggaactcaacattttctcccctctgtccaaccacaggacagactgtgcaccccagggagatgctgtgtgtccactggcctcactgacttggattactcctgcagcacgtgaccagccagctcatatgatcactccctactgcccccaaagcagaattgactgggagctggaaacccacacaaaaagggacaattatattgaatgtaacatactccctctgcttacctagtgccttcacctcctatgggcatttggagtaaaaggttgttatgcaggtgtttgtgaaggatgtggccaagtcagttgtctcccttacagggtgacccaagattaatgatatctacccatccccagtccctcgaccccctagttgcaatcagctttgtcactgtcccccttaggcactgccatgtaaagcacgtggtcccccattctgaagcagtgggaaacctagaagagatgtactcttcgcaacctggttggatcttaaaaacatggttctaac

SEQ ID NO: 81223 - DNA, 1086 bp, Artificial Sequence
  derived and/or modified sequence
aagagaaggcagccaacatgaaggaaaatgtggcatctgcaaccgttttcactctgctactttttctcaacacctgccttctgaatggacagttacctcctggaaaacctgagatctttaaatgtcgttctcccaataaggaaacattcacctgctggtggaggcctgggacagatggaggacttcctaccaattattcactgacttaccacagggaaggagagacactcatgcatgaatgtccagactacataaccggtggccccaactcctgccactttggcaagcagtacacctccatgtggaggacatacatcatgatggtcaatgccactaaccagatgggaagcagtttctcggatgaactttatgtggacgtgacttacatagttcagccagaccctcctttggagctggctgtggaagtaaaacagccagaagacagaaaaccctacctgtggattaaatggtctccacctaccctgattgacttaaaaactggttggttcacgctcctgtatgaaattcgattaaaacccgagaaagcagctgagtgggagatccattttgctgggcagcaaacagagtttaagattctcagcctacatccaggacagaaataccttgtccaggttcgctgcaaaccagaccatggatactggagtgcatggagtccagcgaccttcattcagatacctagtgacttcaccatgaatgatacaaccgtgtggatctctgtggctgtcctttctgctgtcatctgtttgattattgtctgggcagtggctttgaagggctatagcatggtgacctgcatctttccgccagttcctgggccaaaaataaaaggatttgatgctcatctgttggaggacagactgtgcaccccagggagatgctgtgtgtccactggcctcactgacttggattactcctgcagcacgtgaccagccagctcatatgatcactccctactgcccccaaagcagaattgactgggagctggaaacccacacaaaaagggacaattatattgaatgtaacatactccctctgcttacctagtgccttcacctcctatgggca

SEQ ID NO: 81224 - DNA, 867 bp, Artificial Sequence
  derived and/or modified sequence
atgaaggagaacgtggccagcgccaccgtgttcaccctgctgctgttcctgaacacctgcctgctgaacggccagctgccccccggcaagcccgagatcttcaagtgcagaagccccaacaaggagaccttcacctgctggtggagacccggcaccgacggcggcctgcccaccaactacagcctgacctaccacagagagggcgagaccctgatgcacgagtgccccgactacatcaccggcggccccaacagctgccacttcggcaagcagtacaccagcatgtggagaacctacatcatgatggtgaacgccaccaaccagatgggcagcagcttcagcgacgagctgtacgtggacgtgacctacatcgtgcagcccgacccccccctggagctggccgtggaggtgaagcagcccgaggacagaaagccctacctgtggatcaagtggagcccccccaccctgatcgacctgaagaccggctggttcaccctgctgtacgagatcagactgaagcccgagaaggccgccgagtgggagatccacttcgccggccagcagaccgagttcaagatcctgagcctgcaccccggccagaagtacctggtgcaggtgagatgcaagcccgaccacggctactggagcgcctggagccccgccaccttcatccagatccccagcgacttcaccatgaacgacaccaccgtgtggatcagcgtggccgtgctgagcgccgtgatctgcctgatcatcgtgtgggccgtggccctgaagggctacagcatggtgacctgcatcttcccccccgtgcccggccccaagatcaagggcttcgacgcccacctgctggaggtgaccccctag

SEQ ID NO: 81225 - DNA, 930 bp, Artificial Sequence
  derived and/or modified sequence
atgaaggagaacgtggccagcgccaccgtgttcaccctgctgctgttcctgaacacctgcctgctgaacggccagctgccccccggcaagcccgagatcttcaagtgcagaagccccaacaaggagaccttcacctgctggtggagacccggcaccgacggcggcctgcccaccaactacagcctgacctaccacagagagggcgagaccctgatgcacgagtgccccgactacatcaccggcggccccaacagctgccacttcggcaagcagtacaccagcatgtggagaacctacatcatgatggtgaacgccaccaaccagatgggcagcagcttcagcgacgagctgtacgtggacgtgacctacatcgtgcagcccgacccccccctggagctggccgtggaggtgaagcagcccgaggacagaaagccctacctgtggatcaagtggagcccccccaccctgatcgacctgaagaccggctggttcaccctgctgtacgagatcagactgaagcccgagaaggccgccgagtgggagatccacttcgccggccagcagaccgagttcaagatcctgagcctgcaccccggccagaagtacctggtgcaggtgagatgcaagcccgaccacggctactggagcgcctggagccccgccaccttcatccagatccccagcgacttcaccatgaacgacaccaccgtgtggatcagcgtggccgtgctgagcgccgtgatctgcctgatcatcgtgtgggccgtggccctgaagggctacagcatggtgacctgcatcttcccccccgtgcccggccccaagatcaagggcttcgacgcccacctgctggaggacagactgtgcacccccggcagatgctgcgtgagcaccggcctgaccgacctggactacagctgcagcacctag

SEQ ID NO: 81226 - protein, 268 aa, Artificial Sequence
  derived and/or modified sequence
MKENVASATVFTLLLFLNTCLLNGQLPPGKPEIFKCRSPNKETFTCWWRPGTDGGLPTNYSLTYHREGETLMHECPDYITGGPNSCHFGKQYTSMWRTYIMMVNATNQMGSSFSDELYVDVTYIVQPDPPLELAVEVKQPEDRKPYLWIKWSPPTLIDLKTGWFTLLYEIRLKPEKAAEWEIHFAGQQTEFKILSLHPGQKYLVQVRCKPDHGYWSAWSPATFIQIPSGDPLMLGASHYKNLKSYRPRKISSQGRLAVFTKATLTTVQ

SEQ ID NO: 81227 - protein, 197 aa, Artificial Sequence
  derived and/or modified sequence
MHECPDYITGGPNSCHFGKQYTSMWRTYIMMVNATNQMGSSFSDELYVDVTYIVQPDPPLELAVEVKQPEDRKPYLWIKWSPPTLIDLKTGWFTLLYEIRLKPEKAAEWEIHFAGQQTEFKILSLHPGQKYLVQVRCKPDHGYWSAWSPATFIQIPSGDPLMLGASHYKNLKSYRPRKISSQGRLAVFTKATLTTVQ

SEQ ID NO: 81228 - DNA, 807 bp, Artificial Sequence
  derived and/or modified sequence
atgaaagaaaacgttgcttcagccactgtcttcaccctgttgcttttcttaaacacatgcctgctgaatggccagctgccgccagggaagccagagattttcaagtgtcggagtccaaacaaagaaaccttcacctgctggtggcgtccagggaccgacggcggactgcctacaaattacagcttgacgtaccaccgagagggggaaactttgatgcatgaatgtcctgattacattaccggggggcccaactcctgtcattttggtaaacagtataccagtatgtggaggacctacatcatgatggttaatgcaacaaaccagatgggatcctcctttagcgatgaactgtacgtcgacgtgacctatatagttcagccagacccacctctggaactcgcggtggaggtaaaacagccagaggaccggaaaccttacctttggattaaatggtcccctccaactctgatcgacctcaaaactgggtggtttaccctcctttatgagataaggttaaagcccgagaaggccgctgaatgggagattcactttgccggccaacagaccgagtttaagatcctaagtcttcacccgggccagaagtatttggtgcaagtaaggtgcaaacccgatcacggatattggtctgcttggtcccctgccacatttattcagatacctagtggcgatccattaatgttaggcgcctcccattataagaatctgaagagctaccgacccagaaagatttctagccagggccgccttgctgtgttcaccaaggccacccttaccaccgtacagtag

SEQ ID NO: 81229 - DNA, 594 bp, Artificial Sequence
  derived and/or modified sequence
atgcatgaatgtccagactatataacaggcggaccaaactcttgtcatttcggaaagcagtataccagcatgtggaggacttatatcatgatggtgaacgccacaaatcagatggggtcctccttttccgatgaactgtacgtcgacgtcacctatatcgtgcagcctgacccacctctggaactggcagtcgaggtgaagcagcccgaggaccgcaaaccctatctttggatcaaatggtcaccacccactctcatcgaccttaaaaccggttggttcactctcctgtatgaaatccggttaaaacctgagaaagccgcagagtgggaaatccacttcgcaggacagcaaacagaatttaagattctcagtttgcaccctggccagaaatatcttgtgcaagttaggtgcaagccagaccacgggtattggtccgcctggagccctgcaacatttatccaaatcccgagtggggatccactcatgctgggtgcctcccactacaagaacctgaagtcatatagaccacgcaaaataagcagccagggtaggttggctgtgtttacaaaggctacgctgaccactgtacagtag

SEQ ID NO: 81230 - DNA, 312 bp, Artificial Sequence
  derived and/or modified sequence
atgaaggagaatgtggcatcagctacagtttttacgctcctgttgtttctgaatacatgtctgttgaacggccagctgccccctggcaaaccagagattttcaagtgtcggtcacccaataaggaaacgtttacttgctggtggcgcccggggactgatggaggcttgccaactaactacagtctgacctatcaccgggaaggcgaaactctgatgcatgaatgccctgactatataactgggggaccaaactcttgtcacttcggcaaacagtacacatctatgtggaggacatatatcatgatggtgtag

SEQ ID NO: 81231 - DNA, 189 bp, Artificial Sequence
  derived and/or modified sequence
atgaaagagaatgtggcctccgcgacagtgtttaccttgctgctgttcctaaacacctgcctgttgaatgggcaactgccaccagggaagccggaaatatttaaatgtcggtcccctaataaggaaacttttacttgctggtggaggcctggaacggatgggggactcccgaccaattacagcctttag

SEQ ID NO: 81232 - DNA, 336 bp, Artificial Sequence
  derived and/or modified sequence
atgaaagagaacgtggcatccgccacagtgtttacattactgctttttcttaatacctgcctgctaaacggtcaactcccgcctggcaaaccggagattttcaaatgcaggtcccctaataaggaaacattcacctgctggtggaggccaggcacggatgggggcctgccaaccaattactcgttgacttaccaccgagaaggcgaaacactaatgcacgaatgccccgattacattaccggcgggccaaatagttgccatttcggaaaacagtacactagtatgtggaggacttacatcatgatggtgaacgcgacaaaccagatgggcagttag

SEQ ID NO: 81233 - DNA, 363 bp, Artificial Sequence
  derived and/or modified sequence
atgaaagaaaacgtagcctctgcgactgtgttcactctgcttctgttccttaatacatgtctcttgaatggccaactgcctcccggtaaacccgaaatattcaagtgcagaagcccaaacaaggagactttcacctgttggtggcgacctggcacagacggaggcttgcctactaattatagcctcacctaccatagggaaggcgagaccttgatgcatgagtgccccgattatatcaccggggggcccaatagttgtcattttggcaagcagtacactagtatgtggagaacctatatcatgatggttaatgctaccaaccaaatggggtccagcttctccgacgaactctacgtcgattag

SEQ ID NO: 81234 - DNA, 807 bp, Artificial Sequence
  derived and/or modified sequence
atgaaggaaaatgtggccagcgccaccgtcttcaccctgctgctcttcctgaacacctgcctgctgaatggccagctgcccccaggcaagccagagatcttcaagtgccgcagccccaacaaggagaccttcacctgctggtggaggcctggaacagatggcggcctgcccaccaactacagcctgacctaccaccgggagggggagaccctgatgcatgagtgcccagactacatcaccggcggccccaacagctgccactttgggaagcagtacacctccatgtggaggacctacatcatgatggtgaatgccaccaaccagatgggcagcagcttcagtgatgagctgtatgtggatgtgacctacatcgtgcagcctgacccccccctggagctggccgtggaggtgaagcagcctgaggacaggaagccctacctgtggatcaagtggagcccccccaccctgattgacctgaagacaggctggttcaccctgctgtatgagatccggctgaagccagagaaggctgctgagtgggagatccactttgctggccagcagacagagttcaagatcctgagcctgcaccctggccagaagtacctggtgcaggtgcgctgcaagccagaccacggctactggagcgcctggagccctgccaccttcatccagatccccagcggggaccccctgatgctgggcgccagccactacaagaacctgaagagctaccggcccaggaagatcagcagccagggccgcctggccgtgttcaccaaggccaccctgaccaccgtgcagtag

SEQ ID NO: 81235 - DNA, 594 bp, Artificial Sequence
  derived and/or modified sequence
atgcatgaatgtcctgactacatcactggaggccccaacagctgccactttgggaagcagtacacctccatgtggaggacctacatcatgatggtgaatgccaccaaccagatgggcagcagcttcagtgatgagctgtatgtggatgtgacctacatcgtgcagcctgacccccccctggagctggccgtggaggtgaagcagcctgaggacaggaagccctacctgtggatcaagtggagcccccccaccctgattgacctgaagacaggctggttcaccctgctgtatgagatccggctgaagccagagaaggctgctgagtgggagatccactttgctggccagcagacagagttcaagatcctgagcctgcaccctggccagaagtacctggtgcaggtgcgctgcaagccagaccacggctactggagcgcctggagccctgccaccttcatccagatccccagcggggaccccctgatgctgggcgccagccactacaagaacctgaagagctaccggcccaggaagatcagcagccagggccgcctggccgtgttcaccaaggccaccctgaccaccgtgcagtag

SEQ ID NO: 81236 - DNA, 312 bp, Artificial Sequence
  derived and/or modified sequence
atgaaggaaaatgtggccagcgccaccgtcttcaccctgctgctcttcctgaacacctgcctgctgaatggccagctgcccccaggcaagccagagatcttcaagtgccgcagccccaacaaggagaccttcacctgctggtggaggcctggaacagatggcggcctgcccaccaactacagcctgacctaccaccgggagggggagaccctgatgcatgagtgcccagactacatcaccggcggccccaacagctgccactttgggaagcagtacacctccatgtggaggacctacatcatgatggtgtag

SEQ ID NO: 81237 - DNA, 189 bp, Artificial Sequence
  derived and/or modified sequence
atgaaggaaaatgtggccagcgccaccgtcttcaccctgctgctcttcctgaacacctgcctgctgaatggccagctgcccccaggcaagccagagatcttcaagtgccgcagccccaacaaggagaccttcacctgctggtggaggcctggaacagatggcggcctgcccaccaactacagcctgtag

SEQ ID NO: 81238 - DNA, 336 bp, Artificial Sequence
  derived and/or modified sequence
atgaaggaaaatgtggccagcgccaccgtcttcaccctgctgctcttcctgaacacctgcctgctgaatggccagctgcccccaggcaagccagagatcttcaagtgccgcagccccaacaaggagaccttcacctgctggtggaggcctggaacagatggcggcctgcccaccaactacagcctgacctaccaccgggagggggagaccctgatgcatgagtgcccagactacatcaccggcggccccaacagctgccactttgggaagcagtacacctccatgtggaggacctacatcatgatggtgaatgccaccaaccagatgggcagctag

SEQ ID NO: 81239 - DNA, 363 bp, Artificial Sequence
  derived and/or modified sequence
atgaaggaaaatgtggccagcgccaccgtcttcaccctgctgctcttcctgaacacctgcctgctgaatggccagctgcccccaggcaagccagagatcttcaagtgccgcagccccaacaaggagaccttcacctgctggtggaggcctggaacagatggcggcctgcccaccaactacagcctgacctaccaccgggagggggagaccctgatgcatgagtgcccagactacatcaccggcggccccaacagctgccactttgggaagcagtacacctccatgtggaggacctacatcatgatggtgaatgccaccaaccagatgggcagcagcttcagtgatgagctgtatgtggactag

SEQ ID NO: 81240 - DNA, 807 bp, Artificial Sequence
  derived and/or modified sequence
atgaaggagaacgtggccagcgccaccgtgttcaccctgctgctgttcctaaacacctgcctgctcaacggtcagttgcctccaggcaagccagagatctttaagtgtagatcgcccaacaaagaaactttcacatgttggtggcgcccaggcacagatggcggtctgcccacaaattattctcttacctaccatcgcgagggtgagaccctgatgcacgaatgtccagactacatcaccggtggtccaaacagttgccactttgggaaacagtacaccagcatgtggagaacgtatattatgatggtgaacgccactaaccagatgggctctagcttctcagacgaactttacgttgacgtgacctacatcgtacaaccagacccaccgctcgagctggctgtggaggtgaagcagcccgaagataggaaaccatacctctggattaaatggtcgcccccaacgcttattgacctcaagaccgggtggttcacactgctttacgagatcaggctgaagcctgagaaagccgcggagtgggaaatccacttcgctggtcaacagacagagttcaagatcctcagcctccaccccggacaaaagtacctggttcaggtgagatgtaaacccgaccacggttattggagcgcgtggagtcccgccacattcatacagataccgagcggggaccccctgatgctcggagcgtcacactataaaaatctgaagagttataggccaaggaaaatttcttcccagggaagactggccgtgttcaccaaagctactctgactaccgtgcagtag

SEQ ID NO: 81241 - DNA, 594 bp, Artificial Sequence
  derived and/or modified sequence
atgcacgagtgccccgactacatcaccggcggccccaacagctgccatttcgggaaacagtacaccagcatgtggcgtacttacattatgatggtgaacgccaccaatcagatgggctccagcttcagcgatgagctatatgttgatgtgacatacatcgtccaacccgacccacctctggaactcgcagtggaagttaagcagcccgaagaccggaaaccttacctctggatcaagtggagtcccccgactcttatcgatttaaaaaccggatggttcaccctactctatgaaatacgtctcaagcctgaaaaagccgctgagtgggagatccatttcgccgggcagcaaactgaattcaagatcctgagtctgcatcccggacagaaatacctggtacaggtcagatgtaaaccagaccatggatattggtccgcctggagtcctgcaacattcatccaaattccatcaggcgatcccttgatgctaggagcctcccattataagaacctgaaaagctaccgtccacgcaaaatctcatcccaggggagactggctgtcttcacgaaagcaactcttacaactgtacagtag

SEQ ID NO: 81242 - DNA, 312 bp, Artificial Sequence
  derived and/or modified sequence
atgaaggagaacgtggccagcgccaccgtgttcaccctgctgctgtttctcaatacctgtctgctcaacggacagctgccaccaggcaagcccgaaatcttcaaatgtaggagtcccaacaaggaaacctttacttgctggtggcgccccggcaccgatggcggcctgcctacaaattattcccttacataccaccgggagggtgagactctcatgcacgagtgccctgattatatcacaggcggaccaaactcctgtcactttggaaagcagtacaccagcatgtggagaacatacataatgatggtatag

SEQ ID NO: 81243 - DNA, 189 bp, Artificial Sequence
  derived and/or modified sequence
atgaaggagaacgtggccagcgccaccgtgttcaccctgctgctgtttctgaatacttgcttactcaacggccagttaccaccaggaaaacctgaaattttcaaatgcaggagcccaaataaggaaaccttcacttgttggtggcgcccagggaccgatggaggcctcccaactaattactccctctag

SEQ ID NO: 81244 - DNA, 336 bp, Artificial Sequence
  derived and/or modified sequence
atgaaggagaacgtggccagcgccaccgtgttcaccctgctgctgttcctcaatacatgcctgctgaatgggcagctccctccagggaaacccgagatctttaaatgtcgctcacctaacaaggaaacctttacatgttggtggcgtcccggcactgacggcgggctgcctacaaactatagccttacctatcatcgggagggggaaactctgatgcacgagtgtcccgactatatcacaggggggcctaactcgtgccactttgggaagcagtatactagcatgtggcgcacctacatcatgatggtcaacgctaccaatcagatggggagctag

SEQ ID NO: 81245 - DNA, 363 bp, Artificial Sequence
  derived and/or modified sequence
atgaaggagaacgtggccagcgccaccgtgttcaccctgctgctgtttcttaacacatgcctcctgaatggccagctgcctcctggcaaacccgagatcttcaaatgtagatcgccaaataaagagactttcacctgctggtggagaccaggaactgacggagggttgccaactaattatagcctgacataccatagagaaggggagaccctgatgcatgaatgccccgactacatcactggcgggccaaactcctgtcactttgggaaacaatatacatcaatgtggagaacttatattatgatggtgaacgccaccaaccagatgggttcctctttttcggacgaactgtatgtggactag

SEQ ID NO: 81246 - DNA, 807 bp, Artificial Sequence
  derived and/or modified sequence
atgaaagaaaatgtcgcttcagctactgtgtttaccctgcttctgtttctcaacacttgcttgctgaacggtcagctgccgccaggtaagcccgagatattcaagtgccggtctcccaacaaggagactttcacttgttggtggcggcctggtaccgatggcggacttccaaccaactactcacttacgtatcaccgggaaggggaaacactcatgcacgagtgcccggattacatcaccggcggtcccaattcttgtcattttggaaaacaatacacttctatgtggagaacttacatcatgatggtcaatgcaacaaaccagatgggatcttcattctctgacgagctgtatgtagatgtcacctacatcgtgcagcccgatcccccactcgaattggccgttgaagtgaagcaacctgaggatagaaaaccctacctgtggataaagtggagtcctcccacattaatcgatctgaaaactgggtggttcactctgttgtatgaaattaggctgaaacccgaaaaggcagccgaatgggagatacatttcgccggacagcagacagagtttaaaatccttagcctacacccgggacagaaatacctggtgcaggtgcgctgtaaacccgatcatgggtactggtcagcttggtccccagccacgttcatacagatcccaagcggtgaccctctgatgctcggagcgtcccattacaaaaatctgaagtcataccggcctcgcaaaatctccagtcaggggcgtttagctgtattcaccaaggctactctgaccacagtgcagtag

SEQ ID NO: 81247 - DNA, 594 bp, Artificial Sequence
  derived and/or modified sequence
atgcatgaatgtccagactatatcacgggcggacctaacagctgccacttcggcaagcaatacacgtctatgtggcgcacctatattatgatggtgaatgccacgaaccagatgggtagcagcttcagcgatgaactctacgtggatgttacctatatcgtccagcccgatccgcctctggagttagcagtcgaggttaaacaacctgaggaccgcaagccttatttatggattaagtggagtccgcctactctgattgacctgaagactggttggttcacactgctttacgaaattagattaaaacctgagaaagcagcagaatgggagattcactttgccggtcagcagaccgaatttaagatcttgtcacttcacccaggtcaaaaatacctggtccaggtgagatgtaaaccggaccacggctattggtccgcttggagcccagccacatttatccagatacctagtggcgaccccctaatgttaggcgcaagtcattataagaatttaaagagttaccgcccaagaaaaatcagctctcagggcaggctagctgtttttaccaaagcgactttgaccacggtacagtag

SEQ ID NO: 81248 - DNA, 312 bp, Artificial Sequence
  derived and/or modified sequence
atgaaggagaacgtcgccagcgctaccgttttcacacttttgttattcctcaatacctgcttgctcaacggtcaacttccccctggcaagccagagatcttcaaatgtaggagccctaacaaggagactttcacctgttggtggaggccaggcacggatggcggactgcctacgaattatagcctcacctaccatagggagggcgaaacattgatgcacgaatgccccgattacattactgggggtcctaattcctgccactttggtaaacagtacacgagcatgtggcggacttacattatgatggtttag

SEQ ID NO: 81249 - DNA, 189 bp, Artificial Sequence
  derived and/or modified sequence
atgaaagagaatgtggctagcgcaaccgttttcacactgctgctgtttctgaacacatgcctactcaatggccaactcccgccaggaaaaccggaaatctttaaatgcaggtctccaaataaagaaacattcacgtgttggtggcggcctggcacagacgggggtctgcccacgaactatagcctctag

SEQ ID NO: 81250 - DNA, 336 bp, Artificial Sequence
  derived and/or modified sequence
atgaaggaaaatgttgcttccgctacggtcttcactctcttgcttttcctcaacacctgcctgctgaacgggcagttaccaccaggcaaacccgagatcttcaagtgccggtcccctaacaaagagacattcacttgctggtggagacccggaacagatggcggactgcctactaattactccttgacttaccacagagagggcgagacactcatgcacgagtgccctgactacatcactggcggacccaactcatgtcactttggtaagcaatacaccagtatgtggaggacttacataatgatggtgaacgccaccaatcagatgggctcatag

SEQ ID NO: 81251 - DNA, 363 bp, Artificial Sequence
  derived and/or modified sequence
atgaaggaaaacgtagctagcgccactgtcttcactctcctgctgtttctgaacacatgtctgctgaacggccagctcccgcctgggaagccggagatttttaaatgccgctcccccaataaggaaaccttcacgtgctggtggagacccggtaccgacggaggcctcccgacaaactattctttaacatatcatagggagggcgagacactgatgcatgagtgtccggactacattacaggtggccctaactcctgtcactttggtaagcagtacacctctatgtggcgtacctacataatgatggtgaatgcgaccaatcagatgggttcatccttttcagacgaactgtacgtcgattag

SEQ ID NO: 81252 - DNA, 1339 bp, Artificial Sequence
  derived and/or modified sequence
aagagaaggcagccaacatgaaggaaaatgtggcatctgcaaccgttttcactctgctactttttctcaacacctgccttctgaatggacagttacctcctggaaaacctgagatctttaaatgtcgttctcccaataaggaaacattcacctgctggtggaggcctgggacagatggaggacttcctaccaattattcactgacttaccacagggaaggagagacactcatgcatgaatgtccagactacataaccggtggccccaactcctgccactttggcaagcagtacacctccatgtggaggacatacatcatgatggtcaatgccactaaccagatgggaagcagtttctcggatgaactttatgtggacgtgacttacatagttcagccagaccctcctttggagctggctgtggaagtaaaacagccagaagacagaaaaccctacctgtggattaaatggtctccacctaccctgattgacttaaaaactggttggttcacgctcctgtatgaaattcgattaaaacccgagaaagcagctgagtgggagatccattttgctgggcagcaaacagagtttaagattctcagcctacatccaggacagaaataccttgtccaggttcgctgcaaaccagaccatggatactggagtgcatggagtccagcgaccttcattcagatacctagtggtgaccccttgatgttgggtgcctctcattacaaaaatctcaaatcttacagaccaagaaaaatctcaagtcaaggaagacttgcggtgttcacaaaggcaacattgaccacagtccagtagagctgaagagcatataccagaattcaggaactcaacattttctcccctctgtccaaccacaggacagactgtgcaccccagggagatgctgtgtgtccactggcctcactgacttggattactcctgcagcacgtgaccagccagctcatatgatcactccctactgcccccaaagcagaattgactgggagctggaaacccacacaaaaagggacaattatattgaatgtaacatactccctctgcttacctagtgccttcacctcctatgggcatttggagtaaaaggttgttatgcaggtgtttgtgaaggatgtggccaagtcagttgtctcccttacagggtgacccaagattaatgatatctacccatccccagtccctcgaccccctagttgcaatcagctttgtcactgtcccccttaggcactgccatgtaaagcacgtggtcccccattctgaagcagtgggaaacctagaagagatgtactcttcgcaacctggttggatctta

SEQ ID NO: 81253 - DNA, 1206 bp, Artificial Sequence
  derived and/or modified sequence
aagagaaggcagccaacatgaaggaaaatgtggcatctgcaaccgttttcactctgctactttttctcaacacctgccttctgaatgagagacactcatgcatgaatgtccagactacataaccggtggccccaactcctgccactttggcaagcagtacacctccatgtggaggacatacatcatgatggtcaatgccactaaccagatgggaagcagtttctcggatgaactttatgtggacgtgacttacatagttcagccagaccctcctttggagctggctgtggaagtaaaacagccagaagacagaaaaccctacctgtggattaaatggtctccacctaccctgattgacttaaaaactggttggttcacgctcctgtatgaaattcgattaaaacccgagaaagcagctgagtgggagatccattttgctgggcagcaaacagagtttaagattctcagcctacatccaggacagaaataccttgtccaggttcgctgcaaaccagaccatggatactggagtgcatggagtccagcgaccttcattcagatacctagtggtgaccccttgatgttgggtgcctctcattacaaaaatctcaaatcttacagaccaagaaaaatctcaagtcaaggaagacttgcggtgttcacaaaggcaacattgaccacagtccagtagagctgaagagcatataccagaattcaggaactcaacattttctcccctctgtccaaccacaggacagactgtgcaccccagggagatgctgtgtgtccactggcctcactgacttggattactcctgcagcacgtgaccagccagctcatatgatcactccctactgcccccaaagcagaattgactgggagctggaaacccacacaaaaagggacaattatattgaatgtaacatactccctctgcttacctagtgccttcacctcctatgggcatttggagtaaaaggttgttatgcaggtgtttgtgaaggatgtggccaagtcagttgtctcccttacagggtgacccaagattaatgatatctacccatccccagtccctcgaccccctagttgcaatcagctttgtcactgtcccccttaggcactgccatgtaaagcacgtggtcccccattctgaagcagtgggaaacctagaagagatgtactcttcgcaacctggttggatctta

SEQ ID NO: 81254 - DNA, 568 bp, Artificial Sequence
  derived and/or modified sequence
agcaaaggtgaggcagctgtgtctccctctggctgccttttctcccctcctctctcaccagaagccaacgcgtacacgctgagtggagaggccgcgaggacaagacagtgggacatgcgtgtgctggggaagtcgagaagcaggacaggaggcagctaaagaactctcctattcatggaggcgaacactgaggatgctttccacatgaaccctgaagtgaacttctgatacatttcctgcagcaagagaaggcagccaacatgaaggaaaatgtggcatctgcaaccgttttcactctgctactttttctcaacacctgccttctgaatggacagttacctcctggaaaacctgagatctttaaatgtcgttctcccaataaggaaacattcacctgctggtggaggcctgggacagatggaggacttcctaccaattattcactgacttaccacagggaaggagagacactcatgcatgaatgtccagactacataaccggtggccccaactcctgccactttggcaagcagtacacctccatgtggaggacatacatcatgatggt

SEQ ID NO: 81255 - DNA, 583 bp, Artificial Sequence
  derived and/or modified sequence
attttaccgaccgttcgcgaaacagctttccacacaatggagcttcatgtcctcgtgcaggaagtactcatcgactgatgtggcagactttgctccctggcaaaagtcttacggataccaagtcccatgcctgccagcttgcacctgttaagtcatgtgatacttaggaaatgtacacatcaccccagtgcagaggcctttatccacttcccttcattttgcctggattgttgctgtgagtgagaaataaatgacatgaaatgatcatgtatatcactgtcttcagaggatgctaaagaactctcctattcatggaggcgaacactgaggatgctttccacatgaaccctgaagtgaacttctgatacatttcctgcagcaagagaaggcagccaacatgaaggaaaatgtggcatctgcaaccgttttcactctgctactttttctcaacacctgccttctgaatggacagttacctcctggaaaacctgagatctttaaatgtcgttctcccaataaggaaacattcacctgctggtggaggcctgggacagatggaggacttcctaccaattattcactg

SEQ ID NO: 81256 - DNA, 579 bp, Artificial Sequence
  derived and/or modified sequence
agtccttggagtgaactgggagacaaggaggctgctttggcatggagctgagaacatctctagatcgcactggaaggcagagagaggccagacagggaactctgaagagctgccacagcctgtgccagggtgacatcaggctaaagaactctcctattcatggaggcgaacactgaggatgctttccacatgaaccctgaagtgaacttctgatacatttcctgcagcaagagaaggcagccaacatgaaggaaaatgtggcatctgcaaccgttttcactctgctactttttctcaacacctgccttctgaatggacagttacctcctggaaaacctgagatctttaaatgtcgttctcccaataaggaaacattcacctgctggtggaggcctgggacagatggaggacttcctaccaattattcactgacttaccacagggaaggagagacactcatgcatgaatgtccagactacataaccggtggccccaactcctgccactttggcaagcagtacacctccatgtggaggacatacatcatgatggtcaatgccactaaccagatgggaagca

SEQ ID NO: 81257 - DNA, 588 bp, Artificial Sequence
  derived and/or modified sequence
cttattcctcctgctttgctgaaaccacagctgccttgaatcgagccattttgattctgccgcaaatgagctgtaaaccaaatcaagccacatcaaacaaatccaaccaccatcaaaagcaactaaagaactctcctattcatggaggcgaacactgaggatgctttccacatgaaccctgaagtgaacttctgatacatttcctgcagcaagagaaggcagccaacatgaaggaaaatgtggcatctgcaaccgttttcactctgctactttttctcaacacctgccttctgaatggacagttacctcctggaaaacctgagatctttaaatgtcgttctcccaataaggaaacattcacctgctggtggaggcctgggacagatggaggacttcctaccaattattcactgacttaccacagggaaggagagacactcatgcatgaatgtccagactacataaccggtggccccaactcctgccactttggcaagcagtacacctccatgtggaggacatacatcatgatggtcaatgccactaaccagatgggaagcagtttctcggatgaactttatgtggacg

SEQ ID NO: 81258 - DNA, 581 bp, Artificial Sequence
  derived and/or modified sequence
acagagccaccgggctggggaccggggagcggaggctgaaatccccagacgccggttttctgggctgggctttctgccttactcactccttctccctctttctggattttaccgaccgttcgcgaaacagctttccacacaatggagcttcatgtcctcgtgcaggaagtactcatcgactgatgtggcagactttgctccctggcaaaagttgtaaaaggatgactgcgtagagccacagcattctccttgtcagtgtaggaaatgcagaggaggatttacctccggcacttgcctctaagacacctaataaagatgaggaaggctccagcctgaagcgtgggtgaggtgtccagctgcccaaaggcgacagctaaagaactctcctattcatggaggcgaacactgaggatgctttccacatgaaccctgaagtgaacttctgatacatttcctgcagcaagagaaggcagccaacatgaaggaaaatgtggcatctgcaaccgttttcactctgctactttttctcaacacctgccttctgaatggacagttacctcctggaaaacctgagatcttta

SEQ ID NO: 81259 - DNA, 807 bp, Artificial Sequence
  derived and/or modified sequence
atgaaggagaacgtggccagcgccaccgtgttcaccctgctgctgttcctgaacacctgcctgctgaacggccagctgccccccggcaagcccgagatcttcaagtgcagaagccccaacaaggagaccttcacctgctggtggagacccggcaccgacggcggcctgcccaccaactacagcctgacctaccacagagagggcgagaccctgatgcacgagtgccccgactacatcaccggcggccccaacagctgccacttcggcaagcagtacaccagcatgtggagaacctacatcatgatggtgaacgccaccaaccagatgggcagcagcttcagcgacgagctgtacgtggacgtgacctacatcgtgcagcccgacccccccctggagctggccgtggaggtgaagcagcccgaggacagaaagccctacctgtggatcaagtggagcccccccaccctgatcgacctgaagaccggctggttcaccctgctgtacgagatcagactgaagcccgagaaggccgccgagtgggagatccacttcgccggccagcagaccgagttcaagatcctgagcctgcaccccggccagaagtacctggtgcaggtgagatgcaagcccgaccacggctactggagcgcctggagccccgccaccttcatccagatccccagcggcgaccccctgatgctgggcgccagccactacaagaacctgaagagctacagacccagaaagatcagcagccagggcagactggccgtgttcaccaaggccaccctgaccaccgtgcagtag

SEQ ID NO: 81260 - DNA, 594 bp, Artificial Sequence
  derived and/or modified sequence
atgcacgagtgccccgactacatcaccggcggccccaacagctgccacttcggcaagcagtacaccagcatgtggagaacctacatcatgatggtgaacgccaccaaccagatgggcagcagcttcagcgacgagctgtacgtggacgtgacctacatcgtgcagcccgacccccccctggagctggccgtggaggtgaagcagcccgaggacagaaagccctacctgtggatcaagtggagcccccccaccctgatcgacctgaagaccggctggttcaccctgctgtacgagatcagactgaagcccgagaaggccgccgagtgggagatccacttcgccggccagcagaccgagttcaagatcctgagcctgcaccccggccagaagtacctggtgcaggtgagatgcaagcccgaccacggctactggagcgcctggagccccgccaccttcatccagatccccagcggcgaccccctgatgctgggcgccagccactacaagaacctgaagagctacagacccagaaagatcagcagccagggcagactggccgtgttcaccaaggccaccctgaccaccgtgcagtag

SEQ ID NO: 81261 - DNA, 312 bp, Artificial Sequence
  derived and/or modified sequence
atgaaggagaacgtggccagcgccaccgtgttcaccctgctgctgttcctgaacacctgcctgctgaacggccagctgccccccggcaagcccgagatcttcaagtgcagaagccccaacaaggagaccttcacctgctggtggagacccggcaccgacggcggcctgcccaccaactacagcctgacctaccacagagagggcgagaccctgatgcacgagtgccccgactacatcaccggcggccccaacagctgccacttcggcaagcagtacaccagcatgtggagaacctacatcatgatggtgtag

SEQ ID NO: 81262 - DNA, 189 bp, Artificial Sequence
  derived and/or modified sequence
atgaaggagaacgtggccagcgccaccgtgttcaccctgctgctgttcctgaacacctgcctgctgaacggccagctgccccccggcaagcccgagatcttcaagtgcagaagccccaacaaggagaccttcacctgctggtggagacccggcaccgacggcggcctgcccaccaactacagcctgtag

SEQ ID NO: 81263 - DNA, 336 bp, Artificial Sequence
  derived and/or modified sequence
atgaaggagaacgtggccagcgccaccgtgttcaccctgctgctgttcctgaacacctgcctgctgaacggccagctgccccccggcaagcccgagatcttcaagtgcagaagccccaacaaggagaccttcacctgctggtggagacccggcaccgacggcggcctgcccaccaactacagcctgacctaccacagagagggcgagaccctgatgcacgagtgccccgactacatcaccggcggccccaacagctgccacttcggcaagcagtacaccagcatgtggagaacctacatcatgatggtgaacgccaccaaccagatgggcagctag

SEQ ID NO: 81264 - DNA, 363 bp, Artificial Sequence
  derived and/or modified sequence
atgaaggagaacgtggccagcgccaccgtgttcaccctgctgctgttcctgaacacctgcctgctgaacggccagctgccccccggcaagcccgagatcttcaagtgcagaagccccaacaaggagaccttcacctgctggtggagacccggcaccgacggcggcctgcccaccaactacagcctgacctaccacagagagggcgagaccctgatgcacgagtgccccgactacatcaccggcggccccaacagctgccacttcggcaagcagtacaccagcatgtggagaacctacatcatgatggtgaacgccaccaaccagatgggcagcagcttcagcgacgagctgtacgtggactag

SEQ ID NO: 81265 - DNA, 525 bp, Artificial Sequence
  derived and/or modified sequence
atgagacacttcctgagcaaggtgtacagcttccccatgagaaagctgatcctgttcctggtgttccccgtggtgagacagacccccacccagcacttcaagaaccagttccccgccctgcactgggagcacgagctgggcctggccttcaccaagaacagaatgaactacaccaacaagttcctgctgatccccgagagcggcgactacttcatctacagccaggtgaccttcagaggcatgaccagcgagtgcagcgagatcagacaggccggcagacccaacaagcccgacagcatcaccgtggtgatcaccaaggtgaccgacagctaccccgagcccacccagctgctgatgggcaccaagagcgtgtgcgaggtgggcagcaactggttccagcccatctacctgggcgccatgttcagcctgcaggagggcgacaagctgatggtgaacgtgagcgacatcagcctggtggactacaccaaggaggacaagaccttcttcggcgccttcctgctgtag

SEQ ID NO: 81266 - DNA, 525 bp, Artificial Sequence
  derived and/or modified sequence
atgaggcacttcctgtctaaagtgtactctttcccaatgcggaagcttattctttttctggttttccctgtggtgagacaaacaccgacccaacacttcaagaatcaatttccagcactccactgggagcatgagctgggtctcgcattcactaagaaccggatgaattataccaacaagttcctcctaatccctgagtcaggagactattttatctattctcaggtgacattccgcggtatgaccagcgagtgtagtgaaatccggcaggcagggcgccccaacaagcccgacagcatcaccgtagttattaccaaggttacggattcataccctgagcctacacagctcctgatgggtacgaaaagcgtctgcgaagtcggcagtaattggttccaaccaatctacctgggcgctatgttttctctacaagagggagacaagctgatggttaatgttagtgatatctcgctggttgactacaccaaggaggacaagacgttctttggagctttcctcttgtag

SEQ ID NO: 81267 - DNA, 525 bp, Artificial Sequence
  derived and/or modified sequence
atgaggcacttcctgagcaaggtgtacagcttccccatgaggaagctgatcctcttcctggtgtttcctgtggtgcggcagacccccacccagcacttcaagaaccagtttcctgccctgcactgggagcacgagctgggcctggccttcaccaagaacaggatgaactacaccaacaagttcctgctgatccctgagagcggggactacttcatctacagccaggtgaccttccggggcatgaccagcgagtgcagcgagatccggcaggccggccggcccaacaagccagacagcatcaccgtggtgatcaccaaggtgacagacagctacccagagcccacccagctgctgatgggcaccaagtctgtgtgtgaggtgggcagcaactggttccagcccatctacctgggcgccatgttcagcctgcaggagggggacaagctgatggtgaatgtgtctgacatcagcctggtggactacaccaaggaggacaagaccttctttggagccttcctgctgtag

SEQ ID NO: 81268 - DNA, 525 bp, Artificial Sequence
  derived and/or modified sequence
atgcggcacttcctgagcaaggtgtacagcttccccatgcggaagctgattctcttcctcgtcttcccggtagtgaggcagacacctacccagcactttaagaaccaatttcctgccctgcactgggagcacgagcttggtctggctttcaccaaaaatcgcatgaattatactaataaatttctgctcatccccgaatctggggattactttatctactctcaggtgacctttcgaggcatgacttcagaatgcagcgaaatccgtcaggcaggtaggcccaacaaaccagattcgataaccgtggtaatcacaaaagtaaccgacagctaccctgagcctactcagttactgatgggaaccaagtcagtctgcgaggtcggatccaactggtttcagccaatataccttggggctatgtttagcctacaggagggggataaattgatggtaaacgttagcgatattagcctcgttgattacacaaaggaagacaagacattctttggcgccttcctgctctag

SEQ ID NO: 81269 - DNA, 525 bp, Artificial Sequence
  derived and/or modified sequence
atgcgacattttctcagtaaagtctattccttcccgatgcgcaaacttatcctgtttttggtgttccctgtcgttagacaaacgccaactcagcacttcaaaaaccagttccctgccctgcattgggaacacgagctgggactggcctttacaaagaacagaatgaactatactaataagtttttgttgatacccgaatctggggattacttcatctacagccaggtgaccttccggggaatgactagtgagtgttccgaaattagacaggccggtaggccaaataagcctgattcgatcacagttgtaataacaaaggtcaccgacagctaccctgagcccacccagttactaatggggacaaaatctgtgtgcgaagttggatcgaattggttccagccaatttacctcggagctatgttttccctgcaggaaggggataaactgatggtgaacgtgtccgatatctcccttgtcgattacacaaaagaagataagactttctttggggcttttctgctttag

SEQ ID NO: 81270 - DNA, 2789 bp, Artificial Sequence
  derived and/or modified sequence
agtgcaggtatctcatggagggttttttggatgtcttcttccctgtgggggggttccaaaggcccatgtctcttgggcattttctttcagattctatcagccctctctctttctctcctgtctctctctttcattcatacactgagtcattcagaaatggcttctctccaactcggagctgcaagtaattctggatctggtcacaaacaaaaagtccccagagttgccaatttatctagttcatctgtgccctgttcaagatgatgtaactaaacatttaccttcagggaggtgtttccaaagaattttcatcgatatatagaaatcaagagaaattccatactatcaccaaatcaagagaaattccatactatcaccagttggccaactttccaagtctagtgcagaaatccaaggcacctcacacctagagttcctatacctctgagactccagaggaaagaacaagacagtgcagaaggatatgttagaacccactgaaaacctagaaggttaaaaaggaagcataccctcctgacctataagaaaattttcagtctgcagggggatatccttgtggcccaagacattggtgttatcatttgactaagaggaaattatttgtggtgagctctgagtgaggattaggaccagggagatgccaagtttctatcacttacctcatgcctgtaagacaagtgttttgttccaattgatgaatggggataaaacagttcagccaatcacttatggggcaaagaatgggaatttgaagggtctggtgcctggccttgtcatacgtaaacaagagaggcatcgatgagttttatctgagtcatttgggaaaggataattcttgcagcaagccattttcctaaacacagaagaatagggggattccttaaccttcattgttctccaggatcataggtctcaggtaaaattaaaaattttcaggtcagaccactcagtctcagaaaggcaaagtaatttgccccaggtcactagtccaagatgttattctctttgaacaaatgtgtatgtccagtcacatattcttcattcattcctccccaaagcagtttttagctgttaggtatattcgatcactttagtctattttgaaaatgatatgagacactttttaagcaaagtctacagtttcccaatgagaaaattaatcctctttcttgtctttccagttgtgagacaaactcccacacagcactttaaaaatcagttcccagctctgcactgggaacatgaactaggcctggccttcaccaagaaccgaatgaactataccaacaaattcctgctgatcccagagtcgggagactacttcatttactcccaggtcacattccgtgggatgacctctgagtgcagtgaaatcagacaagcaggccgaccaaacaagccagactccatcactgtggtcatcaccaaggtaacagacagctaccctgagccaacccagctcctcatggggaccaagtctgtatgcgaagtaggtagcaactggttccagcccatctacctcggagccatgttctccttgcaagaaggggacaagctaatggtgaacgtcagtgacatctctttggtggattacacaaaagaagataaaaccttctttggagccttcttactataggaggagagcaaatatcattatatgaaagtcctctgccaccgagttcctaattttctttgttcaaatgtaattataaccaggggttttcttggggccgggagtagggggcattccacagggacaacggtttagctatgaaatttggggcccaaaatttcacacttcatgtgccttactgatgagagtactaactggaaaaaggctgaagagagcaaatatattattaagatgggttggaggattggcgagtttctaaatattaagacactgatcactaaatgaatggatgatctactcgggtcaggattgaaagagaaatatttcaacaccttcctgctatacaatggtcaccagtggtccagttattgttcaatttgatcataaatttgcttcaattcaggagctttgaaggaagtccaaggaaagctctagaaaacagtataaactttcagaggcaaaatccttcaccaatttttccacatactttcatgccttgcctaaaaaaaatgaaaagagagttggtatgtctcatgaatgttcacacagaaggagttggttttcatgtcatctacagcatatgagaaaagctacctttcttttgattatgtacacagatatctaaataaggaagtatgagtttcacatgtatatcaaaaatacaacagttgcttgtattcagtagagttttcttgcccacctattttgtgctgggttctaccttaacccagaagacactatgaaaaacaagacagactccactcaaaatttatatgaacaccactagatacttcctgatcaaacatcagtcaacatactctaaagaataactccaagtcttggccaggcgcagtggctcacacctgtaatcccaacactttgggaggccaaggtgggtggatcatctaaggccgggagttcaagaccagcctgaccaacgtggagaaaccccatctctactaaaaatacaaaattagccgggcgtggtagcgcatggctgtaatcctggctactcaggaggccgaggcagaagaattgcttgaactggggaggcagaggttgcggtgagcccagatcgcgccattgcactccagcctgggtaacaagagcaaaactctgtccaaaaaaaaaaaaa

SEQ ID NO: 81271 - protein, 385 aa, Artificial Sequence
  derived and/or modified sequence
MITQDHIHMSSGLSQDDYFRTWSPGKPFDQALDPAKDPCLKMKCSRHKVCIAQDSQTAVCISHRRLTHRMKEAGVDHRQWRGPILSTCKQCPVVYPSPVCGSDGHTYSFQCKLEYQACVLGKQISVKCEGHCPCPSDKPTSTSRNVKRACSDLEFREVANRLRDWFKALHESGSQNKKTKTLLRPERSRFDTSILPICKDSLGWMFNRLDTNYDLLLDQSELRSIYLDKNEQCTKAFFNSCDTYKDSLISNNEWCYCFQRQQDPPCQTELSNIQKRQGVKKLLGQYIPLCDEDGYYKPTQCHGSVGQCWCVDRYGNEVMGSRINGVADCAIDFEISGDFASGDFHEWTDDEDDEDDIMNDEDEIEDDDEDEGDDDDGGDDHDVYI

SEQ ID NO: 81272 - DNA, 1158 bp, Artificial Sequence
  derived and/or modified sequence
atgatcacccaggaccacatccacatgagcagcggcctgagccaggacgactacttcagaacctggagccccggcaagcccttcgaccaggccctggaccccgccaaggacccctgcctgaagatgaagtgcagcagacacaaggtgtgcatcgcccaggacagccagaccgccgtgtgcatcagccacagaagactgacccacagaatgaaggaggccggcgtggaccacagacagtggagaggccccatcctgagcacctgcaagcagtgccccgtggtgtaccccagccccgtgtgcggcagcgacggccacacctacagcttccagtgcaagctggagtaccaggcctgcgtgctgggcaagcagatcagcgtgaagtgcgagggccactgcccctgccccagcgacaagcccaccagcaccagcagaaacgtgaagagagcctgcagcgacctggagttcagagaggtggccaacagactgagagactggttcaaggccctgcacgagagcggcagccagaacaagaagaccaagaccctgctgagacccgagagaagcagattcgacaccagcatcctgcccatctgcaaggacagcctgggctggatgttcaacagactggacaccaactacgacctgctgctggaccagagcgagctgagaagcatctacctggacaagaacgagcagtgcaccaaggccttcttcaacagctgcgacacctacaaggacagcctgatcagcaacaacgagtggtgctactgcttccagagacagcaggaccccccctgccagaccgagctgagcaacatccagaagagacagggcgtgaagaagctgctgggccagtacatccccctgtgcgacgaggacggctactacaagcccacccagtgccacggcagcgtgggccagtgctggtgcgtggacagatacggcaacgaggtgatgggcagcagaatcaacggcgtggccgactgcgccatcgacttcgagatcagcggcgacttcgccagcggcgacttccacgagtggaccgacgacgaggacgacgaggacgacatcatgaacgacgaggacgagatcgaggacgacgacgaggacgagggcgacgacgacgacggcggcgacgaccacgacgtgtacatctag

SEQ ID NO: 81273 - DNA, 1158 bp, Artificial Sequence
  derived and/or modified sequence
atgattacccaggatcacatccacatgagcagcggcctcagtcaggacgattattttaggacgtggagtcccggcaaaccattcgaccaagcacttgatccagccaaggacccttgcctaaaaatgaagtgctcacgccataaggtgtgcatcgcccaggatagtcagaccgcagtttgtatcagccatcgtagactgacacacagaatgaaggaggcaggggttgaccaccgtcagtggcgaggccccattctttccacttgtaaacaatgtccggtcgtgtatccttcacccgtgtgcgggtctgatgggcatacttatagttttcagtgcaagttagagtatcaagcgtgcgtcttagggaaacagatctcggtcaagtgtgagggacactgtccttgtccgtccgataagccgacttccactagccgcaacgtgaaaagagcttgcagcgacttggaattccgcgaagtcgcaaaccgcctgagagattggttcaaagcgttacatgagagcggctcccagaacaagaagactaaaactttgctgcggcccgagagatctagattcgacacgtccatactacctatttgcaaggattcgctgggatggatgttcaacagactggacacaaactatgacctactcctagaccaatccgagctgagaagcatttatctggacaaaaatgaacagtgcacaaaagctttctttaacagttgtgacacttacaaggactcgctcatatcaaacaacgaatggtgttactgtttccaacgacaacaggaccctccgtgtcagacagaattgtccaatatccaaaagaggcagggcgtgaagaagcttttaggccaatatattccactttgcgacgaggatgggtactataagcccacacagtgccatgggtcagtgggccagtgctggtgcgtggaccggtatggcaatgaggtgatgggctcacggatcaacggtgtagccgactgcgccattgattttgagatctcaggtgactttgctagcggtgactttcatgaatggactgatgacgaggatgacgaggacgatatcatgaacgatgaggacgaaatcgaggacgacgatgaagacgaaggagatgatgacgacgggggggacgatcacgatgtttacatctag

SEQ ID NO: 81274 - DNA, 1158 bp, Artificial Sequence
  derived and/or modified sequence
atgatcacccaggaccacatccacatgagcagcggcctgagccaggatgactacttccgcacctggagccctgggaagccctttgaccaggccctggaccctgccaaggacccctgcctgaagatgaagtgcagccgccacaaggtgtgcatcgcccaggacagccagacagctgtgtgcatcagccaccggcggctgacccacaggatgaaggaggccggcgtggaccaccggcagtggaggggccccatcctgagcacctgcaagcagtgccctgtggtgtaccccagccctgtgtgtggcagtgatggccacacctacagcttccagtgcaagctggagtaccaggcctgtgtgctgggcaagcagatctctgtgaagtgtgagggccactgcccctgccccagcgacaagcccaccagcaccagcagaaatgtgaagagggcctgcagcgacctggagttccgggaggtggccaaccggctgcgggactggttcaaggccctgcacgagagcggcagccagaacaagaagaccaagaccctgctgcggcctgagaggagcagatttgacaccagcatcctgcccatctgcaaggacagcctgggctggatgttcaaccggctggacaccaactatgacctgctgctggaccagagcgagctgcggagcatctacctggacaagaatgagcagtgcaccaaggccttcttcaacagctgtgacacctacaaggacagcctcatcagcaacaatgagtggtgctactgcttccagaggcagcaggaccccccctgccagacagagctgagcaacatccagaagaggcagggcgtgaagaagctgctgggccagtacatccccctgtgtgatgaagatggctactacaagcccacccagtgccacggctctgtgggccagtgctggtgtgtggacagatatggaaatgaggtgatgggcagccgcatcaacggggtggccgactgtgccatcgactttgagatcagcggggactttgccagcggggacttccacgagtggacagatgatgaagatgatgaagatgacatcatgaatgatgaagatgaaattgaagatgatgatgaagatgaaggagatgatgatgatggaggagatgaccatgatgtgtacatctag

SEQ ID NO: 81275 - DNA, 1158 bp, Artificial Sequence
  derived and/or modified sequence
atgatcacccaggaccacatccacatgagcagcggcctgagccaggacgactatttcagaacctggtctccgggtaaaccattcgatcaggccctggaccccgcaaaggatccttgtctgaaaatgaagtgcagcaggcacaaagtgtgtatagcgcaggattctcagacggctgtgtgcatcagccaccgtcgtttaacacaccggatgaaggaggcgggcgtggaccatcgacagtggaggggaccaatcctaagcacgtgtaagcagtgtccagtagtgtacccttcgccagtttgtggctcagacggacacacgtatagtttccagtgcaagctcgagtatcaagcttgtgtgctgggcaagcaaatctccgtaaagtgtgaaggccattgtccctgtccctctgataagcctaccagtacctctaggaacgttaagcgagcatgcagtgacctcgagttcagggaagtagcaaacagactcagggactggtttaaggctctgcacgagtctggtagccagaacaagaagaccaaaactttgctgagacctgaaaggtctcgtttcgatacgtctatcctccctatttgcaaagatagcttgggatggatgttcaatcgccttgacactaattatgacctgctcctggaccaatccgaacttcgaagcatctatcttgataagaacgagcagtgcaccaaggcctttttcaactcctgtgacacatataaggactctctcatctcaaataacgagtggtgctattgtttccagaggcagcaggatccaccatgtcagacagaactcagcaacattcagaagagacagggcgtgaagaagctgctcggccagtatattcctttgtgtgacgaagatggatactacaagcctactcaatgtcatggctctgtcggacagtgctggtgtgtggaccgctatggtaatgaagtgatggggtccaggatcaatggggtggccgattgcgcaatagatttcgagattagcggcgatttcgcgagtggggacttccacgagtggacagacgacgaggatgatgaagacgacatcatgaacgatgaagatgagatcgaagacgatgacgaggacgagggagacgacgacgatggcggagatgaccacgatgtgtacatttag

SEQ ID NO: 81276 - DNA, 1158 bp, Artificial Sequence
  derived and/or modified sequence
atgatcacccaggatcatatccacatgagctccggtctctcgcaggacgactactttcgtacttggtcacccggtaagcccttcgaccaagcactggatccggctaaggacccatgtcttaagatgaagtgcagccgtcacaaggtttgtatagctcaggattcccagacggctgtgtgtatttctcaccgaaggctcacgcataggatgaaggaggctggagtggatcatagacagtggcggggaccaattctgtccacctgcaagcagtgtccagtggtgtacccttcccccgtctgtggcagcgacggtcatacttacagctttcagtgcaagcttgagtatcaggcttgtgttcttgggaaacagatctccgtgaagtgcgaaggccattgtccctgccctagtgacaagcctactagtacttctcgaaatgtcaagagagcatgttctgatctggaattccgagaggtggctaataggctgcgcgactggtttaaagccctgcacgagtccggctctcaaaataagaagacgaagacattgctgcggccagagagatctcggtttgatacatccatcctgccaatttgtaaggactccttgggttggatgttcaatcgcttggacaccaactacgacctgttgctcgatcagtccgaactacggtccatctaccttgataagaatgaacagtgcaccaaagcatttttcaacagctgcgacacgtataaagatagcctcatctcaaataatgagtggtgttactgctttcagagacaacaggaccctccctgtcagactgagctgagtaacattcagaaaagacagggggtcaagaagttactaggtcagtatatccctctatgtgatgaggacggatattacaagccaacacagtgccacggcagcgtgggccagtgttggtgtgtggataggtacgggaacgaggttatgggcagccggatcaacggggtggccgattgcgcgatcgactttgaaatctcaggggatttcgcctctggtgactttcacgagtggacagatgatgaagacgatgaggatgacatcatgaatgacgaagatgagatagaagatgacgacgaggacgaaggtgacgatgacgacggcggtgacgaccacgatgtatatatctag

SEQ ID NO: 81277 - DNA, 1158 bp, Artificial Sequence
  derived and/or modified sequence
atgatcacccaagaccatattcatatgagttcgggactcagccaggacgattattttcggacttggtcaccaggaaaacccttcgaccaggcgctcgatcctgctaaagacccatgcttgaagatgaagtgttcaagacataaagtgtgtatcgctcaagactcacaaacagccgtctgtatctctcatcggcgactgacacacaggatgaaagaggcaggcgttgatcataggcaatggcggggccctatcctctccacttgcaagcaatgtccagtggtgtacccaagtccagtgtgcggcagcgatggccacacctattccttccaatgcaaacttgaatatcaagcctgcgtgctgggaaagcagatctctgtgaaatgcgagggtcactgcccgtgtccgagcgataaaccgacctcaacctcacggaatgttaaaagggcatgtagcgatctggagttcagagaggttgccaatagactgagagactggttcaaagccttgcatgaatcgggtagtcaaaacaaaaagacaaagactctcctgagacccgaacgatctcgtttcgacacttctatattgcccatttgtaaggactcattaggatggatgttcaaccgtttggataccaattacgacctgttactggaccagtccgagcttaggagcatttacctggacaaaaatgaacagtgtacaaaagccttcttcaacagttgcgatacttacaaggactctctgatcagcaacaacgaatggtgctactgttttcaacgtcagcaagaccctccctgccagacagagctgtccaacattcagaagcgtcagggtgtgaagaagttgctggggcagtacatccccctttgtgatgaggatgggtactacaaacccacccagtgccacggctcagtggggcaatgttggtgcgttgatcgctacggcaatgaggtgatgggctcaagaattaatggggtcgcagactgcgcaatagatttcgagataagtggcgactttgcttcaggtgattttcatgaatggactgacgatgaggatgacgaggacgatatcatgaatgatgaggatgagatcgaggatgacgacgaagatgaaggcgatgacgacgacgggggagacgatcacgatgtgtacatttag

SEQ ID NO: 81278 - DNA, 1158 bp, Artificial Sequence
  derived and/or modified sequence
atgatcacacaggaccacatccatatgagcagcggcctgtctcaggacgactactttcgtacatggagccccggtaagccattcgaccaggcccttgatcccgccaaagatccttgcttaaaaatgaagtgctcacgacataaggtttgtatcgctcaggactcacagacagcagtttgtatcagtcacagaagactcacccatagaatgaaggaagcaggcgtcgatcatcgccagtggagaggccccatcttatcaacttgcaaacaatgtcctgtcgtctatcctagtccagtctgtggcagtgacggccatacatactcatttcaatgtaaactggaatatcaggcatgtgttttagggaaacagattagcgtgaaatgtgaaggccattgcccgtgccccagcgacaagccaacctctacctctcgcaacgtaaaacgagcatgctccgatctagaatttagggaagtcgccaataggctccgagactggtttaaagcattacatgaatccgggagccaaaataaaaaaaccaagaccctgctgcgtcccgagaggtctcgattcgacacaagtatccttcccatttgcaaggattccctgggttggatgttcaacagactagataccaattatgacctcctcctggatcagagcgaactgcgcagtatttacttagacaaaaatgaacaatgcacaaaagcttttttcaacagctgcgacacctacaaagactccctgatctctaacaatgagtggtgttactgtttccaacgccagcaagatcccccttgtcagactgaactgagtaacatacaaaaacgccaaggagtgaagaagctgctcggacagtatatcccactgtgtgacgaggacggttattacaaacctactcagtgccatgggtcagttgggcaatgctggtgtgtcgataggtacggaaatgaagtgatggggagtcggatcaacggcgtggcggattgcgcaattgactttgaaatttcaggtgattttgcaagcggtgacttccacgagtggacagacgacgaagacgacgaggatgatataatgaacgacgaagatgaaattgaagatgacgacgaagatgagggggacgacgatgatggtggggatgatcacgatgtgtatatatag

SEQ ID NO: 81279 - DNA, 951 bp, Artificial Sequence
  derived and/or modified sequence
atgaaggaggccggcgtggaccacagacagtggagaggccccatcctgagcacctgcaagcagtgccccgtggtgtaccccagccccgtgtgcggcagcgacggccacacctacagcttccagtgcaagctggagtaccaggcctgcgtgctgggcaagcagatcagcgtgaagtgcgagggccactgcccctgccccagcgacaagcccaccagcaccagcagaaacgtgaagagagcctgcagcgacctggagttcagagaggtggccaacagactgagagactggttcaaggccctgcacgagagcggcagccagaacaagaagaccaagaccctgctgagacccgagagaagcagattcgacaccagcatcctgcccatctgcaaggacagcctgggctggatgttcaacagactggacaccaactacgacctgctgctggaccagagcgagctgagaagcatctacctggacaagaacgagcagtgcaccaaggccttcttcaacagctgcgacacctacaaggacagcctgatcagcaacaacgagtggtgctactgcttccagagacagcaggaccccccctgccagaccgagctgagcaacatccagaagagacagggcgtgaagaagctgctgggccagtacatccccctgtgcgacgaggacggctactacaagcccacccagtgccacggcagcgtgggccagtgctggtgcgtggacagatacggcaacgaggtgatgggcagcagaatcaacggcgtggccgactgcgccatcgacttcgagatcagcggcgacttcgccagcggcgacttccacgagtggaccgacgacgaggacgacgaggacgacatcatgaacgacgaggacgagatcgaggacgacgacgaggacgagggcgacgacgacgacggcggcgacgaccacgacgtgtacatctag

SEQ ID NO: 81280 - DNA, 951 bp, Artificial Sequence
  derived and/or modified sequence
atgaaagaggcaggcgtggaccacagacagtggcgtggtccaatactcagcacatgcaaacagtgtccagttgtatacccctcaccagtctgtggcagcgacggccacacctattccttccaatgtaaactggagtatcaagcgtgtgtgttaggcaagcaaattagcgtgaagtgtgaaggacattgcccctgtccctccgacaagccaaccagcaccagcaggaacgtgaaacgggcttgctctgacctcgaatttcgggaggtggccaatcgattgcgagattggtttaaggcccttcatgagagtggcagccagaacaagaagactaagactttactgagacctgagaggtccaggttcgacaccagcatcttgcctatctgcaaggattccctcggttggatgttcaatagattggatactaactatgaccttctgctggaccagagcgagttgaggagcatctacctcgacaagaatgaacagtgcacgaaagccttctttaacagctgtgacacttacaaggactcattgatatcaaataacgaatggtgctactgttttcagcgccagcaagacccaccctgccagacagagctcagtaatattcaaaaaagacagggagtcaaaaaactgttggggcaatatatcccactgtgcgacgaagacgggtactacaagcccacacagtgtcacgggagtgtgggccagtgttggtgcgtagaccgctacgggaatgaagttatgggctccaggattaatggggtggccgactgcgccattgacttcgagatttccggtgatttcgcctctggagactttcatgagtggaccgacgatgaggacgatgaggatgatatcatgaacgacgaggacgaaatcgaggatgacgatgaggacgagggagatgatgacgatgggggggacgatcatgacgtatacatttag

SEQ ID NO: 81281 - DNA, 951 bp, Artificial Sequence
  derived and/or modified sequence
atgaaggaggccggcgtggaccaccggcagtggaggggccccatcctgagcacctgcaagcagtgccctgtggtgtaccccagccctgtgtgtggcagtgatggccacacctacagcttccagtgcaagctggagtaccaggcctgtgtgctgggcaagcagatctctgtgaagtgtgagggccactgcccctgccccagcgacaagcccaccagcaccagcagaaatgtgaagagggcctgcagcgacctggagttccgggaggtggccaaccggctgcgggactggttcaaggccctgcatgaaagtggcagccagaacaagaagaccaagaccctgctgcggcctgagaggagcagatttgacaccagcatcctgcccatctgcaaggacagcctgggctggatgttcaaccggctggacaccaactatgacctgctgctggaccagagcgagctgcggagcatctacctggacaagaatgagcagtgcaccaaggccttcttcaacagctgtgacacctacaaggacagcctcatcagcaacaatgagtggtgctactgcttccagaggcagcaggaccccccctgccagacagagctgagcaacatccagaagaggcagggcgtgaagaagctgctgggccagtacatccccctgtgtgatgaagatggctactacaagcccacccagtgccacggctctgtgggccagtgctggtgtgtggacagatatggaaatgaggtgatgggcagccgcatcaatggagtggccgactgtgccatcgactttgagatcagcggggactttgccagcggggacttccacgagtggacagatgatgaagatgatgaagatgacatcatgaatgatgaagatgaaattgaagatgatgatgaagatgaaggagatgatgatgatggaggagatgaccatgatgtgtacatctag

SEQ ID NO: 81282 - DNA, 951 bp, Artificial Sequence
  derived and/or modified sequence
atgaaggaggccggcgtggaccaccggcagtggcggggccccatcctttcaacctgtaagcagtgtccagtggtgtatccctcaccagtgtgtgggtccgatggacacacctatagctttcaatgcaaactggaataccaggcctgcgtgctgggcaaacagatcagcgtcaagtgcgagggtcactgtccctgtccttctgataagcctaccagcacttcgaggaacgtgaagcgagcctgttccgacctagagtttcgggaagtggcaaacaggctgagagattggttcaaagccttgcacgaatcaggatcccaaaataaaaaaaccaagaccctgttgaggcccgagcggtcgcggttcgatacgtcgattctgcctatctgtaaggactccctagggtggatgttcaatcggcttgataccaattacgaccttctgttggatcaaagcgaactcaggtctatctatttggacaaaaatgaacagtgtaccaaagccttttttaatagttgcgacacatataaggactcactgatttccaataacgagtggtgttactgctttcagaggcaacaggaccctccctgtcagacggaacttagcaacattcagaaaaggcagggcgtgaaaaagctgctcgggcaatatatccccctgtgcgatgaagacggatattataaaccaacgcagtgtcacggcagcgtaggtcagtgttggtgcgtggaccgctatggtaatgaagtgatgggcagtagaatcaacggggtagccgactgtgcgatcgatttcgagatcagtggggactttgctagcggtgattttcatgaatggaccgacgatgaggacgatgaggacgacattatgaacgatgaggatgaaatcgaagatgacgatgaggatgaaggggacgatgacgatggcggcgatgaccatgacgtctacatatag

SEQ ID NO: 81283 - DNA, 951 bp, Artificial Sequence
  derived and/or modified sequence
atgaaagaagctggggtcgatcacagacagtggaggggcccaatactctctacttgcaagcagtgccctgtggtgtacccctcccccgtgtgcgggtcagacggccacacgtactcctttcagtgtaagttagagtatcaggcctgtgtcttgggcaagcagataagcgtgaaatgtgaagggcactgtccttgcccctcagataaacccaccagtacgagcaggaatgtgaagcgcgcatgttccgacctcgagtttcgggaggtggccaatcggctgcgagattggttcaaggcactccacgaatccggttctcagaataagaagactaagacgttattgagaccagaaaggtccagattcgataccagcattttgccaatctgcaaggactccctaggatggatgttcaaccgcctggataccaactatgacctgctcctggatcagagcgaattgagatctatctaccttgataaaaatgagcaatgcaccaaggcatttttcaactcctgtgacacgtataaggattcattgattagtaataatgaatggtgttactgcttccaaaggcagcaggatcccccttgtcagacagagctgtctaatatccagaagcggcagggcgtcaaaaagctgctgggccaatacatccctctgtgcgacgaggacggctactacaaaccaacacagtgtcatgggtctgtgggacaatgctggtgcgtcgaccgctacgggaatgaagtaatgggtagtagaatcaacggggtcgcggattgcgcgattgatttcgaaatttctggcgacttcgcttctggagattttcatgagtggaccgacgatgaagatgatgaggatgacattatgaatgatgaagatgaaatcgaggatgatgacgaggatgaaggggacgacgacgatgggggtgatgatcacgacgtgtatatttag

SEQ ID NO: 81284 - DNA, 951 bp, Artificial Sequence
  derived and/or modified sequence
atgaaagaagcgggcgtggatcaccgacagtggcgggggccaatactctccacatgtaagcaatgccccgtggtgtaccccagtcccgtgtgcggatccgatggccatacctattctttccaatgcaaactggaatatcaggcctgcgttttaggaaagcaaataagcgtgaaatgcgaaggacactgtccctgtccctctgataagcccacatccacaagtcgcaacgttaaacgcgcctgttccgatttggagttcagggaagtggcaaaccggttgagggattggtttaaggcccttcacgagagcggcagtcagaacaagaagacaaagaccctgcttagaccagagcgctcccgctttgacacaagtatattgccaatatgtaaagatagcttggggtggatgttcaacaggctggatacaaattatgatttactgctggatcagtcggagctgcggagtatatacttggacaagaacgagcagtgcacgaaggcctttttcaacagttgcgacacctataaagactctctgattagcaataatgagtggtgttactgctttcagcgtcagcaggacccaccctgccagacggagctctccaacattcagaaacggcaaggcgttaaaaagttgttgggccagtatatccctctgtgtgatgaggatggatattataagcctactcagtgccacggatccgtgggccagtgttggtgcgtcgacagatacggtaatgaagtcatgggctccagaataaacggagttgccgactgtgccattgatttcgagattagcggagactttgcaagcggagatttccacgaatggaccgatgacgaggacgatgaagacgacataatgaacgatgaggatgagatcgaagacgatgacgaggacgagggcgatgatgatgacggcggagatgaccatgacgtttatatttag

SEQ ID NO: 81285 - DNA, 951 bp, Artificial Sequence
  derived and/or modified sequence
atgaaggaggccggcgtcgaccacagacaatggagagggccaatcttaagtacgtgcaagcaatgtccagtcgtctatccctcccccgtgtgcggctctgatggacatacctattccttccaatgcaaacttgaatatcaagcctgcgtgctcggcaaacagattagcgtgaagtgcgaaggccattgcccgtgtccaagtgataaaccaaccagtacatccaggaacgttaagcgagcgtgctccgacctagaatttcgggaagttgcaaaccggctgcgggactggttcaaggctctgcacgagagtggcagccaaaacaaaaagactaagaccctcctgcggccggaacgctctcggtttgacacatcaatcctgcccatctgcaaggactcactaggttggatgtttaatcgccttgacacgaactatgaccttctcctcgatcaatcagaattgcggagcatataccttgacaaaaatgaacaatgtactaaggccttcttcaatagttgcgatacctataaggattctctgatttcgaataacgagtggtgctattgcttccagcgtcagcaggaccccccttgccaaactgaattgtcaaatattcagaaacgacagggagtaaaaaagcttcttggacaatacataccattatgcgacgaagacgggtactataaacccactcaatgtcacggatctgtcgggcagtgctggtgtgtcgaccgatacgggaatgaagtgatgggctcaagaattaatggcgtggcagattgtgccatagactttgaaatttccggagattttgcaagcggggactttcacgagtggaccgacgacgaagacgacgaagacgatattatgaatgacgaggatgagattgaagacgacgacgaggacgagggggacgacgatgacggcggggatgatcatgatgtgtatatttag

SEQ ID NO: 81286 - DNA, 1700 bp, Artificial Sequence
  derived and/or modified sequence
gtgcccgctcgggctgctgcggctggggcttgcttccttatacccacctctcctcctctgggtctgcgtgtgtatgctcaaggtgtcagccgtactgtgtgtgtgtgcagccgcttggtgcagtcagtctctcgcagctgccgcggcggtggctgcagccggggggcggtcggacggcggtaattttctggatgataaacaatggctcaccacaatctctcagtatgacaaggaagtcggacagtggaacaaattccgagacgatgattatttccgcacttggagtccaggaaaacccttcgatcagggatgaaagaagcaggagtagaccataggcagtggaggggtcccatattatccacctgcaagcagtgcccagtggtctatcccagccctgtttgtggttcagatggtcatacctactcttttcagtgcaaactagaatatcaggcatgtgtcttaggaaaacagatctcagtcaaatgtgaaggacattgcccatgtccttcagataagcccaccagtacaagcagaaatgttaagagagcatgcagtgacctggagttcagggaagtggcaaacagattgcgggactggttcaaggcccttcatgaaagtggaagtcaaaacaagaagacaaaaacattgctgaggcctgagagaagcagattcgataccagcatcttgccaatttgcaaggactcacttggctggatgtttaacagacttgatacaaactatgacctgctattggaccagtcagagctcagaagcatttaccttgataagaatgaacagtgtaccaaggcattcttcaattcttgtgacacatacaaggacagtttaatatctaataatgagtggtgctactgcttccagagacagcaagacccaccttgccagactgagctcagcaatattcagaagcggcaaggggtaaagaagctcctaggacagtatatccccctgtgtgatgaagatggttactacaagccaacacaatgtcatggcagtgttggacagtgctggtgtgttgacagatatggaaatgaagtcatgggatccagaataaatggtgttgcagattgtgctatagattttgagatctccggagattttgctagtggcgattttcatgaatggactgatgatgaggatgatgaagacgatattatgaatgatgaagatgaaattgaagatgatgatgaagatgaaggggatgatgatgatggtggtgatgaccatgatgtatacatttgattgatgacagttgaaatcaataaattctacatttctaatatttacaaaaatgatagcctatttaaaattatcttcttccccaataacaaaatgattctaaacctcacatatattttgtataattatttgaaaaattgcagctaaagttatagaactttatgtttaaataagaatcatttgctttgagtttttatattccttacacaaaaagaaaatacatatgcagtctagtcagacaaaataaagttttgaagtgctactataataagtttttcacgagaacaaactttgtaaatcttccataagcaaaatgacagctagtgcttgggatcgtacatgttaattttctgaaagataattctaagtgaaatttaaaataaataaatttttaatgacctgggtcttaaggatttaggaaaaatatgcatgctttaattgca

SEQ ID NO: 81287 - protein, 340 aa, Artificial Sequence
  derived and/or modified sequence
MINNGSPQSLSMTRKSDSGTNSETMKEAGVDHRQWRGPILSTCKQCPVVYPSPVCGSDGHTYSFQCKLEYQACVLGKQISVKCEGHCPCPSDKPTSTSRNVKRACSDLEFREVANRLRDWFKALHESGSQNKKTKTLLRPERSRFDTSILPICKDSLGWMFNRLDTNYDLLLDQSELRSIYLDKNEQCTKAFFNSCDTYKDSLISNNEWCYCFQRQQDPPCQTELSNIQKRQGVKKLLGQYIPLCDEDGYYKPTQCHGSVGQCWCVDRYGNEVMGSRINGVADCAIDFEISGDFASGDFHEWTDDEDDEDDIMNDEDEIEDDDEDEGDDDDGGDDHDVYI

SEQ ID NO: 81288 - protein, 316 aa, Artificial Sequence
  derived and/or modified sequence
MKEAGVDHRQWRGPILSTCKQCPVVYPSPVCGSDGHTYSFQCKLEYQACVLGKQISVKCEGHCPCPSDKPTSTSRNVKRACSDLEFREVANRLRDWFKALHESGSQNKKTKTLLRPERSRFDTSILPICKDSLGWMFNRLDTNYDLLLDQSELRSIYLDKNEQCTKAFFNSCDTYKDSLISNNEWCYCFQRQQDPPCQTELSNIQKRQGVKKLLGQYIPLCDEDGYYKPTQCHGSVGQCWCVDRYGNEVMGSRINGVADCAIDFEISGDFASGDFHEWTDDEDDEDDIMNDEDEIEDDDEDEGDDDDGGDDHDVYI

SEQ ID NO: 81289 - DNA, 1023 bp, Artificial Sequence
  derived and/or modified sequence
atgatcaacaacggcagcccccagagcctgagcatgaccagaaagagcgacagcggcaccaacagcgagaccatgaaggaggccggcgtggaccacagacagtggagaggccccatcctgagcacctgcaagcagtgccccgtggtgtaccccagccccgtgtgcggcagcgacggccacacctacagcttccagtgcaagctggagtaccaggcctgcgtgctgggcaagcagatcagcgtgaagtgcgagggccactgcccctgccccagcgacaagcccaccagcaccagcagaaacgtgaagagagcctgcagcgacctggagttcagagaggtggccaacagactgagagactggttcaaggccctgcacgagagcggcagccagaacaagaagaccaagaccctgctgagacccgagagaagcagattcgacaccagcatcctgcccatctgcaaggacagcctgggctggatgttcaacagactggacaccaactacgacctgctgctggaccagagcgagctgagaagcatctacctggacaagaacgagcagtgcaccaaggccttcttcaacagctgcgacacctacaaggacagcctgatcagcaacaacgagtggtgctactgcttccagagacagcaggaccccccctgccagaccgagctgagcaacatccagaagagacagggcgtgaagaagctgctgggccagtacatccccctgtgcgacgaggacggctactacaagcccacccagtgccacggcagcgtgggccagtgctggtgcgtggacagatacggcaacgaggtgatgggcagcagaatcaacggcgtggccgactgcgccatcgacttcgagatcagcggcgacttcgccagcggcgacttccacgagtggaccgacgacgaggacgacgaggacgacatcatgaacgacgaggacgagatcgaggacgacgacgaggacgagggcgacgacgacgacggcggcgacgaccacgacgtgtacatctag

SEQ ID NO: 81290 - DNA, 1023 bp, Artificial Sequence
  derived and/or modified sequence
atgataaacaacgggagccctcagtccctaagtatgactcggaagagcgacagtgggactaacagtgaaacaatgaaagaagctggtgtggaccatcgtcagtggcgaggcccaatccttagcacttgcaagcaatgccccgtcgtctacccttcaccagtgtgcgggtcagatgggcatacgtactcctttcaatgtaaactggagtaccaggcctgcgtcttgggtaaacagattagtgtcaagtgtgagggccactgcccttgcccatccgacaagcccacgtctactagccgaaacgtaaaaagagcttgttccgacctcgagttcagggaggtggctaaccgcctgcgggactggttcaaagcacttcacgagtctggctcacagaacaaaaaaactaagactctgcttcgccccgagcggagcagattcgacacctccatactgccaatttgcaaggattccctaggatggatgtttaaccgactggacactaactacgacttactgctggaccagagtgaattacggagtatctacctagacaagaacgaacaatgcaccaaagctttctttaactcatgcgatacttacaaggattcactcatctccaataatgaatggtgttattgctttcagagacagcaggaccccccttgtcaaactgaactgagcaatattcaaaaaagacagggtgtcaaaaagctgctgggtcagtacattccactatgcgatgaggatggctactataaacctacccagtgccatgggtctgtgggtcagtgctggtgcgtggatagatacgggaatgaggttatgggttccagaatcaacggcgtagctgattgtgccatagactttgaaataagcggtgatttcgccagcggggactttcatgagtggaccgatgacgaggacgatgaggatgatatcatgaatgacgaagatgagatcgaagatgacgacgaggatgagggagacgatgatgacggcggcgatgaccacgacgtttatatatag

SEQ ID NO: 81291 - DNA, 1023 bp, Artificial Sequence
  derived and/or modified sequence
atgatcaacaacggcagcccccagagcctgtccatgaccaggaagagtgacagcggcaccaacagcgagaccatgaaggaggccggcgtggaccaccggcagtggaggggccccatcctgagcacctgcaagcagtgccctgtggtgtaccccagccctgtgtgtggcagtgatggccacacctacagcttccagtgcaagctggagtaccaggcctgtgtgctgggcaagcagatctctgtgaagtgtgagggccactgcccctgccccagcgacaagcccaccagcaccagcagaaatgtgaagagggcctgcagcgacctggagttccgggaggtggccaaccggctgcgggactggttcaaggccctgcatgaaagtggcagccagaacaagaagaccaagaccctgctgcggcctgagaggagcagatttgacaccagcatcctgcccatctgcaaggacagcctgggctggatgttcaaccggctggacaccaactatgacctgctgctggaccagagcgagctgcggagcatctacctggacaagaatgagcagtgcaccaaggccttcttcaacagctgtgacacctacaaggacagcctcatcagcaacaatgagtggtgctactgcttccagaggcagcaggaccccccctgccagacagagctgagcaacatccagaagaggcagggcgtgaagaagctgctgggccagtacatccccctgtgtgatgaagatggctactacaagcccacccagtgccacggctctgtgggccagtgctggtgtgtggacagatatggaaatgaggtgatgggcagccgcatcaatggagtggccgactgtgccatcgactttgagatcagcggggactttgccagcggggacttccacgagtggacagatgatgaagatgatgaagatgacatcatgaatgatgaagatgaaattgaagatgatgatgaagatgaaggagatgatgatgatggaggagatgaccatgatgtgtacatctag

SEQ ID NO: 81292 - DNA, 1023 bp, Artificial Sequence
  derived and/or modified sequence
atgatcaacaacggcagcccccagagcctgagcatgacccggaagtccgactctggcactaattctgagactatgaaagaagccggggtggaccacaggcagtggaggggacccatcctgtctacatgcaaacagtgtcccgttgtctacccctcgcccgtttgcgggagcgacggccacacctattccttccagtgtaaactcgagtaccaggcgtgcgtgctaggcaaacagatcagcgtgaaatgcgagggtcactgtccttgcccttcagataagccaacttccacgtcaaggaatgtgaaaagggcctgctccgacctggaatttcgtgaagtggccaatagactgcgtgactggtttaaagctttacacgagtcggggtcccagaacaaaaaaactaaaaccctcctaagacccgagcggtctcgctttgacacctctatcttgccaatttgtaaggatagtcttgggtggatgttcaaccgcttggacaccaattatgacctgctgctggatcagagcgagctgcggtctatctacctggataagaatgaacagtgtactaaagctttcttcaactcatgcgacacttacaaggatagtcttatcagtaataatgagtggtgttattgcttccagcggcagcaagaccccccctgtcaaaccgaactttctaacattcagaagcgccaaggagtgaagaagctgctcggtcaatatatccccctgtgtgacgaagacggatattataagcctacccagtgccatggatcagtcggacagtgttggtgcgtggacaggtacgggaatgaggttatgggcagcagaatcaatggggtggccgattgtgctatagatttcgagatcagcggggattttgctagcggcgactttcacgaatggactgatgacgaggatgatgaggatgatatcatgaacgacgaggacgagattgaagacgatgatgaggacgagggtgatgacgacgacggcggagatgaccacgatgtctacatatag

SEQ ID NO: 81293 - DNA, 1023 bp, Artificial Sequence
  derived and/or modified sequence
atgatcaacaacgggtccccccagagcctctcaatgactcgcaaatctgatagtgggaccaatagtgaaacaatgaaagaagccggagttgatcaccgccaatggagaggacctatcctgtccacttgtaagcagtgccctgttgtctacccctcgccggtgtgcggcagcgacggccacacgtacagttttcagtgcaagctggagtatcaggcatgcgtcctcggtaagcaaattagcgtgaagtgcgaagggcactgcccatgtccatccgataagcctacctcgacctccagaaatgttaaaagagcctgctccgatctggagttccgtgaggtagcaaatagactccgtgactggttcaaagcactgcacgaatccggtagccagaataaaaaaaccaagacgctattgcgacccgaaagatcaagattcgacactagtattcttcctatctgtaaggattcactaggatggatgttcaacagattagacaccaattacgatttgcttttggatcagtctgagctacggagtatctacctggataaaaacgagcagtgcaccaaagcttttttcaacagctgtgacacatacaaagacagtctcatctccaacaacgaatggtgttactgcttccagcggcaacaagatcccccttgtcagacagagcttagcaatatccagaaacggcagggagtcaagaagcttctgggccaatatatcccgttatgtgacgaggatggatattacaagcctacgcaatgtcatggtagtgtcggccagtgctggtgtgtggataggtatgggaacgaggttatgggctctcgaatcaatggggtggcagactgcgctattgactttgagatcagcggcgattttgcctccggagactttcacgaatggacagatgacgaggacgacgaggatgatatcatgaatgacgaagacgagatcgaggacgatgatgaggacgaaggggatgatgatgacggtggagacgatcacgatgtgtacatttag

SEQ ID NO: 81294 - DNA, 1023 bp, Artificial Sequence
  derived and/or modified sequence
atgataaataacgggagtccccagagcctgtccatgacacggaagtctgacagtggaaccaacagcgaaacgatgaaggaagccggcgtagaccacagacaatggcgcgggccaatactgagcacctgcaagcaatgcccagtcgtatacccatccccagtatgcggtagcgatggccacacatacagttttcagtgtaagttagagtaccaggcctgtgtgcttgggaagcagatcagcgtcaaatgcgaaggacattgcccttgtccttctgataaaccaacaagcacaagccgaaatgtaaaacgggcctgttcagatttggaatttcgagaagtggccaatagactgagggactggtttaaagccttgcacgaaagtggatcgcagaataagaagacgaagactctcctgcggccagaacgaagtcggtttgataccagcattctgcctatctgcaaagatagcctgggctggatgttcaacagactcgacacaaactatgacctgctgttagaccaatcagagttaagaagcatatacctggacaaaaatgaacagtgcacaaaagctttcttcaattcctgtgacacctacaaggattccctaatttctaacaacgaatggtgctattgcttccaaaggcaacaagatcctccatgtcagactgaattaagtaacatccaaaagcggcagggtgtgaaaaaactgctgggccagtatatacctttatgtgacgaagatggctactataagcctactcagtgccatggctctgtcggacagtgctggtgtgtcgatcgatacgggaatgaggtgatgggttccagaataaacggcgtagcagactgcgcgatcgactttgagatttccggtgattttgccagtggcgatttccacgagtggaccgacgatgaggatgacgaggacgacattatgaacgacgaggatgagatcgaagacgatgacgaagatgagggtgatgacgacgacggtggggacgatcacgatgtgtacatatag

SEQ ID NO: 81295 - DNA, 1023 bp, Artificial Sequence
  derived and/or modified sequence
atgatcaacaacgggtctccccagagtctgtccatgacaagaaagagtgatagcgggaccaactctgaaaccatgaaggaagccggggtagatcatcgtcaatggagaggtcccatactttcaacttgtaaacagtgcccagtcgtgtaccctagccccgtctgcggatctgatggacatacttactcttttcagtgtaaattagagtaccaagcctgtgtgctcggcaaacagatctccgtgaaatgcgaaggacattgtccctgccctagcgataagcccacttctacctcaaggaatgtgaaacgcgcgtgcagtgaccttgagttccgggaagttgccaatcgcctgagagattggttcaaagccttgcacgagagcgggagtcagaataaaaagaccaaaactctccttcggcccgaacgctcacgatttgataccagcattcttcccatttgcaaagactctcttggatggatgtttaatcgcctggatactaactacgacctcctgctagaccagagcgaactgcgcagcatctacctggacaagaatgagcaatgtactaaggctttctttaatagttgcgacacatacaaggattccctaatttctaacaacgaatggtgctattgcttccaaaggcaacaagatcctccatgtcagactgaattaagtaacatccaaaagcggcagggtgtgaaaaaactgctgggccagtatatacctttatgtgacgaagatggctactataagcctactcagtgccatggctctgtcggacagtgctggtgtgtcgatcgatacgggaatgaggtgatgggttccagaataaacggcgtagcagactgcgcgatcgactttgagatttccggtgattttgccagtggcgatttccacgagtggaccgatgacgaagacgacgaagatgacattatgaacgacgaggacgagattgaagatgacgatgaggacgagggggatgacgatgatggaggggatgatcatgacgtatatatctag

SEQ ID NO: 81296 - DNA, 1023 bp, Artificial Sequence
  derived and/or modified sequence
atgataaacaatggctcaccacaatctctcagtatgacaaggaagtcggacagtggaacaaattccgagacgatgaaagaagcaggagtagaccataggcagtggaggggtcccatattatccacctgcaagcagtgcccagtggtctatcccagccctgtttgtggttcagatggtcatacctactcttttcagtgcaaactagaatatcaggcatgtgtcttaggaaaacagatctcagtcaaatgtgaaggacattgcccatgtccttcagataagcccaccagtacaagcagaaatgttaagagagcatgcagtgacctggagttcagggaagtggcaaacagattgcgggactggttcaaggcccttcatgaaagtggaagtcaaaacaagaagacaaaaacattgctgaggcctgagagaagcagattcgataccagcatcttgccaatttgcaaggactcacttggctggatgtttaacagacttgatacaaactatgacctgctattggaccagtcagagctcagaagcatttaccttgataagaatgaacagtgtaccaaggcattcttcaattcttgtgacacatacaaggacagtttaatatctaataatgagtggtgctactgcttccagagacagcaagacccaccttgccagactgagctcagcaatattcagaagcggcaaggggtaaagaagctcctaggacagtatatccccctgtgtgatgaagatggttactacaagccaacacaatgtcatggcagtgttggacagtgctggtgtgttgacagatatggaaatgaagtcatgggatccagaataaatggtgttgcagattgtgctatagattttgagatctccggagattttgctagtggcgattttcatgaatggactgatgatgaggatgatgaagacgatattatgaatgatgaagatgaaattgaagatgatgatgaagatgaaggggatgatgatgatggtggtgatgaccatgatgtatacatttga

SEQ ID NO: 81297 - protein, 393 aa, Artificial Sequence
  derived and/or modified sequence
MLKVSAVLCVCAAAWCSQSLAAAAAVAAAGGRSDGGNFLDDKQWLTTISQYDKEVGQWNKFRDDDYFRTWSPGKPFDQALDPAKDPCLKMKCSRHKVCIAQDSQTAVCISHRRLTHRMKEAGVDHRQWRGPILSTCKQCPVVYPSPVCGSDGHTYSFQCKLEYQACVLGKQISVKCEGHCPCPSDKPTSTSRNVKRGFDTSILPICKDSLGWMFNRLDTNYDLLLDQSELRSIYLDKNEQCTKAFFNSCDTYKDSLISNNEWCYCFQRQQDPPCQTELSNIQKRQGVKKLLGQYIPLCDEDGYYKPTQCHGSVGQCWCVDRYGNEVMGSRINGVADCAIDFEISGDFASGDFHEWTDDEDDEDDIMNDEDEIEDDDEDEGDDDDGGDDHDVYI

SEQ ID NO: 81298 - protein, 304 aa, Artificial Sequence
  derived and/or modified sequence
MKCSRHKVCIAQDSQTAVCISHRRLTHRMKEAGVDHRQWRGPILSTCKQCPVVYPSPVCGSDGHTYSFQCKLEYQACVLGKQISVKCEGHCPCPSDKPTSTSRNVKRGFDTSILPICKDSLGWMFNRLDTNYDLLLDQSELRSIYLDKNEQCTKAFFNSCDTYKDSLISNNEWCYCFQRQQDPPCQTELSNIQKRQGVKKLLGQYIPLCDEDGYYKPTQCHGSVGQCWCVDRYGNEVMGSRINGVADCAIDFEISGDFASGDFHEWTDDEDDEDDIMNDEDEIEDDDEDEGDDDDGGDDHDVYI

SEQ ID NO: 81299 - DNA, 1182 bp, Artificial Sequence
  derived and/or modified sequence
atgctgaaggtgagcgccgtgctgtgcgtgtgcgccgccgcctggtgcagccagagcctggccgccgccgccgccgtggccgccgccggcggcagaagcgacggcggcaacttcctggacgacaagcagtggctgaccaccatcagccagtacgacaaggaggtgggccagtggaacaagttcagagacgacgactacttcagaacctggagccccggcaagcccttcgaccaggccctggaccccgccaaggacccctgcctgaagatgaagtgcagcagacacaaggtgtgcatcgcccaggacagccagaccgccgtgtgcatcagccacagaagactgacccacagaatgaaggaggccggcgtggaccacagacagtggagaggccccatcctgagcacctgcaagcagtgccccgtggtgtaccccagccccgtgtgcggcagcgacggccacacctacagcttccagtgcaagctggagtaccaggcctgcgtgctgggcaagcagatcagcgtgaagtgcgagggccactgcccctgccccagcgacaagcccaccagcaccagcagaaacgtgaagagaggcttcgacaccagcatcctgcccatctgcaaggacagcctgggctggatgttcaacagactggacaccaactacgacctgctgctggaccagagcgagctgagaagcatctacctggacaagaacgagcagtgcaccaaggccttcttcaacagctgcgacacctacaaggacagcctgatcagcaacaacgagtggtgctactgcttccagagacagcaggaccccccctgccagaccgagctgagcaacatccagaagagacagggcgtgaagaagctgctgggccagtacatccccctgtgcgacgaggacggctactacaagcccacccagtgccacggcagcgtgggccagtgctggtgcgtggacagatacggcaacgaggtgatgggcagcagaatcaacggcgtggccgactgcgccatcgacttcgagatcagcggcgacttcgccagcggcgacttccacgagtggaccgacgacgaggacgacgaggacgacatcatgaacgacgaggacgagatcgaggacgacgacgaggacgagggcgacgacgacgacggcggcgacgaccacgacgtgtacatctag

SEQ ID NO: 81300 - DNA, 915 bp, Artificial Sequence
  derived and/or modified sequence
atgaagtgcagcagacacaaggtgtgcatcgcccaggacagccagaccgccgtgtgcatcagccacagaagactgacccacagaatgaaggaggccggcgtggaccacagacagtggagaggccccatcctgagcacctgcaagcagtgccccgtggtgtaccccagccccgtgtgcggcagcgacggccacacctacagcttccagtgcaagctggagtaccaggcctgcgtgctgggcaagcagatcagcgtgaagtgcgagggccactgcccctgccccagcgacaagcccaccagcaccagcagaaacgtgaagagaggcttcgacaccagcatcctgcccatctgcaaggacagcctgggctggatgttcaacagactggacaccaactacgacctgctgctggaccagagcgagctgagaagcatctacctggacaagaacgagcagtgcaccaaggccttcttcaacagctgcgacacctacaaggacagcctgatcagcaacaacgagtggtgctactgcttccagagacagcaggaccccccctgccagaccgagctgagcaacatccagaagagacagggcgtgaagaagctgctgggccagtacatccccctgtgcgacgaggacggctactacaagcccacccagtgccacggcagcgtgggccagtgctggtgcgtggacagatacggcaacgaggtgatgggcagcagaatcaacggcgtggccgactgcgccatcgacttcgagatcagcggcgacttcgccagcggcgacttccacgagtggaccgacgacgaggacgacgaggacgacatcatgaacgacgaggacgagatcgaggacgacgacgaggacgagggcgacgacgacgacggcggcgacgaccacgacgtgtacatctag

SEQ ID NO: 81301 - DNA, 1182 bp, Artificial Sequence
  derived and/or modified sequence
atgttgaaggttagcgccgtgctctgtgtttgtgctgctgcttggtgctcacaatccctggcggccgccgcagccgtcgccgcagcaggtgggcggagtgatggaggtaatttcctggatgacaagcagtggttgacaactataagtcaatacgacaaggaggtgggacagtggaataaattccgcgatgatgattacttcagaacttggtcacccgggaagccattcgatcaggccctagatccagcaaaagatccttgtctgaaaatgaaatgcagtaggcacaaagtgtgtattgctcaagactcacagacggccgtctgcatctcccataggcgactgacgcaccgcatgaaggaggctggcgtcgatcaccgtcagtggcgggggcctattttgagcacctgcaaacaatgtccagtcgtttatccctccccagtatgcggctccgatggacacacctattcctttcagtgtaagctggagtaccaggcctgcgtgcttgggaaacagatttccgtgaagtgcgaaggccattgtccttgtccgtccgataaaccgacttcaactagccgtaacgtgaaaaggggatttgatactagcattctccctatctgcaaagactctttggggtggatgttcaacaggctggatactaactacgacctcctgctcgaccaatcagaactccgctctatatacttggataagaacgaacagtgtacaaaggctttctttaatagctgcgatacttataaggattcattaatttccaacaacgagtggtgctattgcttccagcgacaacaggaccctccatgtcagaccgaattgagtaatatccagaagaggcagggcgttaagaaactgctggggcagtacatacctctgtgcgacgaagatggctactacaaaccaacacagtgtcacgggagcgttggacagtgttggtgcgttgaccggtatggaaatgaggtcatgggctctagaatcaatggagtggccgattgtgcaatagactttgagataagcggcgatttcgctagtggagatttccacgaatggaccgacgatgaggatgatgaagatgacattatgaatgatgaggacgagatcgaagacgatgacgaagatgagggcgacgatgacgatggtggagacgaccatgatgtgtacatttag

SEQ ID NO: 81302 - DNA, 915 bp, Artificial Sequence
  derived and/or modified sequence
atgaagtgctctcggcacaaagtttgtatcgctcaagactcacaaaccgcagtctgcattagtcacaggcggctcacacatcgcatgaaggaggcaggtgttgatcacagacagtggcgagggcccatcttgtcgacctgcaaacagtgccctgtcgtctaccccagccccgtgtgcggatctgacggccatacctactcctttcagtgcaagcttgaataccaggcatgcgtgttgggaaaacagatttctgttaagtgcgaggggcattgcccctgtccctcagacaagccgacaagtacatccagaaatgtcaagcgcggattcgacaccagtatcctcccgatctgcaaagattctctgggttggatgtttaaccgtctggatacaaattacgacctgctcttagatcagagtgagctgaggtctatttaccttgacaagaatgaacaatgcaccaaggcgttctttaacagctgtgacacgtacaaggacagtctgattagcaataatgagtggtgctactgctttcagcgccagcaagacccaccatgccagacagagctctccaacatacaaaagagacagggagtaaaaaaattattagggcagtatatccccctctgtgacgaagatgggtattacaagccgacccaatgccacggctctgtgggccaatgctggtgcgtggaccggtatggaaatgaggtaatgggctcccgaattaacggggtggctgactgcgcaatcgattttgagatctctggcgacttcgcctctggtgactttcatgaatggacagatgatgaggatgatgaagacgatataatgaatgatgaagacgaaattgaagatgatgacgaggatgagggagatgatgacgacggaggtgatgatcacgacgtgtacatctag

SEQ ID NO: 81303 - DNA, 1182 bp, Artificial Sequence
  derived and/or modified sequence
atgctgaaggtgtctgctgtgctgtgtgtgtgtgccgccgcctggtgcagccagagcctggccgctgctgctgctgtggccgctgctgggggccgcagtgatggcggcaacttcctggatgacaagcagtggctgaccaccatcagccagtatgacaaggaggtgggccagtggaacaagttcagagatgatgactacttccgcacctggagccctgggaagccctttgaccaggccctggaccctgccaaggacccctgcctgaagatgaagtgcagccgccacaaggtgtgcatcgcccaggacagccagacagctgtgtgcatcagccaccggcggctgacccacaggatgaaggaggccggcgtggaccaccggcagtggaggggccccatcctgagcacctgcaagcagtgccctgtggtgtaccccagccctgtgtgtggcagtgatggccacacctacagcttccagtgcaagctggagtaccaggcctgtgtgctgggcaagcagatctctgtgaagtgtgagggccactgcccctgccccagcgacaagcccaccagcaccagcagaaatgtgaagaggggctttgacaccagcatcctgcccatctgcaaggacagcctgggctggatgttcaaccggctggacaccaactatgacctgctgctggaccagagcgagctgcggagcatctacctggacaagaatgagcagtgcaccaaggccttcttcaacagctgtgacacctacaaggacagcctcatcagcaacaatgagtggtgctactgcttccagaggcagcaggaccccccctgccagacagagctgagcaacatccagaagaggcagggcgtgaagaagctgctgggccagtacatccccctgtgtgatgaagatggctactacaagcccacccagtgccacggctctgtgggccagtgctggtgtgtggacagatatggaaatgaggtgatgggcagccgcatcaacggggtggccgactgtgccatcgactttgagatcagcggggactttgccagcggggacttccacgagtggacagatgatgaagatgatgaagatgacatcatgaatgatgaagatgaaattgaagatgatgatgaagatgaaggagatgatgatgatggaggagatgaccatgatgtgtacatctag

SEQ ID NO: 81304 - DNA, 915 bp, Artificial Sequence
  derived and/or modified sequence
atgaagtgcagccgccacaaggtgtgcatcgcccaggacagccagacagctgtgtgcatcagccaccggcggctgacccacaggatgaaggaggccggcgtggaccaccggcagtggaggggccccatcctgagcacctgcaagcagtgccctgtggtgtaccccagccctgtgtgtggcagtgatggccacacctacagcttccagtgcaagctggagtaccaggcctgtgtgctgggcaagcagatctctgtgaagtgtgagggccactgcccctgccccagcgacaagcccaccagcaccagcagaaatgtgaagaggggctttgacaccagcatcctgcccatctgcaaggacagcctgggctggatgttcaaccggctggacaccaactatgacctgctgctggaccagagcgagctgcggagcatctacctggacaagaatgagcagtgcaccaaggccttcttcaacagctgtgacacctacaaggacagcctcatcagcaacaatgagtggtgctactgcttccagaggcagcaggaccccccctgccagacagagctgagcaacatccagaagaggcagggcgtgaagaagctgctgggccagtacatccccctgtgtgatgaagatggctactacaagcccacccagtgccacggctctgtgggccagtgctggtgtgtggacagatatggaaatgaggtgatgggcagccgcatcaatggagtggccgactgtgccatcgactttgagatcagcggggactttgccagcggggacttccacgagtggacagatgatgaagatgatgaagatgacatcatgaatgatgaagatgaaattgaagatgatgatgaagatgaaggagatgatgatgatggaggagatgaccatgatgtgtacatctag

SEQ ID NO: 81305 - DNA, 1182 bp, Artificial Sequence
  derived and/or modified sequence
atgctgaaggtgagcgccgtgctgtgcgtgtgcgccgccgcctggtgctcccaaagcctcgctgccgcagcggcggtagctgcagctgggggtcggtcggatggcgggaattttctcgacgacaagcagtggctgacaaccatcagccaatatgacaaagaagtgggacaatggaataagtttcgggacgatgattactttcgaacgtggagccctggtaagccttttgatcaggcactggatcccgcaaaagacccatgtctgaagatgaaatgcagtcgccacaaggtgtgtatagcgcaagacagccagacagcagtttgcattagccatcgtaggcttacccaccggatgaaggaggccggtgtggaccaccgccaatggaggggtcctattctctccacctgtaagcagtgtcctgtggtttacccgtcacccgtatgcggaagtgatggacacacctactccttccagtgtaagctggagtaccaggcctgcgtcctcggcaaacaaataagcgtgaagtgcgaggggcattgtccttgccctagcgataagcctacaagcacgagtcgcaacgtcaagcgggggttcgacaccagtatcctgcccatctgtaaggatagcctggggtggatgttcaaccgtctggacaccaattatgatctcctcttggatcagagcgaactccgatcgatttatctcgacaaaaacgaacagtgcacaaaagcgttcttcaattcttgtgatacctacaaagacagccttattagcaataatgagtggtgctattgcttccagagacagcaggaccctccgtgccagacagaactgagcaatattcagaagagacagggcgtgaagaaattgctcggccagtacatccctttatgtgatgaggacggatactataaaccgacacagtgtcacggcagtgtcggccagtgctggtgcgtcgacagatatggaaatgaagttatggggtctcggatcaacggtgtcgctgattgcgcgattgactttgagattagcggggattttgcgtctggagacttccacgagtggacggatgacgaagacgatgaagatgacattatgaatgatgaagatgagatcgaggacgacgatgaagatgaaggggatgacgacgacggaggggatgatcatgacgtttatatttag

SEQ ID NO: 81306 - DNA, 915 bp, Artificial Sequence
  derived and/or modified sequence
atgaagtgcagccggcacaaggtgtgcatcgcccaggacagccagacagcagtgtgcatcagtcacagacgcctgacgcaccggatgaaagaagcaggggttgaccaccggcagtggagaggaccaattctgagcacatgcaagcagtgccctgttgtgtaccctagccctgtctgtggctcagatgggcatacttactcgtttcagtgcaagctagaatatcaggcgtgtgtgctcgggaaacagatttcagtgaagtgtgagggtcattgtccctgcccctcggataagccaacttctacaagcagaaatgtgaagcgcggattcgataccagtatcctgccaatctgtaaggatagtctgggctggatgttcaaccgcctggacaccaactatgatctcctgctggatcagtcggagctgcgtagcatttatctagacaagaacgagcagtgcacaaaggcctttttcaacagctgcgacacctacaaagactctctgatctccaataacgagtggtgttactgctttcagcggcagcaggatcctccttgccagacagagttatcaaacatccaaaagagacagggagttaagaagctcctgggccaatacattcccctttgtgatgaggatggatattacaagccaacacaatgccacggctctgtgggccaatgctggtgtgtcgataggtacggtaacgaagtgatgggaagtagaatcaacggcgtggctgattgtgccatagactttgagataagtggcgatttcgcgagcggggacttccatgagtggacagacgatgaagacgacgaggatgatattatgaacgatgaagacgaaatagaagacgacgatgaggacgagggagatgacgacgatggcggggatgatcatgatgtctatatttag

SEQ ID NO: 81307 - DNA, 1182 bp, Artificial Sequence
  derived and/or modified sequence
atgctcaaggtctcagctgtgctttgtgtgtgtgcggctgcttggtgcagtcagtcattagcggcagccgcagcagttgcagctgctggtggcagatccgatggcggtaactttctggatgacaagcaatggctcaccactatatcccagtacgataaggaggtagggcaatggaacaaattcagagacgacgattacttcaggacctggagtcctgggaagccattcgatcaagcattagacccagccaaggatccttgcttaaaaatgaagtgctcacgccacaaggtgtgtatagcccaggatagtcagaccgctgtttgcatctcgcatcggagactgacccacagaatgaaggaggctggcgtagatcacagacagtggaggggtcctatcttatcaacttgcaaacagtgcccagtcgtctacccgtcaccagtttgtggctccgacggacatacgtatagcttccagtgtaagctcgagtatcaggcgtgcgtgctgggcaaacaaatttctgtcaaatgcgaaggacattgtccttgcccgagcgataaacccacctctacatctcgcaacgtcaagaggggtttcgatacatccatccttccaatttgcaaagattccttaggctggatgttcaatagactcgacactaactacgacctccttttggaccagtccgagctgaggtccatttatctcgacaagaacgaacagtgtacgaaagcgttcttcaactcctgcgatacctacaaggatagtttaatctccaataacgaatggtgttactgcttccagcggcagcaagaccctccctgccagacagaactcagcaacattcaaaagagacagggcgtgaagaagctactgggccagtacatacctctgtgtgacgaagatgggtattataaacctacccagtgccacggatccgtaggccagtgttggtgcgtagatcggtacggcaatgaggtgatgggaagcagaattaacggagttgctgattgtgccattgacttcgaaatctctggagactttgccagtggagattttcatgaatggacagatgatgaggacgatgaagacgacatcatgaacgatgaggacgaaattgaggatgatgatgaagacgagggcgacgacgacgatggaggcgatgaccacgacgtatatatatag

SEQ ID NO: 81308 - DNA, 915 bp, Artificial Sequence
  derived and/or modified sequence
atgaaatgtagccgtcacaaggtctgcatcgcccaggactcacagactgcagtctgcatatcacaccgccgattgactcacaggatgaaggaagcgggagtggaccataggcaatggcggggacctatattatccacctgcaagcagtgtcccgtagtgtacccttccccagtttgcggaagcgatggacacacttactcttttcaatgtaagctggagtatcaggcatgcgtgctcggcaagcagatttcagtgaaatgcgaaggacactgtccgtgcccaagcgataagcccaccagcaccagcagaaatgtcaagcggggatttgacacctctattctgccgatctgcaaggactctttgggctggatgtttaacaggttggatacaaattacgacctgctacttgaccagtctgagctgagaagcatttacctggacaagaatgagcagtgcaccaaggctttctttaattcatgtgacacatacaaggactccctaatcagcaacaatgagtggtgttactgtttccagagacagcaggatccaccatgccaaaccgaattgagcaacatccagaagcggcaaggcgtaaagaaactgctgggacaatatatacccctgtgcgatgaggacggctactataagcccacccagtgccacggttcggtcggtcaatgttggtgtgttgaccgttacgggaacgaagtcatgggttctaggatcaacggcgtcgctgactgtgccatcgatttcgagatctcaggcgactttgccagtggcgacttccatgaatggactgacgacgaggatgatgaggatgacattatgaatgacgaagacgagatcgaggatgacgacgaggatgagggagacgacgatgatggaggcgacgaccacgacgtgtacatctag

SEQ ID NO: 81309 - DNA, 1182 bp, Artificial Sequence
  derived and/or modified sequence
atgctgaaagtctctgccgtgttatgcgtgtgtgcagcagcttggtgctcacagagcctggccgcagcagctgcagtggcagcagcggggggcagaagcgatggagggaatttcctagacgacaaacagtggctgacgacgatctctcagtatgataaagaagtgggacagtggaacaagtttcgagatgatgactacttcagaacttggagtcctggtaagccgtttgaccaagcccttgacccagccaaagatccttgcctcaaaatgaagtgcagcaggcacaaagtttgcatcgcccaggatagccagaccgccgtatgcatctcccatcgcagacttactcaccgaatgaaagaggccggcgttgatcaccgacagtggcgcggacctattttgtcaacatgtaagcagtgtcctgtagtttacccaagtccagtttgcgggtctgatggacatacatacagctttcagtgcaaactcgaataccaagcgtgtgttctgggtaaacaaatatctgtgaaatgcgaggggcactgcccctgcccctctgataagcccacgagcacatccagaaacgtcaaaagaggatttgatacatctatactgccaatctgtaaggatagtttaggctggatgtttaacagattggacacaaactacgacctcttattagatcagagcgagctgagatcaatctacctggacaaaaacgaacagtgcacaaaagccttcttcaacagctgcgatacatataaagatagcctaatctccaataatgagtggtgctactgttttcagcgacaacaagaccctccatgccagacggagctgtcgaacatccaaaagcgtcagggcgtgaagaagctgctggggcagtacattccactgtgtgacgaagacgggtattataaaccaacgcaatgtcatggatcagtcgggcaatgctggtgcgtggacagatacggcaacgaagtcatgggctcacgcatcaatggtgtggcagactgtgccatcgactttgaaatatcaggagatttcgccagcggggatttccatgagtggactgatgacgaggacgacgaggacgatattatgaatgacgaagacgaaatcgaggacgatgatgaagatgaaggcgatgacgacgacggcggcgacgaccatgacgtctacatttag

SEQ ID NO: 81310 - DNA, 915 bp, Artificial Sequence
  derived and/or modified sequence
atgaagtgttccagacacaaggtgtgtatagctcaagattcacagactgcagtctgtatttcccaccggcgcttgacgcataggatgaaggaagctggcgtggatcacagacagtggcgaggtcctattctaagtacttgcaagcagtgcccggtcgtttacccatccccagtctgcgggagcgacggacacacttattctttccaatgtaaactggagtaccaggcttgtgttctcggaaagcaaatttctgttaaatgtgaaggacactgcccctgcccaagcgacaaacccacaagcacctcccggaacgtgaaaagaggcttcgacaccagcatcctccccatctgcaaggactccctgggatggatgtttaaccgtctcgatacgaattacgaccttctgttagaccagtccgaattgcgatccatctatctggacaagaacgagcagtgtacaaaggcgttcttcaactcgtgtgatacttacaaagatagcctgatcagcaataatgagtggtgctactgcttccagaggcagcaagacccaccatgccaaacagaactgtctaatatccaaaagcgccagggtgtcaagaagctcctgggccagtatatccccctctgtgacgaggacggatactataaaccaacacaatgtcatggctccgtcggccagtgctggtgtgtagacaggtacgggaatgaagtaatgggcagccgcataaatggagtggcagactgtgcgattgactttgagatctctggtgattttgcatctggtgacttccacgaatggaccgacgacgaggatgacgaagatgacattatgaatgacgaggatgaaatcgaggacgacgatgaagacgaaggagacgatgacgatggcggcgatgaccatgatgtctacatttag

SEQ ID NO: 81311 - DNA, 1182 bp, Artificial Sequence
  derived and/or modified sequence
atgctgaaagtctctgccgtgttatgcgtgtgtgcagcagcttggtgctcacagagcctggccgcagcagctgcagtggcagcagcggggggcagaagcgatggagggaatttcctagacgacaaacagtggctgacgacgatctctcagtatgataaagaagtgggacagtggaacaagtttcgagatgatgactacttcagaacttggagtcctggtaagccgtttgaccaagcccttgacccagccaaagatccttgcctcaaaatgaagtgcagcaggcacaaagtttgcatcgcccaggactcacaaactgccgtttgcatttcccatcgacgattgacacacagaatgaaagaggctggcgtcgatcacaggcaatggcgaggtcctattctgagcacatgcaaacagtgtcccgtggtgtatcctagccccgtttgtggcagcgatggacacacctattcttttcaatgtaagctggagtatcaggcgtgcgttttgggaaaacaaattagcgtcaagtgcgaaggccattgtccctgtccctcagacaagcccacatccaccagccggaacgtcaagaggggtttcgatacctctattctgcccatctgcaaagatagtcttggatggatgtttaataggctggacactaactatgaccttcttctggaccagagtgaactacgctcgatttaccttgataagaatgagcagtgcactaaagctttctttaactcctgcgacacttacaaagattctctgatttctaataacgagtggtgctattgtttccagcgccagcaagatccgccttgtcagacagagctttcaaatatacagaagcgccagggcgtcaaaaaattgttgggacaatacattccgctttgtgacgaggatggatactataaacctactcaatgtcatggttctgtgggccagtgttggtgcgtggaccggtatgggaatgaagttatgggttctaggattaatggggtggctgattgcgcaatcgactttgaaatttctggggactttgcgtcaggcgattttcatgaatggaccgatgatgaggatgatgaggacgacattatgaacgatgaagatgagatcgaggatgacgatgaagatgagggagacgacgatgatgggggcgatgatcacgacgtgtacatatag

SEQ ID NO: 81312 - DNA, 915 bp, Artificial Sequence
  derived and/or modified sequence
atgaagtgtagccgccataaagtatgcattgcccaggactcccagacagccgtgtgcatttcccacaggcgattaactcaccgtatgaaggaagccggagtcgaccatcgtcaatggagggggccaattctgtcgacttgcaagcagtgtccagttgtctaccccagcccagtgtgcggaagcgatggccatacctactctttccaatgtaagttagaatatcaggcatgtgtattgggaaaacagatcagcgtcaaatgtgagggccactgtccttgtccatccgataaacccacttccacatcaagaaatgtgaagagaggcttcgatacaagtattctgccgatctgcaaggattctcttggttggatgtttaaccggcttgataccaactacgacctgctactcgaccaatccgaacttagatcaatttacctcgataaaaacgagcaatgcaccaaagccttttttaactcctgcgatacttacaaagatagcctgatcagcaataatgaatggtgttactgtttccagagacagcaagatcccccgtgccagactgaattatcaaatatacagaagaggcagggagttaagaagctcttagggcaatacatcccattgtgtgacgaggacggctattataaacctacgcaatgtcacggtagcgttgggcaatgttggtgcgtggaccgctacggtaatgaggtgatgggaagcaggatcaacggggtagctgactgcgctattgattttgagatttcaggagactttgcatcaggagatttccatgagtggactgatgatgaagatgatgaggatgatataatgaacgatgaagacgaaattgaggatgacgatgaagacgaaggcgacgatgatgatgggggggacgaccatgacgtctatatttag

SEQ ID NO: 81313 - DNA, 1963 bp, Artificial Sequence
  derived and/or modified sequence
gcatttccagcaggagctgcgagcacagtgctggctcacaacaagatgctcaaggtgtcagccgtactgtgtgtgtgtgcagccgcttggtgcagtcagtctctcgcagctgccgcggcggtggctgcagccggggggcggtcggacggcggtaattttctggatgataaacaatggctcaccacaatctctcagtatgacaaggaagtcggacagtggaacaaattccgagacgatgattatttccgcacttggagtccaggaaaacccttcgatcaggctttagatccagctaaggatccatgcttaaagatgaaatgtagtcgccataaagtatgcattgctcaagattctcagactgcagtctgcattagtcaccggaggcttacacacaggatgaaagaagcaggagtagaccataggcagtggaggggtcccatattatccacctgcaagcagtgcccagtggtctatcccagccctgtttgtggttcagatggtcatacctactcttttcagtgcaaactagaatatcaggcatgtgtcttaggaaaacagatctcagtcaaatgtgaaggacattgcccatgtccttcagataagcccaccagtacaagcagaaatgttaagagaggattcgataccagcatcttgccaatttgcaaggactcacttggctggatgtttaacagacttgatacaaactatgacctgctattggaccagtcagagctcagaagcatttaccttgataagaatgaacagtgtaccaaggcattcttcaattcttgtgacacatacaaggacagtttaatatctaataatgagtggtgctactgcttccagagacagcaagacccaccttgccagactgagctcagcaatattcagaagcggcaaggggtaaagaagctcctaggacagtatatccccctgtgtgatgaagatggttactacaagccaacacaatgtcatggcagtgttggacagtgctggtgtgttgacagatatggaaatgaagtcatgggatccagaataaatggtgttgcagattgtgctatagattttgagatctccggagattttgctagtggcgattttcatgaatggactgatgatgaggatgatgaagacgatattatgaatgatgaagatgaaattgaagatgatgatgaagatgaaggggatgatgatgatggtggtgatgaccatgatgtatacatttgattgatgacagttgaaatcaataaattctacatttctaatatttacaaaaatgatagcctatttaaaattatcttcttccccaataacaaaatgattctaaacctcacatatattttgtataattatttgaaaaattgcagctaaagttatagaactttatgtttaaataagaatcatttgctttgagtttttatattccttacacaaaaagaaaatacatatgcagtctagtcagacaaaataaagttttgaagtgctactataataagtttttcacgagaacaaactttgtaaatcttccataagcaaaatgacagctagtgcttgggatcgtacatgttaattttctgaaagataattctaagtgaaatttaaaataaataaatttttaatgacctgggtcttaaggatttaggaaaaatatgcatgctttaattgcatttccaaagtagcatcttgctagacctagttgagtcaggataacagagagataccacatggcaagaaaaacaaagtgacaattgtagagtcctcaattgtgtttacattaatagtggtgtttttacctatgaaattattctggatctaataggacattttacaaaatggcaagtatggaaaaccatggattctgaaagttaaaaatttagttgttctccccaatgtgtattttaatttggatggcagtctcatgcagattttttaaaagattctttaataacatgatttgtttgcc

SEQ ID NO: 81314 - DNA, 1398 bp, Artificial Sequence
  derived and/or modified sequence
ttttctggatgataaacaatggctcaccacaatctctcagtatgacaaggaagtcggacagtggaacaaattccgagacgatgattatttccgcacttggagtccaggaaaacccttcgatcaggctttagatccagctaaggatccatgcttaaagatgaaatgtagtcgccataaagtatgcattgctcaagattctcagactgcagtctgcattagtcaccggaggcttacacacaggatgaaagaagcaggagtagaccataggcagtggaggggtcccatattatccacctgcaagcagtgcccagtggtctatcccagccctgtttgtggttcagatggtcatacctactcttttcagtgcaaactagaatatcaggcatgtgtcttaggaaaacagatctcagtcaaatgtgaaggacattgcccatgtccttcagataagcccaccagtacaagcagaaatgttaagagaggattcgataccagcatcttgccaatttgcaaggactcacttggctggatgtttaacagacttgatacaaactatgacctgctattggaccagtcagagctcagaagcatttaccttgataagaatgaacagtgtaccaaggcattcttcaattcttgtgacacatacaaggacagtttaatatctaataatgagtggtgctactgcttccagagacagcaagacccaccttgccagactgagctcagcaatattcagaagcggcaaggggtaaagaagctcctaggacagtatatccccctgtgtgatgaagatggttactacaagccaacacaatgtcatggcagtgttggacagtgctggtgtgttgacagatatggaaatgaagtcatgggatccagaataaatggtgttgcagattgtgctatagattttgagatctccggagattttgctagtggcgattttcatgaatggactgatgatgaggatgatgaagacgatattatgaatgatgaagatgaaattgaagatgatgatgaagatgaaggggatgatgatgatggtggtgatgaccatgatgtatacatttgattgatgacagttgaaatcaataaattctacatttctaatatttacaaaaatgatagcctatttaaaattatcttcttccccaataacaaaatgattctaaacctcacatatattttgtataattatttgaaaaattgcagctaaagttatagaactttatgtttaaataagaatcatttgctttgagtttttatattccttacacaaaaagaaaatacatatgcagtctagtcagacaaaataaagttttgaagtgctactataataagtttttcacgagaacaaactttgtaaatcttccataagcaaaatgacagctagtgctt

SEQ ID NO: 81315 - protein, 161 aa, Artificial Sequence
  derived and/or modified sequence
MLKVSAVLCVCAAAWCSQSLAAAAAVAAAGGRSDGGNFLDDKQWLTTISQYDKEVGQWNKFRDDDYFRTWSPGKPFDQALDPAKDPCLKMKCSRHKVCIAQDSQTAVCISHRRLTHRMKEAGVDHRQWRGPILSTCKQCPVVYPSPVCGSDGHTYSFQCKL

SEQ ID NO: 81316 - protein, 313 aa, Artificial Sequence
  derived and/or modified sequence
MLKVSAVLCVCAAAWCSQSLAAAAAVAAAGGRSDGGNFLDDKQWLTTISQYDKEVGQWNKFRDDDYFRTWSPGKPFDQALDPAKDPCLKMKCSRHKVCIAQDSQTAVCISHRRLTHRMKEAGVDHRQWRGPILSTCKQCPVVYPSPVCGSDGHTYSFQCKLEYQACVLGKQISVKCEGHCPCPSDKPTSTSRNVKRACSDLEFREVANRLRDWFKALHESGSQNKKTKTLLRPERSRFDTSILPICKDSLGWMFNRLDTNYDLLLDQSELRSIYLDKNEQCTKAFFNSCDTYKDSLISNNEWCYCFQRQQGKR

SEQ ID NO: 81317 - DNA, 486 bp, Artificial Sequence
  derived and/or modified sequence
atgctgaaggtgagcgccgtgctgtgcgtgtgcgccgccgcctggtgcagccagagcctggccgccgccgccgccgtggccgccgccggcggcagaagcgacggcggcaacttcctggacgacaagcagtggctgaccaccatcagccagtacgacaaggaggtgggccagtggaacaagttcagagacgacgactacttcagaacctggagccccggcaagcccttcgaccaggccctggaccccgccaaggacccctgcctgaagatgaagtgcagcagacacaaggtgtgcatcgcccaggacagccagaccgccgtgtgcatcagccacagaagactgacccacagaatgaaggaggccggcgtggaccacagacagtggagaggccccatcctgagcacctgcaagcagtgccccgtggtgtaccccagccccgtgtgcggcagcgacggccacacctacagcttccagtgcaagctgtag

SEQ ID NO: 81318 - DNA, 942 bp, Artificial Sequence
  derived and/or modified sequence
atgctgaaggtgagcgccgtgctgtgcgtgtgcgccgccgcctggtgcagccagagcctggccgccgccgccgccgtggccgccgccggcggcagaagcgacggcggcaacttcctggacgacaagcagtggctgaccaccatcagccagtacgacaaggaggtgggccagtggaacaagttcagagacgacgactacttcagaacctggagccccggcaagcccttcgaccaggccctggaccccgccaaggacccctgcctgaagatgaagtgcagcagacacaaggtgtgcatcgcccaggacagccagaccgccgtgtgcatcagccacagaagactgacccacagaatgaaggaggccggcgtggaccacagacagtggagaggccccatcctgagcacctgcaagcagtgccccgtggtgtaccccagccccgtgtgcggcagcgacggccacacctacagcttccagtgcaagctggagtaccaggcctgcgtgctgggcaagcagatcagcgtgaagtgcgagggccactgcccctgccccagcgacaagcccaccagcaccagcagaaacgtgaagagagcctgcagcgacctggagttcagagaggtggccaacagactgagagactggttcaaggccctgcacgagagcggcagccagaacaagaagaccaagaccctgctgagacccgagagaagcagattcgacaccagcatcctgcccatctgcaaggacagcctgggctggatgttcaacagactggacaccaactacgacctgctgctggaccagagcgagctgagaagcatctacctggacaagaacgagcagtgcaccaaggccttcttcaacagctgcgacacctacaaggacagcctgatcagcaacaacgagtggtgctactgcttccagagacagcagggcaagagatag

SEQ ID NO: 81319 - DNA, 486 bp, Artificial Sequence
  derived and/or modified sequence
atgcttaaggtgagcgccgtcctgtgcgtgtgtgcggcggcttggtgtagtcagtcccttgccgctgccgctgcagtagccgctgcaggcggacgatcagacggcggcaatttccttgatgataagcagtggttgacgacgatcagccagtatgataaggaggtaggacagtggaacaagtttcgtgacgacgactacttccgcacctggtctccaggaaagccattcgaccaagctctggaccccgcaaaagacccctgtctgaagatgaaatgctccaggcataaagtttgcatcgcgcaagatagccagactgccgtgtgcatctctcatcgtaggctgacgcatcgcatgaaagaagccggagtggatcaccggcagtggagaggacctattttaagcacctgtaaacagtgtcctgtggtgtatcctagccctgtctgcggttctgacggacatacttacagctttcaatgtaagttgtag

SEQ ID NO: 81320 - DNA, 942 bp, Artificial Sequence
  derived and/or modified sequence
atgctgaaggtatctgccgtgctgtgcgtgtgtgccgccgcttggtgctcccagagcctggctgcagctgccgcagttgcggcggctggaggccgctccgatgggggaaatttccttgatgataaacagtggctaacaactatatcccagtacgacaaggaagttggccagtggaacaagtttagggacgatgattattttcggacctggtctcccggaaagcccttcgaccaggcgttagatcctgccaaagatccgtgcctgaagatgaaatgcagtcgccacaaggtttgcatcgcacaggacagccaaactgcagtttgtattagccacagacgactcacccatcgtatgaaagaagccggggtcgaccacagacagtggcgcggaccaattctgtccacatgcaaacagtgtcccgtcgtctatccgtctcccgtgtgtgggtctgacggccacacctatagcttccagtgtaagctcgaatatcaagcatgcgtcctcggcaaacagatttctgtgaaatgcgaggggcactgtccctgtcctagcgacaagcccacatcgacgagtaggaatgtaaaacgcgcgtgctctgaccttgaattccgggaagttgcgaatcgtctccgcgactggttcaaggccctgcacgagtccggctctcagaacaagaagaccaagactcttctgcgccctgagcgaagccgtttcgatacctctattctacccatatgtaaagactctctggggtggatgttcaacagattggatacaaattacgatctgctgctcgaccaaagcgagctgcgtagcatctatctggacaaaaacgagcaatgtactaaagcatttttcaactcgtgcgacacgtacaaagacagtctcatctctaataacgagtggtgctactgcttccagcggcagcagggaaaaaggtag

SEQ ID NO: 81321 - DNA, 486 bp, Artificial Sequence
  derived and/or modified sequence
atgctgaaggtgtctgctgtgctgtgtgtgtgtgccgccgcctggtgcagccagagcctggccgctgctgctgctgtggccgctgctgggggccgcagtgatggcggcaacttcctggatgacaagcagtggctgaccaccatcagccagtatgacaaggaggtgggccagtggaacaagttcagagatgatgactacttccgcacctggagccctgggaagccctttgaccaggccctggaccctgccaaggacccctgcctgaagatgaagtgcagccgccacaaggtgtgcatcgcccaggacagccagacagctgtgtgcatcagccaccggcggctgacccacaggatgaaggaggccggcgtggaccaccggcagtggaggggccccatcctgagcacctgcaagcagtgccctgtggtgtaccccagccctgtgtgtggcagtgatggccacacctacagcttccagtgcaagctgtag

SEQ ID NO: 81322 - DNA, 942 bp, Artificial Sequence
  derived and/or modified sequence
atgctgaaggtgtctgctgtgctgtgtgtgtgtgccgccgcctggtgcagccagagcctggccgctgctgctgctgtggccgctgctgggggccgcagtgatggcggcaacttcctggatgacaagcagtggctgaccaccatcagccagtatgacaaggaggtgggccagtggaacaagttcagagatgatgactacttccgcacctggagccctgggaagccctttgaccaggccctggaccctgccaaggacccctgcctgaagatgaagtgcagccgccacaaggtgtgcatcgcccaggacagccagacagctgtgtgcatcagccaccggcggctgacccacaggatgaaggaggccggcgtggaccaccggcagtggaggggccccatcctgagcacctgcaagcagtgccctgtggtgtaccccagccctgtgtgtggcagtgatggccacacctacagcttccagtgcaagctggagtaccaggcctgtgtgctgggcaagcagatctctgtgaagtgtgagggccactgcccctgccccagcgacaagcccaccagcaccagcagaaatgtgaagagggcctgcagcgacctggagttccgggaggtggccaaccggctgcgggactggttcaaggccctgcacgagagcggcagccagaacaagaagaccaagaccctgctgcggcctgagaggagcagatttgacaccagcatcctgcccatctgcaaggacagcctgggctggatgttcaaccggctggacaccaactatgacctgctgctggaccagagcgagctgcggagcatctacctggacaagaatgagcagtgcaccaaggccttcttcaacagctgtgacacctacaaggacagcctcatcagcaacaatgagtggtgctactgcttccagaggcagcagggcaagaggtag

SEQ ID NO: 81323 - DNA, 486 bp, Artificial Sequence
  derived and/or modified sequence
atgctgaaggtgagcgccgtgctgtgcgtgtgcgccgccgcctggtgctctcagagtcttgctgctgccgccgctgtagcggctgctggcgggcgtagcgatggaggaaatttccttgacgacaagcaatggcttacaacgatctcacagtacgacaaggaggtggggcagtggaataaatttagagacgacgactactttcggacctggtccccaggaaaaccattcgatcaggccctcgatccagcaaaggatccatgcttaaaaatgaagtgtagccgacacaaagtgtgtatcgctcaggacagccagactgctgtgtgcatctcccataggagattgacacaccgtatgaaggaggccggagtagaccatcgccagtggcgaggtcccattctgtctacgtgcaaacagtgccctgtggtgtatccttctcccgtgtgcggctcggacggccatacttacagcttccagtgtaagctatag

SEQ ID NO: 81324 - DNA, 942 bp, Artificial Sequence
  derived and/or modified sequence
atgctgaaggtgagcgccgtgctgtgcgtgtgcgccgccgcctggtgctcccaatcgctggctgccgctgcagccgtggcagctgcaggcggtcgctccgacggggggaatttcctggatgataaacagtggttgacgactatctctcagtatgacaaggaagtggggcagtggaataagtttcgcgacgacgattactttagaacttggtctcctgggaaaccttttgaccaggctttggacccagcaaaggatccctgccttaagatgaaatgtagtaggcataaagtgtgcatagcccaagatagccagaccgctgtgtgcataagtcatagacgactgactcatcgcatgaaggaagcaggcgtggaccacagacaatggcgcggccctatcctgagtacctgcaaacagtgtcccgtagtctatccgtcccccgtgtgcggttccgatgggcatacttatagcttccagtgcaagctggaataccaggcttgcgtccttggaaagcagattagcgtgaagtgtgagggacattgcccctgcccgtcggacaagccgacaagtacttctaggaatgtgaaaagagcttgttcagacttagagtttcgtgaggttgcaaatagactaagggactggtttaaagctttgcacgaaagtggtagccagaacaaaaagacaaagaccctgctacggcccgagaggagtaggtttgatacgtccatcctgccgatctgtaaagatagcctggggtggatgttcaataggctggacacaaactatgaccttctcctggaccagtctgagttacggagcatctacctggacaagaacgaacaatgtaccaaagccttttttaactcatgcgacacctacaaggactccctgatttcaaacaatgaatggtgctactgcttccaacgccagcagggtaaacgatag

SEQ ID NO: 81325 - DNA, 486 bp, Artificial Sequence
  derived and/or modified sequence
atgctcaaagtgagcgcagtgctctgtgtctgcgccgctgcttggtgctcccagtccctcgccgctgccgcagcggtcgcagccgcaggaggcagaagcgacggcggtaacttccttgatgacaagcaatggttgaccacaattagccagtacgacaaggaagtggggcagtggaataagttcagagatgacgattattttagaacatggagcccaggaaaaccttttgaccaggcactggaccctgcaaaggacccttgtttgaagatgaagtgctccaggcataaggtgtgtattgcccaagattcgcagactgcagtgtgcattagccacagacggttgacccaccgaatgaaagaggcgggtgtggatcacagacagtggaggggaccgatcttatctacctgtaagcagtgtcctgtcgtctaccctagtccagtgtgtgggagcgacggtcacacatattcttttcaatgtaagctttag

SEQ ID NO: 81326 - DNA, 942 bp, Artificial Sequence
  derived and/or modified sequence
atgctgaaagtgagcgccgtcctctgtgtctgcgcagccgcttggtgctctcagtcactggccgctgctgctgctgtggccgctgctggtggcaggtcagacggagggaacttcctcgacgataagcagtggctcactaccatctcacagtacgacaaggaagtcggtcagtggaacaaattcagagacgacgattacttcaggacttggagccctggtaagccattcgaccaggctctggatcccgctaaggacccgtgtctgaaaatgaagtgctctcgccataaggtgtgcattgctcaggacagtcagacggccgtctgcatctctcacaggcggctgactcatcgaatgaaagaggcaggggtcgaccaccggcaatggcggggaccaatactgtccacctgtaaacagtgtccggtcgtctacccatctccggtatgcggaagtgacggccacacatactctttccaatgtaagcttgaatatcaggcctgtgtcttaggcaagcagatttccgtgaagtgtgagggtcactgcccatgcccatccgataagcctacatcgacatcccggaacgtcaagagggcatgttctgacctcgagtttagagaagtggccaacagacttagagactggtttaaagccctgcatgaaagtgggtcacagaataagaaaacgaaaacactgttacgacctgagaggtcacgttttgatacaagcatcctgccaatttgcaaagacagccttggttggatgttcaacagactcgacaccaattacgacctgcttctcgaccagtccgagcttcgatccatatacctcgacaaaaatgaacagtgtaccaaggcattctttaattcgtgtgatacttacaaggattcactcatctctaacaacgaatggtgctattgctttcagaggcagcagggcaagagatag

SEQ ID NO: 81327 - DNA, 486 bp, Artificial Sequence
  derived and/or modified sequence
atgctcaaggtttccgccgtcctctgtgtgtgcgcagccgcttggtgctcccaatcactggccgccgcagctgctgtcgcagccgccgggggcagatcggatgggggaaacttcctcgacgataagcagtggctcacaaccatcagccagtacgacaaggaggtgggacagtggaataagttcagagacgacgattactttcgaacgtggtcccctgggaaaccctttgatcaggcactagaccccgccaaagacccatgcctcaagatgaaatgttcacgccacaaggtttgtattgcccaagactcccaaacagctgtgtgtatcagtcaccgcagactcacccatcggatgaaggaagctggggtggaccatagacagtggagagggcctatcctgtcaacctgcaaacagtgtccagtcgtgtaccccagccccgtttgtggatcagatggccatacctactcctttcagtgtaagttgtag

SEQ ID NO: 81328 - DNA, 942 bp, Artificial Sequence
  derived and/or modified sequence
atgctcaaggtctcagctgtactgtgtgtgtgtgctgcagcctggtgctcacagtctcttgccgccgccgctgccgttgcagctgctggagggagatctgacggaggcaattttctggacgacaaacaatggttgaccacaatttcccagtatgataaagaggtggggcagtggaataagttccgggacgacgactactttaggacttggtcacctggaaagccttttgatcaggcactggatcccgctaaggatccatgtctcaaaatgaaatgttctcgacataaagtctgtatagcacaggactctcagacagccgtatgcatctcgcaccgaagattaacccatcgcatgaaggaagctggagtggaccatagacagtggcggggaccaattttaagcacatgcaagcagtgccctgttgtttacccctctccagtctgtggctcagacggccacacctattccttccaatgcaaactggaataccaagcctgtgtcttagggaagcaaattagtgtaaaatgtgagggtcattgcccatgcccctcagataagcctacttctacatcaaggaacgtgaaaagagcatgcagtgatctcgagtttcgcgaggtggcgaatcgtttgcgcgactggtttaaggctcttcatgagagcggaagccagaataagaaaaccaaaactctgctgcgcccagagcgatcccgcttcgacactagcatccttcctatttgcaaagattcactcggttggatgtttaatcggttagatactaactatgacctgctgttagatcagtctgagctgcgtagtatctatctggacaagaacgagcaatgcaccaaagccttcttcaacagctgcgacacgtacaaggactctctgataagcaacaatgaatggtgctactgctttcagcgtcaacagggtaagagatag

SEQ ID NO: 81329 - DNA, 486 bp, Artificial Sequence
  derived and/or modified sequence
atgctcaaggtgagcgcagtcctgtgcgtctgtgctgcagcttggtgctcccaaagtctggctgctgctgctgctgtggctgcagcaggcggtagaagcgacggtggaaattttttggatgacaagcagtggcttacaactatttctcaatatgacaaggaggtcggtcaatggaataagttcagagacgatgactactttagaacatggagcccaggtaaacccttcgatcaagccttagacccagccaaagatccctgtctcaagatgaagtgcagcagacataaagtgtgcatcgctcaggactcccaaaccgctgtgtgcatctcccatagaagacttacccaccgcatgaaggaggcaggagtggatcaccggcagtggcgaggaccaatcctttctacatgcaaacagtgccccgtcgtatatcccagtcccgtttgtggatcagatggtcatacgtactcttttcaatgcaagctctag

SEQ ID NO: 81330 - DNA, 942 bp, Artificial Sequence
  derived and/or modified sequence
atgctgaaagtatccgccgtcttgtgtgtttgtgctgctgcctggtgtagccagagcctcgccgccgccgctgctgtagccgctgcaggaggccgaagcgatggaggcaactttctcgacgacaaacagtggcttacaacaatatctcaatatgataaggaggttggacaatggaacaagtttcgagatgatgattactttagaacatggtctccaggcaagccattcgatcaggcattagaccctgctaaagacccctgtttgaagatgaaatgcagtagacataaggtgtgcattgcccaggattctcagacggcagtctgcatttcacaccgacgcctcacacatagaatgaaagaagcgggtgttgatcaccgccagtggaggggcccaattctatctacatgtaagcagtgtccagttgtgtacccatccccggtttgcggatccgacggtcatacatacagcttccaatgtaagctcgaataccaagcatgcgttctgggcaaacagatttctgtcaagtgcgaagggcattgcccttgtccatctgataaacctactagcaccagccgtaatgttaaacgagcttgttctgacttggaatttcgagaggtcgccaacagactcagagattggtttaaggcattacacgagagcggctctcagaataagaagaccaagaccctattacgcccagaaaggtcacgattcgacacttcaattttaccaatctgtaaggattctctcggatggatgtttaacaggttggatacaaattacgacctattacttgaccagtcggaacttcgaagtatctatttggacaaaaacgaacagtgtaccaaggctttctttaattcatgcgatacgtataaggattcactgatttctaacaacgaatggtgctactgctttcagcgtcaacagggtaagagatag

SEQ ID NO: 81331 - DNA, 556 bp, Artificial Sequence
  derived and/or modified sequence
gtgcccgctcgggctgctgcggctggggcttgcttccttatacccacctctcctcctctgggtctgcgtgtgtatgctcaaggtgtcagccgtactgtgtgtgtgtgcagccgcttggtgcagtcagtctctcgcagctgccgcggcggtggctgcagccggggggcggtcggacggcggtaattttctggatgataaacaatggctcaccacaatctctcagtatgacaaggaagtcggacagtggaacaaattccgagacgatgattatttccgcacttggagtccaggaaaacccttcgatcaggctttagatccagctaaggatccatgcttaaagatgaaatgtagtcgccataaagtatgcattgctcaagattctcagactgcagtctgcattagtcaccggaggcttacacacaggatgaaagaagcaggagtagaccataggcagtggaggggtcccatattatccacctgcaagcagtgcccagtggtctatcccagccctgtttgtggttcagatggtcatacctactcttttcagtgcaaacta

SEQ ID NO: 81332 - DNA, 1456 bp, Artificial Sequence
  derived and/or modified sequence
ctcgagacggcggcgcgtgcagcagctccagaaagcagcgagttggcagagcagggctgcatttccagcaggagctgcgagcacagtgctggctcacaacaagatgctcaaggtgtcagccgtactgtgtgtgtgtgcagccgcttggtgcagtcagtctctcgcagctgccgcggcggtggctgcagccggggggcggtcggacggcggtaattttctggatgataaacaatggctcaccacaatctctcagtatgacaaggaagtcggacagtggaacaaattccgagacgatgattatttccgcacttggagtccaggaaaacccttcgatcaggctttagatccagctaaggatccatgcttaaagatgaaatgtagtcgccataaagtatgcattgctcaagattctcagactgcagtctgcattagtcaccggaggcttacacacaggatgaaagaagcaggagtagaccataggcagtggaggggtcccatattatccacctgcaagcagtgcccagtggtctatcccagccctgtttgtggttcagatggtcatacctactcttttcagtgcaaactagaatatcaggcatgtgtcttaggaaaacagatctcagtcaaatgtgaaggacattgcccatgtccttcagataagcccaccagtacaagcagaaatgttaagagagcatgcagtgacctggagttcagggaagtggcaaacagattgcgggactggttcaaggcccttcatgaaagtggaagtcaaaacaagaagacaaaaacattgctgaggcctgagagaagcagattcgataccagcatcttgccaatttgcaaggactcacttggctggatgtttaacagacttgatacaaactatgacctgctattggaccagtcagagctcagaagcatttaccttgataagaatgaacagtgtaccaaggcattcttcaattcttgtgacacatacaaggacagtttaatatctaataatgagtggtgctactgcttccagagacagcaaggtaaaagatgagacccttacagacgcaaatagttgacctgcatgtcaaattttacttattttttaagaaaataaaacagtacactatgctcattcattttgtgtatgtttttgtaattcaagtgttgaataaaagagcaaataagaagcatgttgaacaaataactctgccagagatacaacacatgctaaataagatgaaaaatagtaattaatattttgtattaatgccactacattatagtttccattatgagccaccaagaagcacacagaaatattaagaacttagatactgaaagtaatcattaaaattaatttgctatctgctttgcccacaatgtaaaataaatggattttttatcactatacggtggagttttaatgttctattttgtgatcttattaaatgagttgaatgaa

SEQ ID NO: 81333 - protein, 147 aa, Artificial Sequence
  derived and/or modified sequence
MAGNSILLAAVSILSACQQSYFALQVGKARLKYKVTPPAVTGSPEFERVFRAQQNCVEFYPIFIITLWMAGWYFNQVFATCLGLVYIYGRHLYFWGYSEAAKKRITGFRLSLGILALLTLLGALGIANSFLDEYLDLNIAKKLRRQF

SEQ ID NO: 81334 - DNA, 444 bp, Artificial Sequence
  derived and/or modified sequence
atggcagggaactctattctgctagctgcagtctcgatcctaagtgcctgccagcagagctattttgcactccaggttgggaaagccaggctcaaatacaaagtcacaccgccagccgttactggtagccctgagttcgagagggtgttcagggctcaacagaattgcgtggagttttaccctatattcatcattaccctgtggatggctggatggtattttaaccaggtcttcgcaacatgccttgggcttgtatacatttatggtcggcacttgtatttttgggggtacagcgaagcagcaaaaaagcgaatcacaggatttagattgagtctgggaattcttgctttactgaccctactgggcgcactgggcatagccaactcctttttggacgagtacctagatctcaatattgccaaaaaactcagacggcagttctag

SEQ ID NO: 81335 - DNA, 444 bp, Artificial Sequence
  derived and/or modified sequence
atggctgggaatagtatcctcctggcagcggtatctattctgtcagcctgtcagcaatcttactttgcccttcaggtcgggaaggctaggcttaagtataaagtgactcctccagctgtcaccggtagccctgagtttgagcgagttttcagggctcagcagaactgtgtcgaattctaccctatctttattattaccctgtggatggccggatggtacttcaatcaggttttcgcgacctgcctcggcttggtatatatttacggacgacacctgtatttttggggatatagcgaggctgcaaagaagcggatcactggatttaggctgtcactgggaatcttagccctgctgaccctgctcggagccctaggcattgccaattcatttcttgatgagtacctggatcttaatatcgcaaaaaagctgcgccggcaattctag

SEQ ID NO: 81336 - DNA, 444 bp, Artificial Sequence
  derived and/or modified sequence
atggccggcaacagcatcctgctggccgctgtgtccatcctgagcgcctgccagcagagctactttgccctgcaggtgggcaaggcccggctgaagtacaaggtgaccccacctgctgtgacaggcagccctgagtttgagagggtcttccgggcccagcagaactgtgtggagttctaccccatcttcatcatcaccctgtggatggccggctggtacttcaaccaggtgtttgccacctgcctgggcctggtgtacatctacggccgccacctgtacttctggggctacagcgaggccgccaagaagaggatcaccggcttccggctgagcctgggcatcctggccctgctgaccctgctgggcgccctgggcatcgccaacagcttcctggatgagtacctggacctgaacatcgccaagaagctgcggcggcagttctag

SEQ ID NO: 81337 - DNA, 801 bp, Artificial Sequence
  derived and/or modified sequence
gctggccgtgggagaggcttaaaacaaacgccggaagcaactcccagccccataaagatctgtgaccggcagccccagacctgcctgccttcctgacttctgttccagagcaaaggtcattcagccgcttgaatcagccttttccccccacccggtccccaactttgtttacccgataaggaaggtcagcattcaaagtcaagaagcgccatttatcttcccgtgcgctctacaaatagttccgtgagaaagatggccgggaactcgatcctgctggctgctgtctctattctctcggcctgtcagcaaagttattttgctttgcaagttggaaaggcaagattaaaatacaaagttacgcccccagcagtcactgggtcaccagagtttgagagagtatttcgggcacaacaaaactgtgtggagttttatcctatattcataattacattgtggatggctgggtggtatttcaaccaagtttttgctacttgtctgggtctggtgtacatatatggccgtcacctatacttctggggatattcagaagctgctaaaaaacggatcaccggtttccgactgagtctggggattttggccttgttgaccctcctaggtgccctgggaattgcaaacagctttctggatgaatatctggacctcaatattgccaagaaactgaggcggcaattctaactttttctcttccctttaatacttgcagaagctgttcccaccatgaaggtaatatggtatcatttgttaaataaaaataaagtctttattctgtttttcttgaaa

SEQ ID NO: 81338 - DNA, 1780 bp, Artificial Sequence
  derived and/or modified sequence
aaagatggccgggaactcgatcctgctggctgctgtctctattctctcggcctgtcagcaaagttattttgctttgcaagttggaaaggcaagattaaaatacaaagttacgcccccagcagtcactgggtcaccagagtttgagagagtatttcgggcacaacaaaactgtgtggagttttatcctatattcataattacattgtggatggctgggtggtatttcaaccaagtttttgctacttgtctgggtctggtgtacatatatggccgtcacctatacttctggggatattcagaagctgctaaaaaacggatcaccggtttccgactgagtctggggattttggccttgttgaccctcctaggtgccctgggaattgcaaacagctttctggatgaatatctggacctcaatattgccaagaaactgaggcggcaattctaactttttctcttccctttaatacttgcagaagctgttcccaccatgaagttattggtttcttgaactctttggggcacaatttcaagaggaagaagtaaaaaaaggataccatttcaaggaattgcccagggacaagtgcgaagagaatattctttctcttggctgaggaaggttctcttgtgatcctgggaaatgctagaccgtgagcatcttgatggaggatgtgaactgccacttcctcacaggcagcaggcaggtgctgaataagtgcttgctgaatgaatgaatgaatcacgccaaggggcatgttacctgttccgccaaaatctgctgctgctgctgctgctgctgctgcctttgctcccgcaggaactgttgcttctgctgctctatcaactgggcccgctgatcaatgagcatctgcttcatgatggctgcttggggctggctgcccaggaagccggggcctgcgggactggctcctgagaccatgccacctgagcctgggggcacggaggactgcatggggcctgtggttcggggaagtccaactggatgctgctcctgggaagacaagagagagggagatgcagggattccccatagagactcactgctgtttgaagggaagcccctggaaaaagggaacggggcagaagtcccagcttatggactggagggtttttgagtggcacgcattgcatttccataaacgtagcttcaaacccgaccttacctgagtagaatgagagaggccacaagggacagtaagagagcatggctctgggaagtccaaggccaagtccagtctgtttcggatgggactgactattgcatatagactggattttcaactaacatcctgtgttcctccaaggaaagggaataagccctcaggctgagctcacctaaagtctggaacacgagacacatcctgacctcacctgttaatccttatttcttactgtctacttggccaaaatggacgtcttctttgcaagtaggagggacatttgcagaaaactgcaggaatttgttaatcaacagatctgatatttgatggaattctaacgagttgcaacatttgagagcttagatatatgtcagaaagaaaaatcctcctggccagagttgttgatggtgagaactgggaatgttttacaccgatcaaagctatgtaatctcctaatatttttaaaaatagaattgagtcggccgggcgcggtgtctcacgcctgtaatcccagtactttgggaggcccagtactttgggtggatcacgaggtcagttcgagaccagcttggccaagatggtgaaaccctgtctctact

SEQ ID NO: 81339 - DNA, 444 bp, Artificial Sequence
  derived and/or modified sequence
atggccggcaacagcatcctgctggccgccgtgagcatcctgagcgcttgtcagcagagttactttgccctacaggtgggcaaggcacgcctgaaatacaaggtgacaccgcctgcggtaactggtagccctgaattcgagagggtcttccgcgcacagcaaaattgtgtggagttttaccctatcttcatcataacgctgtggatggccggttggtacttcaatcaggtatttgcaacctgcctggggctagtgtatatttacggtagacatctgtacttctggggttattctgaagcagcgaaaaaaagaatcacggggtttcggctatccttgggaatccttgctttgctgactctactaggcgccctggggattgcgaactcattcctcgacgagtacctcgacctcaatatcgccaagaagttgagaaggcagttttag

SEQ ID NO: 81340 - DNA, 444 bp, Artificial Sequence
  derived and/or modified sequence
atggccggcaacagcatcctgctggccgccgtgagcatcctgagcgcgtgtcagcagtcctatttcgcccttcaggtcggaaaagccagattaaaatacaaggtgactccccccgccgtgaccggcagcccagaatttgagagagtgttccgcgcccagcagaactgtgtcgagttctaccccatcttcataatcacgctctggatggccggatggtacttcaatcaggtgttcgccacttgcctgggactggtttacatctacgggcggcatttatacttctgggggtacagtgaggcagccaagaagagaatcactgggttccgactgagcctggggatcctggcactgctcacactgctcggcgccctgggtattgccaattctttcttggacgagtatctcgatctaaatatcgcaaagaagctgcgacgacaattctag

SEQ ID NO: 81341 - DNA, 444 bp, Artificial Sequence
  derived and/or modified sequence
atggcagggaacagcatcttactggctgctgtgtctattctgtcagcctgccagcaaagctactttgcactgcaggtggggaaagctcggctgaagtataaagtgacacccccagcagtgaccggttccccagagttcgaaagagtcttccgggctcagcagaactgcgtggagttctatcctatttttatcatcacgctgtggatggctggctggtatttcaaccaggtgtttgccacttgtctgggattggtttacatctatggaaggcatctctatttctgggggtactctgaggcggctaagaagcgaatcacagggtttaggctgtcattaggaatcctggcccttctcaccctgctgggggctctgggcattgcaaattccttcctggatgagtatttagacctgaatatagcaaagaaactccggaggcagttctag

SEQ ID NO: 81342 - DNA, 444 bp, Artificial Sequence
  derived and/or modified sequence
atggcagggaattctatcttgttagcagcagtcagtattttatcggcatgccaacagtcttactttgctctgcaggtggggaaggcgcgtctcaaatacaaggtgaccccgcctgctgtcaccgggtcccccgaattcgagcgggtgttccgtgcacagcagaactgcgtagaattctaccccatttttattattaccctttggatggctggttggtactttaatcaggtcttcgccacctgtctgggactggtgtatatctacggcagacacctttatttttgggggtactcagaggcagcaaaaaaaaggataaccggatttagactttccctgggtatcctggcgttgctgacactgctgggagccttggggattgccaattcatttctggacgagtacctggacttgaacatagctaaaaaattgagacgccagttttag

SEQ ID NO: 81343 - DNA, 444 bp, Artificial Sequence
  derived and/or modified sequence
atggccggcaacagcatcctgctggccgccgtgagcatcctgagcgcctgccagcagagctacttcgccctgcaggtgggcaaggccagactgaagtacaaggtgaccccccccgccgtgaccggcagccccgagttcgagagagtgttcagagcccagcagaactgcgtggagttctaccccatcttcatcatcaccctgtggatggccggctggtacttcaaccaggtgttcgccacctgcctgggcctggtgtacatctacggcagacacctgtacttctggggctacagcgaggccgccaagaagagaatcaccggcttcagactgagcctgggcatcctggccctgctgaccctgctgggcgccctgggcatcgccaacagcttcctggacgagtacctggacctgaacatcgccaagaagctgagaagacagttctag

SEQ ID NO: 81344 - protein, 77 aa, Artificial Sequence
  derived and/or modified sequence
MAGNSILLAAVSILSACQQSYFALQVGKARLKYKVTPPAVTGSPEFERVFRAHFCYLSGSGVHIWPSPILLGIFRSC

SEQ ID NO: 81345 - DNA, 234 bp, Artificial Sequence
  derived and/or modified sequence
atggcaggaaattcgatccttttggccgccgtgagcatactaagcgcgtgccaacagtcctactttgccctccaggtcgggaaagctcggttaaagtacaaggtgacccctcctgccgtgaccggaagtccagaattcgaaagggtatttcgagcacacttctgttacctcagtggcagtggcgtccacatctggcccagtcctattctgctaggaattttcaggtcttgctag

SEQ ID NO: 81346 - DNA, 234 bp, Artificial Sequence
  derived and/or modified sequence
atggccggcaacagcatcctgctggccgctgtgtccatcctgagcgcctgccagcagagctactttgccctgcaggtgggcaaggcccggctgaagtacaaggtgaccccacctgctgtgacaggcagccctgagtttgagagggtcttccgggcccacttctgctacctgagcggcagcggcgtgcacatctggcccagccccatcctgctgggcatcttccgcagctgctag

SEQ ID NO: 81347 - DNA, 634 bp, Artificial Sequence
  derived and/or modified sequence
ggcagccccagacctgcctgccttcctgacttctgttccagagcaaaggtcattcagccgcttgaatcagccttttccccccacccggtccccaactttgtttacccgataaggaaggtcagcattcaaagtcaagaagcgccatttatcttcccgtgcgctctacaaatagttccgtgagaaagatggccgggaactcgatcctgctggctgctgtctctattctctcggcctgtcagcaaagttattttgctttgcaagttggaaaggcaagattaaaatacaaagttacgcccccagcagtcactgggtcaccagagtttgagagagtatttcgggcacatttttgctacttgtctgggtctggtgtacatatatggccgtcacctatacttctggggatattcagaagctgctaaaaaacggatcaccggtttccgactgagtctggggattttggccttgttgaccctcctaggtgccctgggaattgcaaacagctttctggatgaatatctggacctcaatattgccaagaaactgaggcggcaattctaactttttctcttccctttaatacttgcagaagctgttcccaccatgaaggtaatatggtatcatttgttaaataaaa

SEQ ID NO: 81348 - DNA, 234 bp, Artificial Sequence
  derived and/or modified sequence
atggccggcaacagcatcctgctggccgccgtgagcatcctgagcgcctgccagcagtcttattttgctctacaagttggcaaagcacgcttgaaatacaaagtcacccctcccgccgttacagggagtcccgaattcgagagagttttccgggcccatttttgttacctgtccggaagcggcgtccatatttggcctagtcccattcttctgggaatatttagatcttgctag

SEQ ID NO: 81349 - DNA, 234 bp, Artificial Sequence
  derived and/or modified sequence
atggcgggaaattccatcctgctcgccgcagtgtcaatcttgagcgcctgtcagcagagttacttcgcgttgcaggtaggcaaagctaggctgaagtataaggtgaccccgcctgcagtaactggcagtccagaatttgagcgggtgtttcgcgctcacttttgctatctttcaggttcaggggtgcatatctggccttcccccatcctgctgggaattttcaggtcttgctag

SEQ ID NO: 81350 - DNA, 234 bp, Artificial Sequence
  derived and/or modified sequence
atggccggcaacagcatcctgctggccgccgtgagcatcctgagcgcctgccagcagagctacttcgccctgcaggtgggcaaggccagactgaagtacaaggtgaccccccccgccgtgaccggcagccccgagttcgagagagtgttcagagcccacttctgctacctgagcggcagcggcgtgcacatctggcccagccccatcctgctgggcatcttcagaagctgctag

SEQ ID NO: 81351 - protein, 541 aa, Artificial Sequence
  derived and/or modified sequence
MPSLLVLTFSPCVLLGWALLAGGTGGGGVGGGGGGAGIGGGRQEREALPPQKIEVLVLLPQDDSYLFSLTRVRPAIEYALRSVEGNGTGRRLLPPGTRFQVAYEDSDCGNRALFSLVDRVAAARGAKPDLILGPVCEYAAAPVARLASHWDLPMLSAGALAAGFQHKDSEYSHLTRVAPAYAKMGEMMLALFRHHHWSRAALVYSDDKLERNCYFTLEGVHEVFQEEGLHTSIYSFDETKDLDLEDIVRNIQASERVVIMCASSDTIRSIMLVAHRHGMTSGDYAFFNIELFNSSSYGDGSWKRGDKHDFEAKQAYSSLQTVTLLRTVKPEFEKFSMEVKSSVEKQGLNMEDYVNMFVEGFHDAILLYVLALHEVLRAGYSKKDGGKIIQQTWNRTFEGIAGQVSIDANGDRYGDFSVIAMTDVEAGTQEVIGDYFGKEGRFEMRPNVKYPWGPLKLRIDENRIVEHTNSSPCKSSGGLEESAVTGIVVGALLGAGLLMAFYFFRKKYRITIERRTQQEESNLGKHRELREDSIRSHFSVA

SEQ ID NO: 81352 - DNA, 1626 bp, Artificial Sequence
  derived and/or modified sequence
atgccttccctgctagttctgaccttctccccctgcgttctactgggctgggctctgctcgcaggtggaaccggcggtgggggcgtagggggagggggagggggagccggaattggaggggggcggcaggaacgcgaagctttgccaccgcaaaaaatcgaggtccttgtcctcctgccacaggatgactcatacctcttttccctgaccagggtaagacccgccatcgagtatgctttaagatctgtcgagggtaacggaaccggtagaaggctgcttccccctggaacgaggttccaggtggcctatgaagactccgattgtggcaatcgcgccctgttctctctggtggatcgagtggcagccgccagaggcgctaagccagacctaatacttggacctgtatgtgagtatgccgcggccccggtggcccggctcgcctctcattgggacctgcccatgttaagtgccggggccctcgctgccggcttccagcacaaggattcagaatatagtcacctgacgagggtcgctcctgcctacgcaaaaatgggtgagatgatgctggccctttttaggcaccaccactggtccagggccgctttagtgtactcagatgacaaactcgagaggaattgctacttcaccctcgaaggggttcacgaggttttccaagaggagggtctccatacttcgatttacagcttcgatgagaccaaagaccttgacttggaggatattgtgcgaaacattcaagcatcagaaagagtggtcataatgtgcgccagttcagatactattcgctccatcatgttagtagcacaccgacatggcatgacttcaggcgactacgccttctttaatatcgaactgttcaactcatcaagctatggtgacggctcttggaaacgaggggacaagcacgattttgaagccaagcaagcttattcttccttacaaactgttacccttctccggaccgtgaagcccgagttcgagaagttctctatggaggttaaatcttcagtggaaaaacagggactcaatatggaggactatgttaacatgtttgtcgaagggttccatgacgctattctgctctacgtcctggccctgcacgaagtcctaagggcagggtacagcaaaaaggacgggggaaagatcatacagcagacatggaataggactttcgagggcattgcgggccaggtcagtattgatgcaaatggggatcgttatggagatttttctgttattgctatgacagatgtggaagctggcacccaggaggtgattggcgactacttcggtaaagaaggaagatttgaaatgcgccctaatgtcaaatatccttggggccctcttaaactccgcatcgatgagaataggatcgtcgaacatacaaattcgtccccatgcaagtcatctggcggcctcgaagaatccgctgtgactggaattgtcgtcggtgcactactgggcgcgggcctgttgatggcgttctatttctttagaaagaaatatcgaataaccatcgagcggcggacccagcaggaggagtcaaatctcggaaagcaccgagaacttagagaggacagcattaggagccacttttccgttgcctag

SEQ ID NO: 81353 - DNA, 1626 bp, Artificial Sequence
  derived and/or modified sequence
atgcccagcctgctggtgctgaccttcagcccctgtgtgctgctgggctgggccctgctggccggcggcaccggcggcggcggcgtgggcggcggcggcggcggggccggcatcggcggcggccggcaggagcgggaggccctgcccccccagaagattgaggtgctggtgctgctgccccaggatgacagctacctgttcagcctgaccagggtgcggcctgccatcgagtatgccctgcggtctgtggagggcaatggcaccggccggcggctgctgcccccaggcacccgcttccaggtggcctatgaggacagcgactgtggcaacagagccctcttcagcctggtggacagagtggccgccgcccggggggccaagccagacctgatcctgggccctgtgtgtgaatatgctgctgcccctgtggcccggctggccagccactgggacctgcccatgctgtctgctggggccctggccgccggcttccagcacaaggacagcgagtacagccacctgaccagggtggccccagcctatgccaagatgggagagatgatgctggccctcttccgccaccaccactggagccgggccgccctggtgtacagtgatgacaagctggagaggaactgctacttcaccctggagggcgtgcatgaggtgttccaggaggagggcctgcacaccagcatctacagctttgatgagaccaaggacctggacctggaggacatcgtgaggaacatccaggccagcgagcgggtggtgatcatgtgtgccagcagtgacaccatccgcagcatcatgctggtggcccacagacatggcatgaccagcggggactatgccttcttcaacatcgagctgttcaacagcagcagctatggagatggctcctggaagagaggagacaagcatgactttgaggccaagcaggcctacagcagcctgcagacagtgaccctgctgaggacagtgaagccagagtttgagaagttctccatggaggtgaagagctctgtggagaagcagggcctgaacatggaggactatgtgaacatgtttgtggagggcttccatgatgccatcctgctgtatgtgctggccctgcacgaggtgctgcgggccggctacagcaagaaggatggcggcaagatcatccagcagacctggaacagaacatttgagggcattgctggccaggtgtccattgatgccaatggagacagatatggagacttctctgtgattgccatgacagatgtggaggccggcacccaggaggtgattggagactactttgggaaggagggccgctttgagatgaggcccaacgtgaagtacccctggggccccctgaagctgagaattgatgaaaatcgcatcgtggagcacaccaacagcagcccctgcaagagcagcggcggcctggaggagagcgctgtgactggaattgtggtgggcgccctgctgggcgccggcctgctgatggccttctacttcttcaggaagaagtaccgcatcaccatcgagaggaggacccagcaggaggagagcaacctgggcaagcaccgggagctgagagaagattccatccgcagccacttctctgtggcctag

SEQ ID NO: 81354 - DNA, 7337 bp, Artificial Sequence
  derived and/or modified sequence
acgcccaaataagaagccacctctaagcaaaatagtatatgtataaacggagggcgaatatatacaagtatatatatatgtatattacagacgcacaggtttacacccggtgaactttttctttttctttttcttttttttttaagaaaaactagtgacattgcagagaaggacgcttcctctctatcttttggcgcattagtgaagggggtattctattttgttaaagcgcccaagggggcgcagggaccttggagagaagagtggggaggaaagaggaagggtgggtggggggcagagggcgagtcggcggcggcgagggcaagctctttcttgcggcacgatgccgtctctgctggtgctcactttctccccgtgcgtactactcggctgggcgttgctggccggcggcaccggtggcggtggcgttggcggcggcggcggtggcgcgggcataggcggcggacgccaggagagagaggcgctgccgccacagaagatcgaggtgctggtgttactgccccaggatgactcgtacttgttttcactcacccgggtgcggccggccatcgagtatgctctgcgcagcgtggagggcaacgggactgggaggcggcttctgccgccgggcactcgcttccaggtggcttacgaggattcagactgtgggaaccgtgcgctcttcagcttggtggaccgcgtggcggcggcgcggggcgccaagccagaccttatcctggggccagtgtgcgagtatgcagcagcgccagtggcccggcttgcatcgcactgggacctgcccatgctgtcggctggggcgctggccgctggcttccagcacaaggactctgagtactcgcacctcacgcgcgtggcgcccgcctacgccaagatgggcgagatgatgctcgccctgttccgccaccaccactggagccgcgctgcactggtctacagcgacgacaagctggagcggaactgctacttcaccctcgagggggtccacgaggtcttccaggaggagggtttgcacacgtccatctacagtttcgacgagaccaaagacttggatctggaagacatcgtgcgcaatatccaggccagtgagagagtggtgatcatgtgtgcgagcagtgacaccatccggagcatcatgctggtggcgcacaggcatggcatgaccagtggagactacgccttcttcaacattgagctcttcaacagctcttcctatggagatggctcatggaagagaggagacaaacacgactttgaagctaagcaagcatactcgtccctccagacagtcactctactgaggacagtgaaacctgagtttgagaagttttccatggaggtgaaaagttcagttgagaaacaagggctcaatatggaggattacgttaacatgtttgttgaaggattccacgatgccatcctcctctacgtcttggctctacatgaagtactcagagctggttacagcaaaaaggatggagggaaaattatacagcagacttggaacagaacatttgaaggtatcgccgggcaggtgtccatagatgccaacggagaccgatatggggatttctctgtgattgccatgactgatgtggaggcgggcacccaggaggttattggtgattattttggaaaagaaggtcgttttgaaatgcggccgaatgtcaaatatccttggggccctttaaaactgagaatagatgaaaaccgaattgtagagcatacaaacagctctccctgcaaatcatcaggtggcctagaagaatcggcagtgacaggaattgtcgtgggggctttactaggagctggcttgctaatggccttctactttttcaggaagaaatacagaataaccattgagaggcgaacccagcaagaagaaagtaaccttggaaaacatcgggaattacgggaagattccatcagatcccatttttcagtagcttaaaggaagccccccactttttttttttctgcctgagattctttaaggagatagacgggttgaaagacatcaatgaaacagaaggggcgttcttgaagaattcataattttaagcagttagtaatttcattttaaaatttctgtagaagctcaggaattatgattaatcaccatctgcctccaggcctttcatctcatgacaaacaaatataataatgatatcgtgtcactctgttaaatgttcatactgtttcaagcccatatgattagatttatgtttttaaaatctgttgtctccatatcttgatggcttttgggagcatttcacacaaggatataaaatgcggttttcttaaatgaaatgttttgtagctagaataaaatcatttttacaagtacagcattcttggaaagaatttaacacccaaaaaggggaaaatgtaatgaaaaatctcaaggttggaaatacagccttactctctctagagctggaggacaggtttgtggttgaggacttctctgtccgatgtctacattcaggttctgacttcatatcttgaaaaaggatttcctccctgtctttttcagtgtctcataaacgctactctggattgttgtaaatattagtgagatgggaggatttacagaagaaaagcaagtcaaaaatatttcctttttgatgtaaaaaaaaaaagccctatttcgcactaacattttattttacaagtattttaatcttatattttggtattagaaaaatttgtctattttttcattttgaagattaaatgttgcttacattttaaaagcatgggtgaagtgtacaacaaaccaataatgataaaaaatacttctctttttctccctgtttccctttttcccttggccacagccaaatgctaattgctgctttaattacagagatgtgtaaatgtattcagattacaaactctacaggaatacatcaacattttaactcttttgcgtttttactgtttaactgttttaaatgcaagttattttagggtgacactccttccagttctggccagatcatgagtttcaagatcaagagtaaaaagttattagaattaaacagttttataaagggaggcagcccttttccctcaagaacaactttgttgagagttactacttgacagcaagcacagaaatgacaaatttaaaacttttacacatggcatttaccaaaattcccagtgattattttgtttaaaagagggaacctaaatatctactctattccctttcagttaactccacagaactttgtaggcatccatgaatacctgtaatagtgggttaggtgtggagataaggaatttggacaaagttgagtaagtttttactgggtatctgctttgcacccagtagtctgcaacatgagtttaaactcaggttactactttcacttatactttatggagaagatagacagtgagggaggaatgggaagctgtcatgagagtgcaccgtcttggaattacataactggggtctttcctcaataacattttgagcatctgaaaaatagtttaaaaaattgtcttaatatctattaaaaggcatgtctagtgaggaaacaggagagtctgagcaatcccttggtggcgatgaaggtggtagttcacacaagtaacagtggaggcaaaggtaagcgcaagctgcctgtcccagatgctggcccatgtgtgagtgcttccctggagaagtccgcttctgttgctcccacctgagtcacagttaacagattatttctgtgtgaggcacatttcccttctgttgtttaagaaatgggagctgggaggcagctgagagggcgtgataaaagaattaagtgtgatcaactgaaacaactatgttgtagttctccatgctggatgcaaaggaaaaagtgtcgaattccaaaaaggatggaagaagaaggcaagaagggcaaactccagaagttctagtgcaggaagagagtttgagaagtaaaatccaggcaagcaaagcgttgtaccacttgggactccccaaagtgaaacagcaaggaaggattgtgtccatcttacttacttgaattggagagcttgtttctctctcatttttatttttcaatgatgttttctttatattttagagatattcattttctcttatcttgtgcttgtaaaaagcatttacatttcaagtctatgtgcttattacaggggaaaaataatctacctggttgcagtctttgagtataaacatttctaacctttttaaaacttctatagcagcccattaacactaacatttttagagcaaatatattctattttaacttcaggtagaggaatagtcctaaacttaatatgatagctctagataagatcttagagataagtgagcatttagtattctaaaagtggcagaacaaatcatgaggtttctggatgctataccaatttaaaatcaattcttatgttaatattgattgcttatttacatgtcagtcatctactttttttctttgaaatctgcatatgggttacaaaaactctgttaggttttgaaaattccattaagttggaaaccttggttaaaaatgtaggtgcctggcccatggttaccctggattcaggtctctcatgattatatttggggatttacgttcctaactgctaagcaacatctttgacaactagtaattcatactctactagtagtcacatgtcatatagtaaaataaatagggctttagttcttaagtaattctataggattttaccctgaaatccagggtgttcagatttcaaaaaggataatttatcagtattttctcatccagtcaaacttcagctgacattgatacaggtcaaaatgcgtagatgctttttggtgttggaaataagtgtctgtcttatggtcatcattgtcttcttagatttttgggtaggggggccaggtagggggagactcagaaataaaagcgttccccagataacttcaatctggaaagaattttttgtatagagtccatctctccctcaagactgaccacaggtttcatgagaaggtccctgaaaacatcacatttctctgaagaaccatcaacttgtcttttcttgaaccacaggaatggttctacagaccctactataattcttcacatttcagaacccatgtttaatggagggaagagagaaatgcatgggaaaagaacacctccttttctcctttctcttaaattcaaagacgtttgctttggaatgccctcacttctccctattcacaggcttctaaaatcattaatttactcaaggcacatgtgccttctttgccccaaatgcatcactttccttttagttatggctgattttgggtgtgtgtgtgtaagacatgcagtcaacaatgagatgaaggccattgcatagatctcatgcagatagtgatggattcagaaagtaggttccagtggcgtcactaccttcttgtaagccagtatacactggctatttgtggaaatctctttgggagatcaaatagagtattatgccactgtgagtgtttataaactggaaggaacaagtacctgtgtttcttgggacacaaagcactcagatcctgagtggatgcagacatgagagtaaatgtcagcccaaattaggcccctcgacctacagacatttcatgggttttatttaatcacaccccatggtttggggctacatgaggaagttggtaatgagctgaatttcttattcagtggaaaaaactgaaactgtctaaaaacacgggatatattttagaggcaattgtggaagcggagagaatgagatgatggtgttcagagggaccagcttctttttcagttgtctttagaactcaagaataatcaataatttagtgccccttcaacagccatactcagcaagaagaatcagaagcttgatcctctaacagaaatagaagagggtagctttgcccattgccactgtctttactgccccttctgcccctccacccacatccacattcagcatcactccaaggatgtgtcagcatcttgcccatgcaggtagaaatttgtgagtaggcctccatacttcctcgggggaagaaagagaaactagtgctggttttaagaatgtagctggcttttcatcagaacccttatgctaacctgaccacacttgctctcggggaagttcaagcctgtgatgtgcataaactccaacaagcctggctttggtgttcagcatgcacattccataaatatctcttgcaggcataccccacagctagactgcaggattaaaataacttccaaaaggtgctggattggagtttgttcaaatttctcattaaccactaatgttaattcataccaaatgcaaagtattctaaaccagctgatgctgtcagtgttcaagttttaagtgacttcaaacacaatggaagtgtttcaatgggagccagatctcatgagtaaaaatccattttataatagctctgtgatatatcagtgggagatgattcataggggagagatttgaacaagcagaattaagtgttagcaaaaatgctgcattgctttgattcatgtttaaagacctaaatttctatgcacaaggaataaagggcctacttaccaagtgtaaatcacaacataggctaccaaaatatttcttatttgctaggagaacaaagctgtcacggtgcatgatagttggacagagatggctaaaaaagaggcaaattcagatttggaaacagggtggcctcttcattatttattgccaagatctgaaaatcttcaacatcttataagacaacaatgaagtagcccctgaacagcatggagttgctgtgagtttgttcgttgcagacctttgtgttgggtcctgggaatctgagctttgttccctgtgcatggtggataattgaaaccaagaggacatgggatagaccttgtgacagaccaattctgtgacccctgtcttctgggtcacattattcattgttgatttaaatacaggactaccaaacagtacaaatctatcatgagtctggtagaaaagtaaaagtaaaagctgcacacgttacatactgtttattgttctaatgtacaactaactatttgcatataatgtgatttaatttattgctgttttgtgtagaaaaggagaactaatgactgtggatataacccatgttttgtataatatattttatttcttgtgcgaactggtcatttaaaatatctacttcatttgatgtttggatataaatgtgtatgtgtccttgtaaatgtttctatcaagcaagaatgccacgtactcagagtataacaatgtgttctcattaaaaaatacatccc

SEQ ID NO: 81355 - DNA, 1626 bp, Artificial Sequence
  derived and/or modified sequence
atgcccagcctgctggtgctgaccttcagcccctgcgtgctgctgggttgggccctgctggccggtgggactggcggaggaggcgtgggcgggggcggcggcggcgctggcattggaggcggaagacaagaacgcgaggcactgcccccccaaaaaatagaggtcctcgttttgctgccacaggacgattcttacctattcagccttacaagggtgcgccctgccattgagtacgcactgaggtccgtagaaggtaatggaactgggcgtagactgcttccacctggtaccagattccaggtggcatatgaagattctgactgtggaaaccgcgccctattctcactggtagacagagtcgccgcggctagaggcgctaaacccgatctgattctaggccccgtctgtgaatacgccgcagcccccgtggcacgactggcaagccattgggacttgcctatgctttcagccggtgccctcgccgccgggttccagcacaaagattctgagtactctcatttgacaagggtggctccagcatatgcaaagatgggcgaaatgatgttggccctttttagacatcatcactggagcagggccgcgttagtttacagcgacgacaagctagagaggaactgttatttcacgcttgagggcgtccacgaggtgttccaggaggaagggctacacactagcatttatagctttgatgagacgaaagatctcgacttggaagacatcgtcagaaacatccaggcaagcgagagggtcgtgataatgtgcgcaagcagcgatactatccgttccatcatgctcgtcgcccatcggcacggtatgactagcggcgattatgctttcttcaacatagagctgttcaactcgtctagctatggtgacggcagttggaagcgcggcgataaacacgactttgaagccaagcaggcatatagttccctgcagacggtgaccctcttaaggaccgtgaagccagagttcgagaagttttccatggaagtaaagtcctccgtggagaaacaagggctgaatatggaggactacgttaacatgtttgtggagggttttcacgatgccatactactctacgttctggccctgcatgaagtgctcagagctggttacagcaaaaaggacggcggtaagatcatccagcagacatggaatcggacatttgaggggatcgccggacaagtgagtatcgacgctaatggcgatcgctacggcgacttcagtgtgatagccatgacagacgttgaggctgggacccaggaggtcatcggggactatttcggaaaggagggcagatttgagatgaggcccaacgtgaagtacccgtggggaccactgaaattacggatcgatgaaaatcgtattgttgaacacacaaatagcagcccttgcaagagcagcgggggtctggaggagtccgcagtaacagggatagtagtaggggcactgctcggagccgggctactgatggccttttatttttttcgcaaaaagtatagaatcactatcgaacggcgtacgcagcaggaagagtcaaatctgggaaagcaccgcgaattgcgggaagacagcatccggtcccatttctctgtcgcatag

SEQ ID NO: 81356 - DNA, 1626 bp, Artificial Sequence
  derived and/or modified sequence
atgccttcccttttagtattgacctttagtccttgcgtcctgctcgggtgggccttactcgcagggggtacaggagggggaggagtgggcggtggaggcggtggggctgggattggtggaggcaggcaagagcgagaagcactcccaccgcaaaaaatcgaagttttggtgctcctgccccaggacgactcatacctgttcagtttaacccgtgtaagacccgcaattgaatatgctctgcgaagcgtggagggcaacgggacaggcagaagacttctcccgccaggcaccagatttcaggttgcatacgaggacagtgactgcggcaatagagcgctgtttagcctcgttgaccgagtggccgcagcacgaggcgctaaacccgacctgattttaggccctgtgtgtgagtatgccgctgcacccgtggcaaggctggctagtcactgggatctgcctatgttgtctgccggagctctcgccgcaggcttccagcacaaggactcagagtacagccacctgacccgagtggctcccgcatatgcgaagatgggtgagatgatgctggcacttttcagacatcaccattggtcaagggctgccctggtatatagcgacgataaactcgagagaaattgttactttaccctggagggggtgcacgaggttttccaggaagaaggcctccatacgtctatatactcgtttgatgagacaaaggacttggatttggaagatattgttcgaaacatccaagccagcgaaagagtcgtgatcatgtgcgcctcttctgacacaataagatccattatgctggtcgcacacaggcacgggatgacgtccggtgattatgccttctttaacatagaactgtttaatagttctagttatggcgacggctcatggaagcgcggtgataagcacgatttcgaggccaagcaagcatacagttcactgcaaacggtaacactgctgaggacagtcaaaccggaattcgaaaagttcagtatggaggtgaagtcctccgtggaaaaacaggggctgaacatggaggactacgtgaatatgttcgtagaggggtttcacgacgctattctgctctatgttctggcactgcacgaagtattgcgcgctggttattcaaaaaaggacggcggaaagattatccaacagacttggaaccgcacgttcgagggtatcgccggtcaggtgtctattgatgctaatggcgacagatacggcgattttagcgttattgccatgacagatgtcgaggcgggtactcaggaagtaattggcgattacttcggtaaagaggggagatttgaaatgcggcctaatgtcaaatatccttggggaccgctgaagttgaggatagacgaaaacagaatcgtagagcatacaaacagctccccgtgtaaaagctctggagggttggaagaatccgccgtgaccggaatagtggtgggagctctcctgggagccggactgttgatggcattttacttttttagaaaaaaatatcgaatcacaattgaaaggagaactcagcaggaagaaagtaacttgggcaaacaccgcgagttacgagaagacagcatacgctcacacttctctgtcgcttag

SEQ ID NO: 81357 - DNA, 1626 bp, Artificial Sequence
  derived and/or modified sequence
atgcccagcctgctggtgctgaccttcagcccctgcgtgctgctgggctgggccctgctggccggcggcaccggcggcggcggcgtgggcggcggcggcggcggcgccggcatcggcggcggcagacaggagagagaggccctgcccccccagaagatcgaggtgctggtgctgctgccccaggacgacagctacctgttcagcctgaccagagtgagacccgccatcgagtacgccctgagaagcgtggagggcaacggcaccggcagaagactgctgccccccggcaccagattccaggtggcctacgaggacagcgactgcggcaacagagccctgttcagcctggtggacagagtggccgccgccagaggcgccaagcccgacctgatcctgggccccgtgtgcgagtacgccgccgcccccgtggccagactggccagccactgggacctgcccatgctgagcgccggcgccctggccgccggcttccagcacaaggacagcgagtacagccacctgaccagagtggcccccgcctacgccaagatgggcgagatgatgctggccctgttcagacaccaccactggagcagagccgccctggtgtacagcgacgacaagctggagagaaactgctacttcaccctggagggcgtgcacgaggtgttccaggaggagggcctgcacaccagcatctacagcttcgacgagaccaaggacctggacctggaggacatcgtgagaaacatccaggccagcgagagagtggtgatcatgtgcgccagcagcgacaccatcagaagcatcatgctggtggcccacagacacggcatgaccagcggcgactacgccttcttcaacatcgagctgttcaacagcagcagctacggcgacggcagctggaagagaggcgacaagcacgacttcgaggccaagcaggcctacagcagcctgcagaccgtgaccctgctgagaaccgtgaagcccgagttcgagaagttcagcatggaggtgaagagcagcgtggagaagcagggcctgaacatggaggactacgtgaacatgttcgtggagggcttccacgacgccatcctgctgtacgtgctggccctgcacgaggtgctgagagccggctacagcaagaaggacggcggcaagatcatccagcagacctggaacagaaccttcgagggcatcgccggccaggtgagcatcgacgccaacggcgacagatacggcgacttcagcgtgatcgccatgaccgacgtggaggccggcacccaggaggtgatcggcgactacttcggcaaggagggcagattcgagatgagacccaacgtgaagtacccctggggccccctgaagctgagaatcgacgagaacagaatcgtggagcacaccaacagcagcccctgcaagagcagcggcggcctggaggagagcgccgtgaccggcatcgtggtgggcgccctgctgggcgccggcctgctgatggccttctacttcttcagaaagaagtacagaatcaccatcgagagaagaacccagcaggaggagagcaacctgggcaagcacagagagctgagagaggacagcatcagaagccacttcagcgtggcctag

SEQ ID NO: 81358 - protein, 324 aa, Artificial Sequence
  derived and/or modified sequence
MEPSALGPWSLFPDLAPRDQEGQVLAPRRCFRRECGQNEKVVIMCASSDTIRSIMLVAHRHGMTSGDYAFFNIELFNSSSYGDGSWKRGDKHDFEAKQAYSSLQTVTLLRTVKPEFEKFSMEVKSSVEKQGLNMEDYVNMFVEGFHDAILLYVLALHEVLRAGYSKKDGGKIIQQTWNRTFEGIAGQVSIDANGDRYGDFSVIAMTDVEAGTQEVIGDYFGKEGRFEMRPNVKYPWGPLKLRIDENRIVEHTNSSPCKSCGLEESAVTGIVVGALLGAGLLMAFYFFRKKYRITIERRTQQEESNLGKHRELREDSIRSHFSVA

SEQ ID NO: 81359 - DNA, 975 bp, Artificial Sequence
  derived and/or modified sequence
atggagccctccgctctgggcccctggagcctctttcccgatctggcaccacgagaccaagaaggacaggtgcttgcgccaagacgttgctttaggcgggagtgcggccagaatgaaaaggttgtgattatgtgtgcctctagtgacaccatccgcagcattatgttagtagctcaccgccatgggatgacttctggggactatgcctttttcaatatcgagttatttaactcaagctcttacggcgatggaagttggaagcggggggacaagcacgatttcgaagcgaaacaagcctattcctctctgcagactgtcacactgttgcgtactgtgaagcctgagttcgagaagttctcgatggaggtgaagtcatccgtggagaaacagggcttgaacatggaggattacgtcaacatgtttgttgaggggtttcatgacgccatcttgctgtatgtgctggccttgcacgaggtgctaagagcaggttactcaaaaaaagacggaggtaaaataattcagcagacctggaaccggacctttgaaggcatagccgggcaggtgagcatcgacgcaaatggagatcggtacggcgatttctcggtgatagccatgaccgatgtggaagccgggacacaggaggtgattggcgattatttcggtaaggagggtcgctttgagatgcgcccaaacgtgaagtatccatggggtcctttaaagctgcgcattgatgagaacagaatcgtggagcacaccaattcttctccatgtaaaagctgcggcctggaggagagcgcggtcactgggatcgtggttggcgcacttctaggcgccgggttactgatggccttttactttttccgaaagaaataccggatcaccatcgaaaggcgcacacagcaggaggagtcaaacctgggaaagcaccgcgagcttcgagaagattctattagatcacacttttcagtcgcgtag

SEQ ID NO: 81360 - DNA, 975 bp, Artificial Sequence
  derived and/or modified sequence
atggagcccagcgccctgggcccctggagcctcttcccagacctggccccccgggaccaggagggccaggtgctggccccccggcgctgcttccggcgggagtgtggccagaatgagaaggtggtgatcatgtgtgccagcagtgacaccatccgcagcatcatgctggtggcccacagacatggcatgaccagcggggactatgccttcttcaacatcgagctgttcaacagcagcagctatggagatggctcctggaagagaggagacaagcatgactttgaggccaagcaggcctacagcagcctgcagacagtgaccctgctgaggacagtgaagccagagtttgagaagttctccatggaggtgaagagctctgtggagaagcagggcctgaacatggaggactatgtgaacatgtttgtggagggcttccatgatgccatcctgctgtatgtgctggccctgcacgaggtgctgcgggccggctacagcaagaaggatggcggcaagatcatccagcagacctggaacagaacatttgagggcattgctggccaggtgtccattgatgccaatggagacagatatggagacttctctgtgattgccatgacagatgtggaggccggcacccaggaggtgattggagactactttgggaaggagggccgctttgagatgaggcccaacgtgaagtacccctggggccccctgaagctgagaattgatgaaaatcgcatcgtggagcacaccaacagcagcccctgcaagagctgtggcctggaggagagcgctgtgacaggcatcgtggtgggcgccctgctgggcgccggcctgctgatggccttctacttcttcaggaagaagtaccgcatcaccattgaaagaaggacccagcaggaggagagcaacctgggcaagcaccgggagctgcgggaggacagcatccgcagccacttctctgtggcctag

SEQ ID NO: 81361 - DNA, 1474 bp, Artificial Sequence
  derived and/or modified sequence
aggtccgcgatggagccatctgcactgggaccttggtccttgttccctgaccttgcgccgagggaccaggaaggtcaggtgctcgccccgcgtcggtgcttcaggagggaatgtggccagaacgagaaagtggtgatcatgtgtgcgagcagtgacaccatccggagcatcatgctggtggcgcacaggcatggcatgaccagtggagactacgccttcttcaacattgagctcttcaacagctcttcctatggagatggctcatggaagagaggagacaaacacgactttgaagctaagcaagcatactcgtccctccagacagtcactctactgaggacagtgaaacctgagtttgagaagttttccatggaggtgaaaagttcagttgagaaacaagggctcaatatggaggattacgttaacatgtttgttgaaggattccacgatgccatcctcctctacgtcttggctctacatgaagtactcagagctggttacagcaaaaaggatggagggaaaattatacagcagacttggaacagaacatttgaaggtatcgccgggcaggtgtccatagatgccaacggagaccgatatggggatttctctgtgattgccatgactgatgtggaggcgggcacccaggaggttattggtgattattttggaaaagaaggtcgttttgaaatgcggccgaatgtcaaatatccttggggccctttaaaactgagaatagatgaaaaccgaattgtagagcatacaaacagctctccctgcaaatcatgtggcctagaagaatcggcagtgacaggaattgtcgtgggggctttactaggagctggcttgctaatggccttctactttttcaggaagaaatacagaataaccattgagaggcgaacccagcaagaagaaagtaaccttggaaaacatcgggaattacgggaagattccatcagatcccatttttcagtagcttaaaggaagccccccactttttttttttctgcctgagattctttaaggagatagacgggttgaaagacatcaatgaaacagaaggggcgttcttgaagaattcataattttaagcagttagtaatttcattttaaaatttctgtagaagctcaggaattatgattaatcaccatctgcctccaggcctttcatctcatgacaaacaaatataataatgatatcgtgtcactctgttaaatgttcatactgtttcaagcccatatgattagatttatgtttttaaaatctgttgtctccatatcttgatggcttttgggagcatttcacacaaggatataaaatgcggttttcttaaatgaaatgttttgtagctagaataaaatcatttttacaagtacagcattcttggaaagaatttaacacccaaaaaggggaaaatgtaatgaaaaatctcaaggttggaaatacagccttactctctctagagctgga

SEQ ID NO: 81362 - DNA, 975 bp, Artificial Sequence
  derived and/or modified sequence
atggagcccagcgccctgggcccctggagcctgttccccgacctggcccctcgcgaccaggagggccaggtgctcgcacctcgccgttgtttccgtcgggagtgtggacaaaacgagaaagtcgtgattatgtgcgccagttctgacacgattaggtcaatcatgctggtggcacacagacatgggatgacctcaggcgactacgcatttttcaacatagaactttttaactcctcatcttacggcgatgggagctggaagaggggagacaaacatgacttcgaggcaaaacaggcctactcatcactgcagaccgtcactttgttaagaaccgtcaagcctgagttcgagaaattcagcatggaggttaaatccagcgtcgagaaacagggcctgaacatggaagattatgtaaacatgttcgttgagggatttcacgatgcaattctgctctacgtgcttgctctgcacgaagtcctccgggccggttatagtaagaaagatggcggaaagatcatccagcaaacgtggaaccgcacattcgaaggcatagcagggcaggtgagtattgatgccaatggagacaggtacggcgactttagtgtaatcgccatgaccgatgtcgaggctggcactcaagaggtgattggagattacttcggcaaagagggcaggttcgagatgcgccccaatgtcaagtatccctgggggcctctgaaactgcgcatcgacgaaaataggattgtggagcacacaaacagttccccttgcaaaagttgcggccttgaggagtcggccgtgacgggcattgtggtgggtgcgctgctgggagcaggattgctgatggctttttacttttttcgtaaaaagtaccggatcaccatcgagagacgtactcaacaagaggagagcaatctgggtaagcatagagagctgagggaagatagcatacgatctcacttcagtgtggcttag

SEQ ID NO: 81363 - DNA, 975 bp, Artificial Sequence
  derived and/or modified sequence
atggaaccttctgcacttggtccgtggagcctgttcccagatctggctcctcgcgaccaagagggccaagtgttggcccctcgaagatgcttcagaagagaatgtgggcagaatgagaaagtagtgatcatgtgcgcatcttccgacactatcagatctataatgctggtagctcatcggcatggaatgaccagtggagactacgcattttttaatatcgagctgttcaattcctcatcatacggggacggttcatggaaaaggggggacaaacacgactttgaagcaaagcaggcttattcaagcctacagactgtcacattgctacgcaccgtaaaacctgagtttgaaaagttcagcatggaggtcaaatcaagcgtggaaaagcaaggcctgaacatggaggactacgtgaacatgtttgtagaagggttccatgatgccatcctgttgtatgtactggctctccatgaagtcctgagggctggttattccaagaaagacggcggaaaaataattcagcagacttggaaccgcactttcgagggcatcgccggacaagtttcaatcgacgctaacggtgacagatacggggatttctctgtcattgcaatgacagacgttgaagccggaacgcaggaggtcatcggggactacttcggaaaagaggggaggtttgagatgagacctaacgttaaatatccttggggacccctgaaactgaggattgatgagaatagaattgtcgagcacactaattcgtcaccatgcaaatcatgcgggctcgaggagtccgccgtcactggtattgtagtcggcgcattgctcggggctggtcttttgatggcattttactttttcaggaaaaagtaccggatcacaatcgaaagacggacccagcaagaagaatctaacctgggtaagcacagagaactccgagaggactccatcaggagccacttttcggtcgcctag

SEQ ID NO: 81364 - DNA, 975 bp, Artificial Sequence
  derived and/or modified sequence
atggagcccagcgccctgggcccctggagcctgttccccgacctggcccccagagaccaggagggccaggtgctggcccccagaagatgcttcagaagagagtgcggccagaacgagaaggtggtgatcatgtgcgccagcagcgacaccatcagaagcatcatgctggtggcccacagacacggcatgaccagcggcgactacgccttcttcaacatcgagctgttcaacagcagcagctacggcgacggcagctggaagagaggcgacaagcacgacttcgaggccaagcaggcctacagcagcctgcagaccgtgaccctgctgagaaccgtgaagcccgagttcgagaagttcagcatggaggtgaagagcagcgtggagaagcagggcctgaacatggaggactacgtgaacatgttcgtggagggcttccacgacgccatcctgctgtacgtgctggccctgcacgaggtgctgagagccggctacagcaagaaggacggcggcaagatcatccagcagacctggaacagaaccttcgagggcatcgccggccaggtgagcatcgacgccaacggcgacagatacggcgacttcagcgtgatcgccatgaccgacgtggaggccggcacccaggaggtgatcggcgactacttcggcaaggagggcagattcgagatgagacccaacgtgaagtacccctggggccccctgaagctgagaatcgacgagaacagaatcgtggagcacaccaacagcagcccctgcaagagctgcggcctggaggagagcgccgtgaccggcatcgtggtgggcgccctgctgggcgccggcctgctgatggccttctacttcttcagaaagaagtacagaatcaccatcgagagaagaacccagcaggaggagagcaacctgggcaagcacagagagctgagagaggacagcatcagaagccacttcagcgtggcctag

SEQ ID NO: 81365 - protein, 323 aa, Artificial Sequence
  derived and/or modified sequence
  misc_feature (1)..(1): Xaa can be any naturally occurring amino acid
XRGQGPEPAPGGGVEGVGARGVALKLFVQLLGCSRFGGAVVRAGEAEPSGAARSASSGREEPQPEEGEEEEEKEEERGPQWRLGARKPGSWTGEAAVCADSAPAARAPQALARASGRGGRVARRGAEESGPPHSPSRRGSASRAGPGRASETMNFLLSWVHWSLALLLYLHHAKWSQAAPMAEGGGQNHHEVVKFMDVYQRSYCHPIETLVDIFQEYPDEIEYIFKPSCVPLMRCGGCCNDEGLECVPTEESNITMQIMRIKPHQGQHIGEMSFLQHNKCECRPKKDRARQEKKSVRGKGKGQKRKRKKSRYKSWSVCDKPRR

SEQ ID NO: 81366 - protein, 351 aa, Artificial Sequence
  derived and/or modified sequence
MTDRQTDTAPSPSYHLLPGRRRTVDAAASRGQGPEPAPGGGVEGVGARGVALKLFVQLLGCSRFGGAVVRAGEAEPSGAARSASSGREEPQPEEGEEEEEKEEERGPQWRLGARKPGSWTGEAAVCADSAPAARAPQALARASGRGGRVARRGAEESGPPHSPSRRGSASRAGPGRASETMNFLLSWVHWSLALLLYLHHAKWSQAAPMAEGGGQNHHEVVKFMDVYQRSYCHPIETLVDIFQEYPDEIEYIFKPSCVPLMRCGGCCNDEGLECVPTEESNITMQIMRIKPHQGQHIGEMSFLQHNKCECRPKKDRARQEKKSVRGKGKGQKRKRKKSRYKSWSVCDKPRR

SEQ ID NO: 81367 - protein, 171 aa, Artificial Sequence
  derived and/or modified sequence
MNFLLSWVHWSLALLLYLHHAKWSQAAPMAEGGGQNHHEVVKFMDVYQRSYCHPIETLVDIFQEYPDEIEYIFKPSCVPLMRCGGCCNDEGLECVPTEESNITMQIMRIKPHQGQHIGEMSFLQHNKCECRPKKDRARQEKKSVRGKGKGQKRKRKKSRYKSWSVCDKPRR

SEQ ID NO: 81368 - DNA, 3494 bp, Artificial Sequence
  derived and/or modified sequence
tcgcggaggcttggggcagccgggtagctcggaggtcgtggcgctgggggctagcaccagcgctctgtcgggaggcgcagcggttaggtggaccggtcagcggactcaccggccagggcgctcggtgctggaatttgatattcattgatccgggttttatccctcttcttttttcttaaacatttttttttaaaactgtattgtttctcgttttaatttatttttgcttgccattccccacttgaatcgggccgacggcttggggagattgctctacttccccaaatcactgtggattttggaaaccagcagaaagaggaaagaggtagcaagagctccagagagaagtcgaggaagagagagacggggtcagagagagcgcgcgggcgtgcgagcagcgaaagcgacaggggcaaagtgagtgacctgcttttgggggtgaccgccggagcgcggcgtgagccctcccccttgggatcccgcagctgaccagtcgcgctgacggacagacagacagacaccgcccccagccccagctaccacctcctccccggccggcggcggacagtggacgcggcggcgagccgcgggcaggggccggagcccgcgcccggaggcggggtggagggggtcggggctcgcggcgtcgcactgaaacttttcgtccaacttctgggctgttctcgcttcggaggagccgtggtccgcgcgggggaagccgagccgagcggagccgcgagaagtgctagctcgggccgggaggagccgcagccggaggagggggaggaggaagaagagaaggaagaggagagggggccgcagtggcgactcggcgctcggaagccgggctcatggacgggtgaggcggcggtgtgcgcagacagtgctccagccgcgcgcgctccccaggccctggcccgggcctcgggccggggaggaagagtagctcgccgaggcgccgaggagagcgggccgccccacagcccgagccggagagggagcgcgagccgcgccggccccggtcgggcctccgaaaccatgaactttctgctgtcttgggtgcattggagccttgccttgctgctctacctccaccatgccaagtggtcccaggctgcacccatggcagaaggaggagggcagaatcatcacgaagtggtgaagttcatggatgtctatcagcgcagctactgccatccaatcgagaccctggtggacatcttccaggagtaccctgatgagatcgagtacatcttcaagccatcctgtgtgcccctgatgcgatgcgggggctgctgcaatgacgagggcctggagtgtgtgcccactgaggagtccaacatcaccatgcagattatgcggatcaaacctcaccaaggccagcacataggagagatgagcttcctacagcacaacaaatgtgaatgcagaccaaagaaagatagagcaagacaagaaaaaaaatcagttcgaggaaagggaaaggggcaaaaacgaaagcgcaagaaatcccggtataagtcctggagcgtatgtgacaagccgaggcggtgagccgggcaggaggaaggagcctccctcagggtttcgggaaccagatctctcaccaggaaagactgatacagaacgatcgatacagaaaccacgctgccgccaccacaccatcaccatcgacagaacagtccttaatccagaaacctgaaatgaaggaagaggagactctgcgcagagcactttgggtccggagggcgagactccggcggaagcattcccgggcgggtgacccagcacggtccctcttggaattggattcgccattttatttttcttgctgctaaatcaccgagcccggaagattagagagttttatttctgggattcctgtagacacacccacccacatacatacatttatatatatatatattatatatatataaaaataaatatctctattttatatatataaaatatatatattctttttttaaattaacagtgctaatgttattggtgtcttcactggatgtatttgactgctgtggacttgagttgggaggggaatgttcccactcagatcctgacagggaagaggaggagatgagagactctggcatgatcttttttttgtcccacttggtggggccagggtcctctcccctgcccaggaatgtgcaaggccagggcatgggggcaaatatgacccagttttgggaacaccgacaaacccagccctggcgctgagcctctctaccccaggtcagacggacagaaagacagatcacaggtacagggatgaggacaccggctctgaccaggagtttggggagcttcaggacattgctgtgctttggggattccctccacatgctgcacgcgcatctcgcccccaggggcactgcctggaagattcaggagcctgggcggccttcgcttactctcacctgcttctgagttgcccaggagaccactggcagatgtcccggcgaagagaagagacacattgttggaagaagcagcccatgacagctccccttcctgggactcgccctcatcctcttcctgctccccttcctggggtgcagcctaaaaggacctatgtcctcacaccattgaaaccactagttctgtccccccaggagacctggttgtgtgtgtgtgagtggttgaccttcctccatcccctggtccttcccttcccttcccgaggcacagagagacagggcaggatccacgtgcccattgtggaggcagagaaaagagaaagtgttttatatacggtacttatttaatatccctttttaattagaaattaaaacagttaatttaattaaagagtagggttttttttcagtattcttggttaatatttaatttcaactatttatgagatgtatcttttgctctctcttgctctcttatttgtaccggtttttgtatataaaattcatgtttccaatctctctctccctgatcggtgacagtcactagcttatcttgaacagatatttaattttgctaacactcagctctgccctccccgatcccctggctccccagcacacattcctttgaaataaggtttcaatatacatctacatactatatatatatttggcaacttgtatttgtgtgtatatatatatatatatgtttatgtatatatgtgattctgataaaatagacattgctattctgttttttatatgtaaaaacaaaacaagaaaaaatagagaattctacatactaaatctctctccttttttaattttaatatttgttatcatttatttattggtgctactgtttatccgtaataattgtggggaaaagatattaacatcacgtctttgtctctagtgcagtttttcgagatattccgtagtacatatttatttttaaacaacgacaaagaaatacagatatatcttaaaaaaaaaaaagcattttgtattaaagaatttaattctgatctcaaaaaaaaaaaaaaaaaa

SEQ ID NO: 81369 - DNA, 966 bp, Artificial Sequence
  derived and/or modified sequence
cgcggccagggccccgagcccgcccccggcggcggcgtggagggcgtgggcgcccgcggcgtggccctgaagctgttcgtgcagctgctgggctgcagccgcttcggcggcgccgtggtgcgcgccggcgaggccgagcccagcggcgccgcccgcagcgccagcagcggccgcgaggagccccagcccgaggagggcgaggaggaggaggagaaggaggaggagcgcggcccccagtggcgcctgggcgcccgcaagcccggcagctggaccggcgaggccgccgtgtgcgccgacagcgcccccgccgcccgcgccccccaggccctggcccgcgccagcggccgcggcggccgcgtggcccgccgcggcgccgaggagagcggccccccccacagccccagccgccgcggcagcgccagccgcgccggccccggccgcgccagcgagaccatgaacttcctgctgagctgggtgcactggagcctggccctgctgctgtacctgcaccacgccaagtggagccaggccgcccccatggccgagggcggcggccagaaccaccacgaggtggtgaagttcatggacgtgtaccagcgcagctactgccaccccatcgagaccctggtggacatcttccaggagtaccccgacgagatcgagtacatcttcaagcccagctgcgtgcccctgatgcgctgcggcggctgctgcaacgacgagggcctggagtgcgtgcccaccgaggagagcaacatcaccatgcagatcatgcgcatcaagccccaccagggccagcacatcggcgagatgagcttcctgcagcacaacaagtgcgagtgccgccccaagaaggaccgcgcccgccaggagaagaagagcgtgcgcggcaagggcaagggccagaagcgcaagcgcaagaagagccgctacaagagctggagcgtgtgcgacaagccccgccgc

SEQ ID NO: 81370 - DNA, 972 bp, Artificial Sequence
  derived and/or modified sequence
tgaagaggccagggccccgagcccgcccccggcggcggcgtggagggcgtgggcgccagaggcgtggccctgaagctgttcgtgcagctgctgggctgcagcagattcggcggcgccgtggtgagagccggcgaggccgagcccagcggcgccgccagaagcgccagcagcggcagagaggagccccagcccgaggagggcgaggaggaggaggagaaggaggaggagagaggcccccagtggagactgggcgccagaaagcccggcagctggaccggcgaggccgccgtgtgcgccgacagcgcccccgccgccagagccccccaggccctggccagagccagcggcagaggcggcagagtggccagaagaggcgccgaggagagcggccccccccacagccccagcagaagaggcagcgccagcagagccggccccggcagagccagcgagaccatgaacttcctgctgagctgggtgcactggagcctggccctgctgctgtacctgcaccacgccaagtggagccaggccgcccccatggccgagggcggcggccagaaccaccacgaggtggtgaagttcatggacgtgtaccagagaagctactgccaccccatcgagaccctggtggacatcttccaggagtaccccgacgagatcgagtacatcttcaagcccagctgcgtgcccctgatgagatgcggcggctgctgcaacgacgagggcctggagtgcgtgcccaccgaggagagcaacatcaccatgcagatcatgagaatcaagccccaccagggccagcacatcggcgagatgagcttcctgcagcacaacaagtgcgagtgcagacccaagaaggacagagccagacaggagaagaagagcgtgagaggcaagggcaagggccagaagagaaagagaaagaagagcagatacaagagctggagcgtgtgcgacaagcccagaagatag

SEQ ID NO: 81371 - DNA, 972 bp, Artificial Sequence
  derived and/or modified sequence
tgacggggccagggccctgagcccgcaccaggagggggtgtggaaggggttggagcaagaggcgtcgctttaaagctctttgtccagctactaggttgttcacgtttcgggggcgcggtggtccgagccggtgaggctgagccatctggtgccgccagatcagcatcttcaggacgggaagagccccagccagaagagggggaggaggaggaagagaaggaggaagagagggggccccagtggagactgggagcccgtaagcccggtagttggaccggggaagcagccgtatgtgcggactctgcccctgctgcacgcgcaccccaggccttagcaagagcttccggccggggcgggcgagtggcacgacgcggcgcagaagagtccggccctccgcattcccctagccggagagggagcgccagcagagccgggcccggccgggcatccgagaccatgaactttctcctatcatgggtccattggtcacttgccctccttctttacctgcatcacgctaagtggagccaggcggccccaatggccgagggcggtggccagaaccatcacgaggtggttaaattcatggatgtataccaacgatcctactgccaccccatcgagaccttggtcgatatctttcaggaatatcccgacgagatcgaatacatatttaaaccgtcttgcgttccgttgatgaggtgtggcggatgctgtaatgatgaagggctggagtgtgtaccaaccgaggagtctaatatcaccatgcagataatgagaatcaaaccgcatcagggacagcatatcggcgaaatgtccttcttgcagcacaacaaatgtgaatgtcgtccaaaaaaggatcgcgctagacaagagaagaagtcagtacgggggaagggaaagggccaaaaacgcaagcgtaagaagagccggtataaatcatggtcagtatgcgataagcctaggcgctag

SEQ ID NO: 81372 - DNA, 972 bp, Artificial Sequence
  derived and/or modified sequence
tgaagaggccagggccctgagcccgcccctgggggcggcgtggagggcgtgggcgcccggggcgtggccctgaagctgtttgtgcagctgctgggctgcagcagatttggaggagctgtggtgcgggccggggaggccgagcccagcggggccgcccggagcgccagcagcggccgggaggagccccagcctgaggagggggaggaggaggaggagaaggaggaggagcggggcccccagtggaggctgggcgccaggaagccaggctcctggacaggagaggccgctgtgtgtgccgacagcgccccagctgcccgggccccccaggccctggcccgggccagcggccggggcggccgggtggccaggagaggagctgaggagagcggccccccccacagccccagcagaagaggcagcgccagccgggccggccctggccgggccagcgagaccatgaacttcctgctgtcctgggtgcactggagcctggccctgctgctgtacctgcaccacgccaagtggagccaggccgcccccatggccgagggcggcggccagaaccaccacgaggtggtgaagttcatggatgtgtaccagaggagctactgccaccccatcgagaccctggtggacatcttccaggagtacccagatgaaattgagtacatcttcaagcccagctgtgtgcccctgatgagatgtggcggctgctgcaatgatgagggcctggagtgtgtgcccacagaggagagcaacatcaccatgcagatcatgaggatcaagccccaccagggccagcacatcggggagatgtccttcctgcagcacaacaagtgtgaatgtcggcccaagaaggaccgggcccggcaggagaagaagtctgtgcggggcaagggcaagggccagaagaggaagaggaagaagagccgctacaagtcctggagcgtgtgtgacaagcccaggaggtag

SEQ ID NO: 81373 - DNA, 972 bp, Artificial Sequence
  derived and/or modified sequence
tgacggggccagggccccgagcccgcccccggcggcggcgtggagggcgtaggtgcgcggggggtggcactgaagcttttcgtccaactcctcggctgctcaaggttcggaggagctgtggtcagggctggcgaggccgaaccttctggagccgccagatctgcttctagtggacgggaggaaccacagccagaggagggtgaggaagaggaagaaaaagaagaggaacgggggccgcaatggcgcctgggtgcacgaaagcctgggagctggacaggcgaagccgcagtgtgcgccgactctgcccctgctgcgcgcgctcctcaggcattagcaagggcctccggccggggaggacgggttgccaggcgcggcgcagaagaaagtggaccgccccactctccttccaggcggggatctgcctccagagctggccctggtagagcatcagagacaatgaactttcttctgagctgggtgcattggtccctagcgcttctgctgtatctccaccatgccaagtggtctcaggctgcacccatggccgaggggggaggccagaaccatcatgaggtcgtgaagtttatggacgtctatcagaggagctattgccacccaattgagacactggttgacattttccaggaatacccggatgagatcgagtacatctttaaaccttcttgtgttccactgatgaggtgcggtggatgttgcaacgacgaagggctcgagtgtgtgcccaccgaggagagcaacattaccatgcagatcatgcgaatcaaaccccatcaaggtcagcacattggagagatgtcatttttgcaacataataaatgcgaatgtcgacccaaaaaagatagggcacgacaggaaaagaaatcagtaagagggaagggaaaaggccaaaaaaggaagcggaagaagagccggtataagtcatggtccgtatgcgataagccgagacgctag

SEQ ID NO: 81374 - DNA, 972 bp, Artificial Sequence
  derived and/or modified sequence
tgaagagggcaaggcccagagcctgcacctggcggaggagtagaaggggtgggagctagaggcgtggcactgaagctgtttgtccagcttctcggctgctctcgcttcggaggagccgtcgtgagggcgggtgaagcggagcccagtggtgccgctcggtccgcatcatccggcagagaggagccccagcctgaagagggggaggaggaggaggagaaagaggaggagcgcggacctcaatggcggctgggcgctagaaaacctggaagctggactggcgaggctgccgtctgcgccgattcagctcccgctgcacgcgctccccaggctctggcaagagcatctggtaggggcggacgggttgccagacggggagctgaagagtcaggtccaccacattccccgagcagacgcggatcggcatctcgtgctgggccaggaagggcctctgaaacgatgaacttcctgttatcttgggttcattggagtctggctctccttctctatctgcaccatgctaagtggagtcaggcggcacccatggcagaggggggaggccagaaccatcatgaggtggtgaagtttatggatgtgtatcagcgcagttattgtcaccccattgaaacgctcgtggacatttttcaggaatacccagacgaaatcgagtatatttttaagccctcttgcgtaccactgatgagatgcgggggatgttgcaacgacgagggcttagaatgtgtccccacggaggagagcaacatcaccatgcagatcatgcggatcaagccccaccagggacagcacattggggagatgtcattccttcaacacaacaaatgcgagtgcagaccgaagaaagaccgggctaggcaggagaaaaagagcgtaagaggcaaggggaaagggcagaagagaaagcggaagaagagcagatacaaatcctggtctgtctgcgataagcccagacggtag

SEQ ID NO: 81375 - DNA, 972 bp, Artificial Sequence
  derived and/or modified sequence
tgaagggggcagggtcccgaacccgcacctggagggggtgtcgaaggcgtcggagctcggggagtcgcgctgaagttgttcgtgcagctcctcggatgttctcggtttggaggggccgtggtcagagcaggagaggccgaaccgagtggtgccgcaagaagcgccagctcaggaagagaggagccccagccagaagaaggagaggaagaggaagaaaaagaggaagagaggggaccacaatggaggttgggtgctcgtaagcctggatcgtggaccggcgaagcagccgtctgtgctgactcagccccagccgcacgcgcgccgcaggcccttgcccgggcgagtggtcggggggggcgcgtcgccaggaggggagcagaggaatctggccctccacattctccctcccgccgaggatcagcttcacgcgctggtccaggaagggcatccgaaaccatgaattttctgctttcctgggttcattggagcctggctctgctgctgtaccttcatcacgcaaaatggtcccaagccgccccgatggccgaaggcgggggacagaaccaccacgaggtcgtgaaattcatggatgtgtaccagaggtcctactgccacccgatcgaaactcttgtggatatattccaagagtaccccgacgagatcgagtacatatttaagccaagctgcgtgcccctgatgagatgtggaggctgttgtaatgacgaaggtctggaatgtgtgccaactgaagaaagcaacattaccatgcagatcatgcgaattaaaccacaccagggccaacacatcggcgaaatgagttttctgcagcacaataagtgtgaatgtcggcccaagaaggaccgcgctagacaagagaaaaaatctgtccgaggaaagggaaaaggtcagaaaaggaaaaggaagaaatccagatataaatcttggtccgtgtgtgacaagcccaggcgttag

SEQ ID NO: 81376 - DNA, 972 bp, Artificial Sequence
  derived and/or modified sequence
taacggggtcagggaccggaacctgctcctggcggaggagttgaaggagtgggtgcccggggagtggctttaaaactgttcgtgcagttgctcgggtgttccagattcggaggcgcggtggtgagagcgggcgaagcagaacctagtggcgcagcccggagtgcttctagcggccgtgaggaaccacaaccagaggaaggcgaagaggaggaagaaaaggaggaagagagaggcccccagtggaggctaggcgcacgcaaaccaggaagttggaccggtgaagccgccgtttgcgcagactcggctcctgctgccagggcgccacaggcattagcacgtgcttctggcagaggagggagggtcgcacgcaggggcgccgaagagtctggaccaccccactctccttctcgaagaggtagtgcgagccgggccggacctggacgtgccagcgaaactatgaacttcttactttcttgggtgcactggagcctggccctcctgctctacctccatcacgctaagtggtcccaagccgcacccatggcggagggcggcggacagaatcatcacgaagtggtcaagtttatggacgtgtatcaacgtagctattgccacccaatagagacactggtcgatattttccaagagtaccctgatgaaattgaatatatcttcaaaccaagttgtgtgccactcatgcgatgcgggggctgttgtaacgacgaggggctcgagtgtgtccccacagaagagtcgaatatcaccatgcaaattatgagaattaagcctcaccagggacaacacattggtgagatgtcttttcttcagcataataaatgtgaatgtcgccctaaaaaagaccgagccaggcaggaaaagaagagcgtacgaggcaagggaaaaggtcaaaagaggaagcgcaaaaaaagtaggtacaagagttggagtgtgtgtgataaaccacggcgatag

SEQ ID NO: 81377 - DNA, 970 bp, Artificial Sequence
  derived and/or modified sequence
ccgcgggcaggggccggagcccgcgcccggaggcggggtggagggggtcggggctcgcggcgtcgcactgaaacttttcgtccaacttctgggctgttctcgcttcggaggagccgtggtccgcgcgggggaagccgagccgagcggagccgcgagaagtgctagctcgggccgggaggagccgcagccggaggagggggaggaggaagaagagaaggaagaggagagggggccgcagtggcgactcggcgctcggaagccgggctcatggacgggtgaggcggcggtgtgcgcagacagtgctccagccgcgcgcgctccccaggccctggcccgggcctcgggccggggaggaagagtagctcgccgaggcgccgaggagagcgggccgccccacagcccgagccggagagggagcgcgagccgcgccggccccggtcgggcctccgaaaccatgaactttctgctgtcttgggtgcattggagccttgccttgctgctctacctccaccatgccaagtggtcccaggctgcacccatggcagaaggaggagggcagaatcatcacgaagtggtgaagttcatggatgtctatcagcgcagctactgccatccaatcgagaccctggtggacatcttccaggagtaccctgatgagatcgagtacatcttcaagccatcctgtgtgcccctgatgcgatgcgggggctgctgcaatgacgagggcctggagtgtgtgcccactgaggagtccaacatcaccatgcagattatgcggatcaaacctcaccaaggccagcacataggagagatgagcttcctacagcacaacaaatgtgaatgcagaccaaagaaagatagagcaagacaagaaaaaaaatcagttcgaggaaagggaaaggggcaaaaacgaaagcgcaagaaatcccggtataagtcctggagcgtatgtgacaagccgaggcggtga

SEQ ID NO: 81378 - RNA, 972 nt, Artificial Sequence
  derived and/or modified sequence
ugaagggggcagggucccgaacccgcaccuggagggggugucgaaggcgucggagcucggggagucgcgcugaaguuguucgugcagcuccucggauguucucgguuuggaggggccguggucagagcaggagaggccgaaccgaguggugccgcaagaagcgccagcucaggaagagaggagccccagccagaagaaggagaggaagaggaagaaaaagaggaagagaggggaccacaauggagguugggugcucguaagccuggaucguggaccggcgaagcagccgucugugcugacucagccccagccgcacgcgcgccgcaggcccuugcccgggcgaguggucggggggggcgcgucgccaggaggggagcagaggaaucuggcccuccacauucucccucccgccgaggaucagcuucacgcgcugguccaggaagggcauccgaaaccaugaauuuucugcuuuccuggguucauuggagccuggcucugcugcuguaccuucaucacgcaaaauggucccaagccgccccgauggccgaaggcgggggacagaaccaccacgaggucgugaaauucauggauguguaccagagguccuacugccacccgaucgaaacucuuguggauauauuccaagaguaccccgacgagaucgaguacauauuuaagccaagcugcgugccccugaugagauguggaggcuguuguaaugacgaaggucuggaaugugugccaacugaagaaagcaacauuaccaugcagaucaugcgaauuaaaccacaccagggccaacacaucggcgaaaugaguuuucugcagcacaauaagugugaaugucggcccaagaaggaccgcgcuagacaagagaaaaaaucuguccgaggaaagggaaaaggucagaaaaggaaaaggaagaaauccagauauaaaucuugguccgugugugacaagcccaggcguuag

SEQ ID NO: 81379 - RNA, 972 nt, Artificial Sequence
  derived and/or modified sequence
uaacggggucagggaccggaaccugcuccuggcggaggaguugaaggagugggugcccggggaguggcuuuaaaacuguucgugcaguugcucggguguuccagauucggaggcgcgguggugagagcgggcgaagcagaaccuaguggcgcagcccggagugcuucuagcggccgugaggaaccacaaccagaggaaggcgaagaggaggaagaaaaggaggaagagagaggcccccaguggaggcuaggcgcacgcaaaccaggaaguuggaccggugaagccgccguuugcgcagacucggcuccugcugccagggcgccacaggcauuagcacgugcuucuggcagaggagggagggucgcacgcaggggcgccgaagagucuggaccaccccacucuccuucucgaagagguagugcgagccgggccggaccuggacgugccagcgaaacuaugaacuucuuacuuucuugggugcacuggagccuggcccuccugcucuaccuccaucacgcuaaguggucccaagccgcacccauggcggagggcggcggacagaaucaucacgaaguggucaaguuuauggacguguaucaacguagcuauugccacccaauagagacacuggucgauauuuuccaagaguacccugaugaaauugaauauaucuucaaaccaaguugugugccacucaugcgaugcgggggcuguuguaacgacgaggggcucgaguguguccccacagaagagucgaauaucaccaugcaaauuaugagaauuaagccucaccagggacaacacauuggugagaugucuuuucuucagcauaauaaaugugaaugucgcccuaaaaaagaccgagccaggcaggaaaagaagagcguacgaggcaagggaaaaggucaaaagaggaagcgcaaaaaaaguagguacaagaguuggagugugugugauaaaccacggcgauag

SEQ ID NO: 81380 - protein, 893 aa, Artificial Sequence
  derived and/or modified sequence
MPVRKQDTQRALHLLEEYRSKLSQTEDRQLRSSIERVINIFQSNLFQALIDIQEFYEVTLLDNPKCIDRSKPSEPIQPVNTWEISSLPSSTVTSETLPSSLSPSVEKYRYQDEDTPPQEHISPQITNEVIGPELVHVSEKNLSEIENVHGFVSHSHISPIKANPPPVLVNTDSLETPTYVNGTDADYEYEEITLERGNSGLGFSIAGGTDNPHIGDDSSIFITKIITGGAAAQDGRLRVNDCILRVNEVDVRDVTHSKAVEALKEAGSIVRLYVKRRKPVSEKIMEIKLIKGPKGLGFSIAGGVGNQHIPGDNSIYVTKIIEGGAAHKDGKLQIGDKLLAVNNVCLEEVTHEEAVTALKNTSDFVYLKVAKPTSMYMNDGYAPPDITNSSSQPVDNHVSPSSFLGQTPASPARYSPVSKAVLGDDEITREPRKVVLHRGSTGLGFNIVGGEDGEGIFISFILAGGPADLSGELRKGDRIISVNSVDLRAASHEQAAAALKNAGQAVTIVAQYRPEEYSRFEAKIHDLREQMMNSSISSGSGSLRTSQKRSLYVRALFDYDKTKDSGLPSQGLNFKFGDILHVINASDDEWWQARQVTPDGESDEVGVIPSKRRVEKKERARLKTVKFNSKTRDKGQSFNDKRKKNLFSRKFPFYKNKDQSEQETSDADQHVTSNASDSESSYRGQEEYVLSYEPVNQQEVNYTRPVIILGPMKDRINDDLISEFPDKFGSCVPHTTRPKRDYEVDGRDYHFVTSREQMEKDIQEHKFIEAGQYNNHLYGTSVQSVREVAEKGKHCILDVSGNAIKRLQIAQLYPISIFIKPKSMENIMEMNKRLTEEQARKTFERAMKLEQEFTEHFTAIVQGDTLEDIYNQVKQIIEEQSGSYIWVPAKEKL

SEQ ID NO: 81381 - DNA, 2682 bp, Artificial Sequence
  derived and/or modified sequence
atgcctgtgcggaagcaggatactcaaagagccctacacctcttagaggagtatcgaagcaagttgtcacagaccgaagaccgccagctgagatccagcatcgaacgggttattaacatcttccagtccaatctgtttcaggctctaattgacattcaagagttttatgaggttacacttctggataacccgaaatgcatagaccggagtaagccctcggagcccatccagcctgtgaacacgtgggagattagcagcctcccttcttccacggtgacgagtgagaccttgccgtccagtttgtccccctctgttgaaaagtaccgataccaggacgaggatacacccccgcaggaacacattagtccccagataaccaacgaagtaatcggccctgagctggtgcacgtctcagagaagaacttgagcgagatcgagaacgtccatgggttcgtgtcccattctcacatcagcccaattaaagccaatcctccccccgtgttggtcaataccgacagcctggagaccccaacctacgtgaacggaaccgatgccgattacgagtacgaggagatcacactcgagcggggcaacagcggccttggcttctccatagctgggggcacagacaatcctcacattggggacgatagctcaatatttatcactaaaatcatcacaggcggcgccgctgcccaggacggacgactccgagtgaatgattgcatactacgggtgaacgaggtagacgtacgtgacgttacccactcaaaggccgtagaggctctgaaagaggctggtagcatcgtccgtctctatgttaagcgccggaagcccgtgtctgaaaagatcatggaaattaaactgatcaagggccccaagggcctgggctttagtattgctggtggagtagggaatcagcacatcccaggcgacaactccatttacgttacgaaaattatagaaggtggggcagcacacaaggacggcaaacttcagattggggataaattgctcgctgttaataatgtctgcctggaagaggtcactcatgaggaagctgttaccgccctaaaaaacacctcagactttgtttacttgaaagtggcaaagccaaccagtatgtacatgaacgacggatatgccccccccgacatcacgaattcaagcagccaaccagtggacaatcatgtttctccctcatcatttcttggtcagactcctgcgtcacctgcccgttatagccctgtgagcaaggcagtcttaggggatgacgagatcacacgcgaacctagaaaagtcgtgctccaccgcggctcaactgggctggggtttaacattgtgggaggggaggatggcgagggcatcttcatcagcttcattctggccgggggacccgctgaccttagcggcgagctgcggaagggcgatcgtataatatctgtgaactccgtcgatctccgggcggcaagtcatgagcaggccgctgccgccttgaagaacgcgggccaagccgtgactatcgttgcacaatacaggcctgaagagtattctaggtttgaggccaagattcacgatctgcgcgaacagatgatgaattcatctatttcctccgggtccggcagtcttcgcacctcccagaagaggtcgctttacgtccgggccctcttcgattacgacaagacaaaagattctggattgccctctcagggcctgaactttaagttcggggatattttacacgtcattaacgcaagtgacgatgagtggtggcaggccaggcaggtgactcccgacggtgagagcgacgaggtgggcgtcattccctccaaacggcgggtagagaaaaaagagcgtgccagactcaagacggtcaagtttaattcgaaaacccgcgataagggacaaagtttcaatgataagcggaagaaaaatctgtttagcaggaagttccctttctacaaaaacaaggatcaatcagagcaggagaccagcgatgcagaccagcacgttacgtctaatgctagcgatagtgaatcatcctatcggggccaggaagagtacgttcttagctacgaacccgtgaaccaacaagaggtcaactacactaggccagtcataattctcggcccgatgaaagatagaattaatgacgacctgatcagcgaattccccgacaagtttggttcttgcgtgccccacactactaggcccaaacgcgactatgaagtcgacggccgagattatcacttcgtgacctctcgggaacagatggagaaggacattcaggaacacaagtttattgaagccggtcagtataacaatcatttgtatggaacctctgtacagtcagtgagagaagtggccgagaagggaaagcactgtatcctggatgtgtccgggaacgcgattaagcgcctccagatcgcccagctataccctatttccatattcatcaagcccaagtctatggagaatatcatggagatgaataaaagattgactgaggaacaggcccgcaagacattcgagagggccatgaaattagagcaagagttcaccgagcatttcactgcaattgtacagggcgatacgctcgaggacatttacaatcaggtgaaacagatcattgaagaacagtctgggagctatatctgggtccctgccaaagagaagctgtag

SEQ ID NO: 81382 - DNA, 2682 bp, Artificial Sequence
  derived and/or modified sequence
atgcctgtcagaaaacaggatacccagcgcgctctccatctgctagaggaataccgatctaagctctcgcaaaccgaagaccgtcagctgcgctcttccatcgaaagagtgataaatatttttcaaagcaacctgttccaggctcttattgatattcaggaattttacgaagttacacttcttgacaaccctaagtgcattgaccgctctaaaccttctgagcctattcagcctgtgaatacctgggagataagttcgcttccctcctccaccgtgacctcagaaactttgcccagctctctcagtccctccgtagaaaagtacagataccaggacgaagataccccaccccaggagcacatttctccccagatcaccaacgaagtcatcggccctgaacttgtgcatgtaagtgaaaaaaatcttagtgagatcgagaacgttcacggattcgtaagtcattcccacatctccccgatcaaagcaaatcccccgccagttttggtaaataccgactccctggagaccccaacttatgtcaatggtaccgacgccgattacgaatacgaggaaataacactggagcgaggtaattctggcctgggatttagcatcgcaggggggactgacaatccccatattggtgatgatagctctatctttattactaaaataatcaccgggggcgcagccgcccaggacggaagattgagggtgaatgactgtattctccgcgtaaatgaggtggacgtcagagacgtgacacattccaaggccgtggaagctctcaaagaggctggctcaattgtaaggctgtacgttaaaaggagaaaacccgtaagtgagaagattatggagattaagctaatcaagggccccaagggcttagggttcagtattgcaggcggagtgggaaatcagcatatacctggtgataattccatctacgttacgaaaatcatcgagggaggcgccgcacacaaagacggaaaactgcagatcggagacaagctgctggccgtgaacaacgtgtgcctcgaagaagtgacacacgaggaggctgtcacggccttaaaaaataccagcgacttcgtttacctcaaggtcgctaagcctacctcgatgtacatgaatgacggttatgcaccacccgatatcacaaacagtagttcacagcccgtggacaatcacgtaagcccaagcagtttccttggtcaaaccccagcaagtcctgcaagatactcacctgtctcaaaggctgtcctcggcgatgatgaaatcactcgcgagcctaggaaggtcgtgctgcaccggggctcaaccggacttggattcaacatcgtgggtggggaggatggggaaggcatctttatttcttttattcttgcaggagggcctgccgacttgtctggcgaactgcggaagggggatagaatcatttctgtgaattcagtggatctgcgcgccgcatcacacgaacaagccgctgcagcattgaaaaatgcggggcaggcagtaaccatcgtggcgcagtacaggcctgaagagtactcccgttttgaagctaaaattcatgatctgcgtgagcagatgatgaatagttcaatttctagcgggtctggctcgctaaggacaagtcaaaaacggtcgttatacgtccgcgctctattcgattatgataaaaccaaggacagcggactgcctagccaggggttaaattttaagtttggcgacattttacacgtgatcaacgccagtgatgatgaatggtggcaagctagacaggtcactccagacggtgagtctgatgaagtgggggtgatccccagcaaacggcgcgtagaaaagaaggaacgagccaggctgaagaccgtgaaattcaatagcaagacacgggataaggggcagtccttcaatgacaaacggaaaaaaaacctattctcaagaaagtttcccttttataagaataaagatcagtccgagcaggagactagtgacgccgaccagcatgtaacttccaacgcgagtgattcagaaagcagctacaggggccaggaggagtacgtcctgtcttacgagcctgttaatcaacaagaagtgaattatactaggcccgtgataatactcgggccgatgaaggaccgcattaatgacgacctcatctcggagtttcccgacaagtttggcagttgtgttcctcataccacccgacccaagcgcgactacgaggttgatggaagggactatcacttcgtcactagcagggagcagatggagaaggacattcaggagcacaagtttatcgaggcaggccaatacaacaaccatttatatggtacgtcagtccaatccgttagggaggtcgcagagaaaggaaaacattgcatcctcgatgtctcaggaaatgctatcaaaaggttacagatcgctcagctgtaccctattagtatctttatcaaacctaagtctatggaaaatatcatggagatgaacaaacggctcacggaggaacaggctaggaagacctttgaacgtgctatgaaattggaacaggagttcacagagcacttcaccgcgatcgtccaaggagatacgctcgaagatatctataaccaggtcaagcagattattgaggaacagagcgggagctatatatgggttccggccaaggagaagctctag

SEQ ID NO: 81383 - DNA, 2682 bp, Artificial Sequence
  derived and/or modified sequence
atgcctgtgaggaagcaggacacccagagggccctgcacctgctggaggagtaccgcagcaagctgagccagacagaggaccggcagctgcggagcagcattgaaagagtcatcaacatcttccagagcaacctcttccaggccctgattgacatccaggagttctatgaggtgaccctgctggacaaccccaagtgcatcgacaggagcaagcccagcgagcccatccagcctgtgaacacctgggagatcagcagcctgcccagcagcacagtgaccagcgagaccctgcccagcagcctgagccccagcgtggagaagtaccgctaccaggatgaggacaccccaccccaggagcacatcagcccccagatcaccaatgaagtcatcggccctgagctggtgcacgtgtctgagaagaacctgtctgaaattgaaaatgtgcacggctttgtgagccacagccacatcagccccatcaaggccaaccccccacctgtgctggtgaacacagacagcctggagacccccacctacgtgaatggaacagatgctgactatgaatatgaggagatcaccctggagcggggcaacagcggcctgggcttcagcattgctgggggcacagacaacccccacatcggagatgacagcagcatcttcatcaccaagatcatcactggaggagctgctgcccaggacggccgcctgcgggtgaatgactgcatcctgcgggtgaatgaggtggatgtgagagatgtgacccacagcaaggctgtggaggccctgaaggaggccggcagcatcgtgcggctgtatgtgaagaggaggaagcctgtgtctgagaagatcatggagatcaagctgatcaagggccccaagggcctgggcttcagcattgctggaggagtgggcaaccagcacatccctggggacaacagcatctacgtgaccaagatcattgaaggaggagctgcccacaaggatggcaagctgcagatcggggacaagctgctggccgtgaacaacgtgtgcctggaggaggtgacccatgaggaggccgtgacagccctgaagaacaccagtgactttgtgtacctgaaggtggccaagcccacctccatgtacatgaatgatggctacgcccccccagacatcaccaacagcagcagccagcctgtggacaaccacgtgagccccagcagcttcctgggccagaccccagccagccctgcccgctacagccctgtgtccaaggctgtgctgggagatgatgagatcacccgggagcccaggaaggtggtgctgcaccggggcagcacaggcctgggcttcaacatcgtgggcggagaagatggagagggcatcttcatctccttcatcctggccggcggccctgctgacctgagcggggagctgaggaaaggagaccgcatcatctctgtgaacagcgtggacctgcgggccgccagccatgagcaggccgctgctgccctgaagaatgccggccaggccgtgaccatcgtggcccagtacagacctgaggagtacagcagatttgaggccaagatccatgacctgcgggagcagatgatgaacagcagcatcagcagcggcagcggcagcctgcggaccagccagaagaggagcctgtatgtgcgggccctgtttgattatgacaagaccaaggacagcggcctgcccagccagggcctgaacttcaagtttggagacatcctgcacgtgatcaatgccagtgatgatgagtggtggcaggcccggcaggtgaccccagatggagagagtgatgaggtgggcgtcatccccagcaagagaagagtggagaagaaggagcgggcccggctgaagacagtgaagttcaacagcaagacccgggacaagggccagagcttcaatgacaagaggaagaagaacctcttcagcaggaagttccccttctacaagaacaaggaccagagcgagcaggagaccagtgatgctgaccagcacgtgaccagcaatgccagtgacagcgagagcagctaccggggccaggaggagtatgtgctgtcctatgagcctgtgaaccagcaggaggtgaactacaccaggcctgtgatcatcctgggccccatgaaggaccgcatcaatgatgacctgatcagcgagttcccagacaagtttggcagctgtgtgccccacaccacccggcccaagagggactatgaggtggatggccgggactaccactttgtgaccagccgggagcagatggagaaggacatccaggagcacaagttcatcgaggccggccagtacaacaaccacctgtatggcacctctgtgcagagcgtgcgggaggtggccgagaagggcaagcactgcatcctggatgtgtctggaaatgccatcaagaggctgcagatcgcccagctgtaccccatcagcatcttcatcaagcccaagtccatggagaacatcatggagatgaacaagaggctgacagaggagcaggccaggaagacctttgagcgggccatgaagctggagcaggagttcacagagcacttcaccgccatcgtgcagggcgacaccctggaggacatctacaaccaggtgaagcagatcatcgaggagcagagcggcagctacatctgggtgcctgccaaggagaagctgtag

SEQ ID NO: 81384 - DNA, 2682 bp, Artificial Sequence
  derived and/or modified sequence
atgcccgtgcggaagcaggacacccagcgggccctgcacctgctggaagagtatagaagtaagctgtcacaaaccgaagacaggcagctgcggagtagtatcgaaagagtcattaatatttttcagagtaatctgtttcaggctctcattgacatccaggagttctatgaggttacgctactggataatcccaaatgtatcgacaggtcaaagccctccgaacctatccagcccgtcaacacttgggaaatcagttctttgcctagtagcactgtcacctccgagacactgcccagcagcctaagccctagcgtggaaaaataccggtaccaagacgaggatacacctccacaggagcatatcagccctcaaatcactaacgaagtcattgggcctgaattggtgcacgtgagcgagaaaaatcttagcgaaattgagaatgtccacggcttcgtaagtcatagccatatctcccccatcaaggctaaccctccgcctgtactcgttaatacagactcactggagactcctacctatgtgaatgggacagatgcagactacgaatatgaggaaataacgttagagcggggaaattctggcctcggcttctctattgccggaggcaccgacaatccacacatcggggatgactctagtatcttcattacaaaaataatcaccggtggagccgccgctcaggacggcagacttcgagtcaatgactgtattcttagggtgaatgaagttgacgttcgggacgtaacgcactccaaggctgtcgaggcgttaaaagaggcgggctctatcgtccggctttacgtcaagaggcgcaagcccgtttccgagaagataatggagattaagttgatcaagggaccaaagggacttgggttcagtatcgccggaggcgtgggcaaccagcatattccaggcgataacagcatttacgttacaaaaataattgagggcggcgctgctcacaaggatggtaagctccagattggcgacaagctgttagcggtcaataatgtgtgtctcgaggaggtgacacatgaggaggccgtgaccgcactgaagaacacgtcagatttcgtctacttgaaggtcgcaaagcctactagtatgtatatgaacgacggctacgccccaccagacattacaaactcctcaagccaacccgttgacaaccatgtgagtcctagcagcttcctgggccagactcccgctagccctgcccgctattccccggtgtctaaggccgttctcggcgacgatgaaataacgagggagcctcgtaaagtggttctacaccgcggatctaccggtttggggttcaatatagtaggcggagaggacggggaagggatcttcatctcttttattttggccggcgggcctgcagacctttccggtgaactcaggaagggggacagaatcataagcgttaattcagttgacttgcgggcggcctcccatgaacaggctgccgcagccctgaaaaatgcaggccaagccgtgaccatcgtcgcccagtatcggccagaagaatatagccgatttgaggcgaaaatccacgacctgagagagcagatgatgaactcaagcatatcatcaggctccggcagtcttaggacctctcaaaagcgaagtctgtacgtacgggctttgttcgattatgacaagaccaaggattccgggctgccgtcacagggcctgaacttcaaattcggtgacatactgcacgtgattaacgcctctgacgacgaatggtggcaggcccgacaggtcactccagatggggagtccgatgaggtaggagtgattcctagcaaacgtcgggtggagaaaaaggaaagggcaagattgaagaccgtgaaattcaattctaaaacaagagataagggtcagagcttcaatgataagagaaaaaagaacctgttttcaaggaaatttcctttttataaaaacaaagaccaaagcgaacaagaaacgtccgacgccgatcagcatgtgacctcgaacgccagtgattccgaaagtagctaccgtgggcaagaggaatacgtgctgtcctatgaacccgtgaatcagcaggaagtgaattacacccgccctgtcatcatcctgggccctatgaaagacaggatcaacgatgatttgatttctgaattccccgataaatttggtagttgtgtgccccatacaacgcgacccaagcgggattacgaagtcgacggccgcgattaccactttgtcacatcgagggagcagatggagaaggatattcaggagcacaagtttatcgaggccggccagtataataaccacttgtacggtacaagcgttcaatccgttcgagaagtggcggaaaaggggaagcactgtatcctggatgtaagtgggaatgcaataaagcgcttacagattgcgcagctctaccccatcagcattttcataaagcccaaatctatggaaaatattatggagatgaataaaaggctcacagaggagcaggccagaaagaccttcgaacgggctatgaaactggagcaggagtttactgagcacttcactgctatcgtgcaaggagataccttagaagacatctataatcaggtaaagcagatcatcgaagagcagtccggcagctacatctgggtccccgctaaagagaaactgtag

SEQ ID NO: 81385 - DNA, 2682 bp, Artificial Sequence
  derived and/or modified sequence
atgcccgtgcggaagcaggacacccagcgggccctgcacctgctggaagagtatcgaagcaaactgagtcagacggaagatcggcagttgagatcatctatcgagcgcgtgatcaacatatttcagagcaacctttttcaggcacttatcgacattcaggagttctacgaagtaacactccttgacaacccaaaatgcatcgatagatctaaaccatctgagccgatccagccagttaacacctgggaaatatcttcactgccatccagcaccgtgacatccgaaacactgccatcatcattaagcccctcagtcgaaaagtacagataccaggacgaagacacccctccccaggaacacatttctcctcagattaccaatgaagtcatcggaccggaactggtccacgtgtccgaaaagaacctgagtgaaatcgaaaatgtgcacggattcgtctcacactcccatatttcacctatcaaagccaatcctccccccgtactggttaacacggattcactggagacccctacatatgtcaacggcactgatgccgactacgaatacgaggagatcactcttgagcgaggaaatagtggtttgggctttagtattgccggcgggacagacaatccccacatcggagacgactcttccatatttatcacaaaaatcatcactggcggagccgcggctcaagatgggcgcttgcgtgtgaacgattgtatacttcgagtgaacgaagtggacgtaagggacgtgacacatagtaaagctgtggaggccctgaaagaagccggctctattgttagactgtatgtgaagagacggaaacctgtgagcgagaagatcatggagatcaagctcatcaaaggccctaaaggcctcgggtttagcatagctggcggcgttggaaatcagcacattcccggagacaatagcatctacgttacgaaaataatcgagggcggtgccgctcataaggatgggaagctccagataggcgacaagctgctcgctgtcaataacgtgtgcttggaggaagtgactcacgaggaagcagtgacagccctcaagaacacatccgattttgtctacctgaaggtggccaagcctacatccatgtacatgaatgacggctacgcaccaccggacatcactaatagctctagccagcccgtggacaaccatgtgtccccctcctcgttccttggacagaccccagcctcacctgcccgctactcacccgtgagcaaggccgtcctcggcgacgatgagatcaccagagaaccacggaaagttgttctccatcgcggaagtacggggctgggattcaatatcgtgggtggcgaagatggggaggggatttttataagctttatcctagccggagggccagccgacctcagtggggagctgaggaagggcgacagaatcattagcgttaactctgtagatcttagggccgcgtctcatgaacaagcagcagccgctcttaagaacgctggtcaggcagtcactatcgtggcacagtataggccagaagaatactctagatttgaggctaagattcacgatctgagagagcagatgatgaattcctccatttcctcaggaagtggctccctgcgcacctctcagaagaggtcgctttacgtacgggcactatttgattacgataagacaaaggactcaggccttccctcacagggactcaactttaagtttggggatattctgcatgtgatcaacgccagcgacgatgaatggtggcaggcacggcaggttacgccggatggggagagtgacgaggtgggcgtgatacctagtaaacggcgggtggagaagaaagagcgcgctagattaaagacagtaaaatttaactctaaaacccgggataaaggccagtcattcaacgataaacgaaagaagaacctgttctcccgtaagttccccttctataagaataaagaccagtcagagcaggaaaccagcgacgccgatcaacacgtgacaagtaatgccagcgattcggagtctagttaccgcggtcaagaagagtatgtcctatcttatgagccagtcaatcagcaggaggtgaattatacccggccggtgatcatattggggcctatgaaagatcgaataaatgacgacctgatctcagaattcccagataagttcggcagctgtgtcccacacaccactcgacctaaaagagattacgaagtcgatggcagagactaccattttgtcacaagccgcgaacagatggaaaaagatattcaagaacacaagtttatcgaagccggccagtacaacaatcatttgtatggaacctccgtacagtctgtgagagaggtcgccgagaagggcaagcattgcatcttagacgtgagtgggaatgcaataaagaggctccagatcgctcaattatatcctattagcattttcatcaaacccaagagcatggagaatattatggaaatgaataagaggctgactgaggagcaggcgcgcaagacgttcgagcgggctatgaaactggagcaggagtttacagagcatttcaccgcaatcgtgcagggagataccctggaagacatctacaaccaggttaaacagatcattgaggagcagtctggcagctacatatgggtgcccgccaaggaaaagttgtag

SEQ ID NO: 81386 - DNA, 2682 bp, Artificial Sequence
  derived and/or modified sequence
atgcccgtacggaagcaggacacacagcgggctctacacctcttggaggaataccgctcgaagctgtctcaaacagaggatagacagctgagatcctcaattgaaagggttattaacatcttccagagcaatctgttccaggcgctgatcgatattcaagaattctacgaggttactttgcttgataatcccaaatgtattgacaggagcaagccaagtgaacctatacagcctgtgaacacatgggaaattagcagcctcccgtcgtccactgtaactagtgaaaccctcccaagtagtcttagcccctcagtggagaagtaccgctatcaggacgaagacacccccccacaggagcacatttccccacaaatcaccaatgaagttattggacctgaactcgtccatgtgagcgaaaaaaacctctccgagattgaaaacgttcatggcttcgtcagccatagccacatctcacccatcaaggctaaccctcctcccgtgctggtcaataccgattcactcgaaacgcccacatacgttaacggtaccgatgccgactatgaatacgaggaaattacattggagagaggaaactctggcttaggtttcagcattgccggaggtaccgataatccccacataggtgatgactcctctatctttatcactaagattatcaccggaggtgccgctgcacaagacggcagactgcgagttaacgactgcatactgagagtgaatgaggtggatgtgcgggacgtgacccattccaaggcggtcgaggcgctgaaagaagcaggttctatcgtcagactgtatgtgaaaagaaggaagcctgtttctgagaagattatggagatcaaactgatcaaggggccaaaaggtcttgggtttagcatagcaggcggtgtcggcaaccagcacatccccggagacaattcaatctacgtaactaagatcatcgagggcggtgccgctcacaaggatggcaagttgcagattggagacaagttactggctgtgaataatgtttgcctggaggaggtcacgcacgaagaggcagtcacagccctgaaaaacaccagcgattttgtttatcttaaagttgcaaagcccacaagcatgtatatgaatgatgggtacgccccacctgatatcaccaactctagctcacaacctgtggataaccacgtgagcccatcttcatttttaggtcagacccctgcttcccctgcaaggtactcacccgtgagtaaagccgttctcggagatgatgagatcacccgagagccgaggaaagtcgtgctgcacagaggatcaaccgggctgggatttaacattgtcggtggagaggacggagaaggaatcttcatctccttcattcttgcgggtggaccagccgatctgagtggagagctacgcaagggggaccgaattatctctgttaactctgtcgatctcagagccgcttcacacgaacaggctgctgcagctttgaagaatgcgggtcaggccgttacaatcgttgcccaataccggcctgaagagtacagtcgattcgaggcaaagatccacgacctgagggaacagatgatgaatagcagcatatcctccggctctgggtctcttagaactagccagaaacggtctctctatgtgagggcactgtttgactacgataagaccaaagattcagggctgccaagtcagggactgaatttcaaattcggcgacatcctccacgtgatcaacgctagtgatgatgagtggtggcaagctagacaggtaacccctgatggcgagtctgacgaagtcggagtcattccctcaaagcgtcgggtcgaaaaaaaagaacgtgctcggctgaaaaccgtcaagtttaattccaagacgcgtgataagggtcagagcttcaacgataagcgcaaaaagaacctgttttccaggaagtttcctttctacaagaataaggaccagagcgaacaggaaacctctgatgctgaccagcacgtgactagtaatgccagcgacagtgaatcttcatacaggggccaggaggagtacgttttatcttacgagcctgtgaaccaacaagaggtcaattacaccaggccagtcatcattttagggccaatgaaagatagaatcaatgacgacctaatctctgagttcccagataagtttgggagctgcgtgccccacaccactagaccgaaaagagactatgaggtggacgggagagattaccactttgttactagcagggagcagatggaaaaggatattcaggagcacaaatttattgaggccggtcagtataacaaccacctttacggtacaagcgtgcaatcagttcgcgaggttgccgagaagggaaaacattgcatcctggatgtgtctggcaacgccattaaacggttgcagattgcccagctttaccctatctcaatcttcatcaaaccgaagagtatggaaaatatcatggagatgaataagaggcttacggaggaacaggcacggaagacatttgaacgagctatgaaattagagcaagagttcacagaacactttacagccatcgttcagggagatacattggaggatatttataaccaggtgaagcagatcatcgaggagcagtctggcagttacatctgggtccccgcaaaagaaaagctctag

SEQ ID NO: 81387 - DNA, 2682 bp, Artificial Sequence
  derived and/or modified sequence
atgcccgtgcgaaagcaggacacccagagggccctgcatctgctggaagaatatcgaagtaaattgagccagacggaagataggcaattgcgaagctccatagaacgagtaatcaatatcttccagtccaatttgtttcaggccctcatcgatattcaggagttctatgaagtcactctcttggacaatccgaagtgcattgataggtctaaaccatctgagccaattcagcccgtgaatacttgggagatttcatccctaccctctagcactgtcacatcagaaactttaccaagcagcttgagtcctagcgttgagaagtaccgttaccaggacgaggatactcctccgcaagagcatataagcccgcaaatcaccaacgaagtgattgggccagagttggtgcatgtgtctgagaagaacctgtccgaaatcgagaacgtgcatggatttgtgtctcatagccacatctctccaattaaagcgaaccccccaccagtgcttgttaataccgactcacttgaaactccaacctacgtgaatggtacagatgcggactacgagtatgaagagataaccctcgagagaggtaatagtgggttgggattcagcatcgccggaggcacagataacccacacatcggagacgactcttctatctttatcacgaaaatcataacaggaggagccgcagctcaggacggaaggctgcgggtgaatgactgtattttgagggtaaatgaggtggacgtgagagatgtcacacactcgaaagctgtggaggctcttaaagaggctggcagtatcgtgcgcctgtacgtgaagcggaggaaacctgtgagtgagaagattatggaaattaagttaattaaaggaccaaaggggctcggattttcaatcgctgggggtgtggggaatcagcacattcctggcgacaattcaatttatgtgaccaagatcatcgaggggggagcagcccacaaagatggaaagcttcaaatcggcgacaagttactggccgtcaacaacgtttgtctggaggaagtgacccacgaagaagcagtcacagccctcaaaaataccagcgactttgtttacctgaaggtagcgaagcccacctccatgtatatgaacgatgggtatgcgcctccggacatcacaaatagtagctctcagcctgtggacaaccacgtctcaccctcctctttcttaggacagaccccagccagcccagcgaggtactctccagtatctaaggccgtgttgggtgacgatgagattacacgggagcctcgaaaagtggtgctgcataggggctccaccggactcggttttaatattgttgggggagaggacggagagggcattttcatctccttcatccttgccggaggtccagcggacttgtcaggagagttgagaaagggggaccgcatcattagtgtgaattcagtggatctgcgcgctgcctcccacgagcaggcagccgcagctctcaagaacgccggacaggccgttaccatcgtagcccagtaccggccagaggagtactcacgctttgaggctaagattcacgacctgcgcgagcaaatgatgaattccagcatttctagcggctctggatctctgcgtactagtcagaaaagaagcctgtacgtcagggccctgtttgattatgacaaaactaaagactctgggctgccaagccaggggctgaactttaagtttggagatatactgcatgtgatcaacgctagtgacgacgaatggtggcaggcacggcaggttacacccgacggtgagagcgacgaggttggggtgatccccagcaaacggagagtggaaaagaaggagcgggctaggctcaagaccgtaaaatttaacagcaagaccagggataaagggcaatcattcaacgataaaagaaaaaagaacctcttttcccggaagttccctttttacaaaaacaaggaccagtccgaacaggagacctccgatgccgatcagcacgtcacatccaacgcctccgacagcgagtctagctacagaggccaggaggaatatgtcctgagttacgaacccgtaaaccaacaagaggtcaattacactcgtcccgttatcatcttgggcccaatgaaggacagaatcaacgacgacctgatcagtgaattccccgataaatttggtagttgtgtaccacacaccactcgccctaagagggactacgaggtagatggccgagattaccacttcgtgacgagtcgtgagcagatggagaaagacatccaagagcataaattcatcgaagcagggcagtataataaccacctttacggaaccagtgtccagtccgtgagggaagtcgctgaaaaaggaaagcactgtattctagacgtgagcggaaatgcaatcaaacggctccagatagcccaactctacccaattagcatattcatcaaacccaaatccatggagaacatcatggaaatgaataagcgtctgaccgaggaacaggcacgcaagactttcgaaagagcaatgaaactagaacaagaattcactgaacattttacggcgattgtccaaggagacaccctcgaagatatatacaaccaagtgaaacagatcattgaggagcagagcggttcatacatctgggttcctgccaaggagaaactctag

SEQ ID NO: 81388 - DNA, 2682 bp, Artificial Sequence
  derived and/or modified sequence
atgcccgtgagaaagcaggacacccagagagccctgcacctgctggaggagtacagaagcaagctgagccagaccgaggacagacagctgagaagcagcatcgagagagtgatcaacatcttccagagcaacctgttccaggccctgatcgacatccaggagttctacgaggtgaccctgctggacaaccccaagtgcatcgacagaagcaagcccagcgagcccatccagcccgtgaacacctgggagatcagcagcctgcccagcagcaccgtgaccagcgagaccctgcccagcagcctgagccccagcgtggagaagtacagataccaggacgaggacacccccccccaggagcacatcagcccccagatcaccaacgaggtgatcggccccgagctggtgcacgtgagcgagaagaacctgagcgagatcgagaacgtgcacggcttcgtgagccacagccacatcagccccatcaaggccaaccccccccccgtgctggtgaacaccgacagcctggagacccccacctacgtgaacggcaccgacgccgactacgagtacgaggagatcaccctggagagaggcaacagcggcctgggcttcagcatcgccggcggcaccgacaacccccacatcggcgacgacagcagcatcttcatcaccaagatcatcaccggcggcgccgccgcccaggacggcagactgagagtgaacgactgcatcctgagagtgaacgaggtggacgtgagagacgtgacccacagcaaggccgtggaggccctgaaggaggccggcagcatcgtgagactgtacgtgaagagaagaaagcccgtgagcgagaagatcatggagatcaagctgatcaagggccccaagggcctgggcttcagcatcgccggcggcgtgggcaaccagcacatccccggcgacaacagcatctacgtgaccaagatcatcgagggcggcgccgcccacaaggacggcaagctgcagatcggcgacaagctgctggccgtgaacaacgtgtgcctggaggaggtgacccacgaggaggccgtgaccgccctgaagaacaccagcgacttcgtgtacctgaaggtggccaagcccaccagcatgtacatgaacgacggctacgccccccccgacatcaccaacagcagcagccagcccgtggacaaccacgtgagccccagcagcttcctgggccagacccccgccagccccgccagatacagccccgtgagcaaggccgtgctgggcgacgacgagatcaccagagagcccagaaaggtggtgctgcacagaggcagcaccggcctgggcttcaacatcgtgggcggcgaggacggcgagggcatcttcatcagcttcatcctggccggcggccccgccgacctgagcggcgagctgagaaagggcgacagaatcatcagcgtgaacagcgtggacctgagagccgccagccacgagcaggccgccgccgccctgaagaacgccggccaggccgtgaccatcgtggcccagtacagacccgaggagtacagcagattcgaggccaagatccacgacctgagagagcagatgatgaacagcagcatcagcagcggcagcggcagcctgagaaccagccagaagagaagcctgtacgtgagagccctgttcgactacgacaagaccaaggacagcggcctgcccagccagggcctgaacttcaagttcggcgacatcctgcacgtgatcaacgccagcgacgacgagtggtggcaggccagacaggtgacccccgacggcgagagcgacgaggtgggcgtgatccccagcaagagaagagtggagaagaaggagagagccagactgaagaccgtgaagttcaacagcaagaccagagacaagggccagagcttcaacgacaagagaaagaagaacctgttcagcagaaagttccccttctacaagaacaaggaccagagcgagcaggagaccagcgacgccgaccagcacgtgaccagcaacgccagcgacagcgagagcagctacagaggccaggaggagtacgtgctgagctacgagcccgtgaaccagcaggaggtgaactacaccagacccgtgatcatcctgggccccatgaaggacagaatcaacgacgacctgatcagcgagttccccgacaagttcggcagctgcgtgccccacaccaccagacccaagagagactacgaggtggacggcagagactaccacttcgtgaccagcagagagcagatggagaaggacatccaggagcacaagttcatcgaggccggccagtacaacaaccacctgtacggcaccagcgtgcagagcgtgagagaggtggccgagaagggcaagcactgcatcctggacgtgagcggcaacgccatcaagagactgcagatcgcccagctgtaccccatcagcatcttcatcaagcccaagagcatggagaacatcatggagatgaacaagagactgaccgaggagcaggccagaaagaccttcgagagagccatgaagctggagcaggagttcaccgagcacttcaccgccatcgtgcagggcgacaccctggaggacatctacaaccaggtgaagcagatcatcgaggagcagagcggcagctacatctgggtgcccgccaaggagaagctgtag

SEQ ID NO: 81389 - DNA, 4935 bp, Artificial Sequence
  derived and/or modified sequence
gttggaaacggcactgctgagtgaggttgaggggtgtctcggtatgtgcgccttggatctggtgtaggcgaggtcacgcctctcttcagacagcccgagccttcccggcctggcgcgtttagttcggaactgcgggacgcgccggtgggctagggcaaggtgtgtgccctcttcctgattctggagaaaaatgccggtccggaagcaagatacccagagagcattgcaccttttggaggaatatcgttcaaaactaagccaaactgaagacagacagctcagaagttccatagaacgggttattaacatatttcagagcaacctctttcaggctttaatagatattcaagaattttatgaagtgaccttactggataatccaaaatgtatagatcgttcaaagccgtctgaaccaattcaacctgtgaatacttgggagatttccagccttccaagctctactgtgacttcagagacactgccaagcagccttagccctagtgtagagaaatacaggtatcaggatgaagatacacctcctcaagagcatatttccccacaaatcacaaatgaagtgataggtccagaattggttcatgtctcagagaagaacttatcagagattgagaatgtccatggatttgtttctcattctcatatttcaccaataaaggcaaatcctcccccagtactggtcaacacagatagcttggaaacaccaacttacgttaatggcacagatgcagattatgaatatgaagaaatcacacttgaaaggggaaattcagggcttggtttcagcattgcaggaggtacggacaacccacacattggagatgactcaagtattttcattaccaaaattatcacagggggagcagccgcccaagatggaagattgcgggtcaatgactgtatattacgagtaaatgaagtagatgttcgtgatgtaacacatagcaaagcagttgaagcgttgaaagaagcagggtctattgtacgcttgtatgtaaaaagaaggaaaccagtgtcagaaaaaataatggaaataaagctcattaaaggtcctaaaggtcttgggtttagcattgctggaggtgttggaaatcagcatattcctggggataatagcatctatgtaaccaaaataattgaaggaggtgcagcacataaggatggcaaacttcagattggagataaacttttagcagtgaataacgtatgtttagaagaagttactcatgaagaagcagtaactgccttaaagaacacatctgattttgtttatttgaaagtggcaaaacccacaagtatgtatatgaatgatggctatgcaccacctgatatcaccaactcttcttctcagcctgttgataaccatgttagcccatcttccttcttgggccagacaccagcatctccagccagatactccccagtttctaaagcagtacttggagatgatgaaattacaagggaacctagaaaagttgttcttcatcgtggctcaacgggccttggtttcaacattgtaggaggagaagatggagaaggaatatttatttcctttatcttagccggaggacctgctgatctaagtggagagctcagaaaaggagatcgtattatatcggtaaacagtgttgacctcagagctgctagtcatgagcaggcagcagctgcattgaaaaatgctggccaggctgtcacaattgttgcacaatatcgacctgaagaatacagtcgttttgaagctaaaatacatgatttacgggagcagatgatgaatagtagtattagttcagggtcaggttctcttcgaactagccagaagcgatccctctatgtcagagccctttttgattatgacaagactaaagacagtgggcttcccagtcagggactgaacttcaaatttggagatatcctccatgttattaatgcttctgatgatgaatggtggcaagccaggcaggttacaccagatggtgagagcgatgaggtcggagtgattcccagtaaacgcagagttgagaagaaagaacgagcccgattaaaaacagtgaaattcaattctaaaacgagagataaagggcagtcattcaatgacaagcgtaaaaagaacctcttttcccgaaaattccccttctacaagaacaaggaccagagtgagcaggaaacaagtgatgctgaccagcatgtaacttctaatgccagcgatagtgaaagtagttaccgtggtcaagaagaatacgtcttatcttatgaaccagtgaatcaacaagaagttaattatactcgaccagtgatcatattgggacctatgaaagacaggataaatgatgacttgatctcagaatttcctgacaaatttggatcctgtgttcctcatacaactagaccaaaacgagattatgaggtagatggaagagattatcattttgtgacttcaagagagcagatggaaaaagatatccaggaacataaattcattgaagctggccagtataacaatcatctatatggaacaagtgttcagtctgtacgagaagtagcagaaaagggcaaacactgtatccttgatgtgtctggaaatgccataaagagattacagattgcacagctttaccctatctccatttttattaaacccaaatccatggaaaatatcatggaaatgaataagcgtctaacagaagaacaagccagaaaaacatttgagagagccatgaaactggaacaggagtttactgaacatttcacagctattgtacagggggatacgctggaagacatttacaaccaagtgaaacagatcatagaagaacaatctggttcttacatctgggttccggcaaaagaaaagctatgaaaactcatgtttctctgtttctcttttccacaattccattttctttggcatctctttgccctttcctctggagtctttcttgagtactgatttcatgttgaattgtatcccacacatcatggtctgcagcttctttttcacatgtagtgtctccttcaagttacatcgtgtgtattatttaatgtcactattggttagtggccatttttcagaactgaagatggaatggcctgaccagctattaagaacgtggggagacgcagaaattgtggtaaaattccttaatgtttaagggaaagtaactttaagagatttttggaaaagctttatatacattcttttcaaatttcagtacaaatgaaaaagtggttttaatcagtgatttagtagactttgagcaactgtgcacgcttcagtttaatagcatggtttggccagtgtattactctcaagtccttttctcaatcaacttctatcatcaaagcaattgtttcattatagataaataaggacattttttaatttaaaaattcatgtctgagttgactttcataagggatttcattttttcctcaacattcttaaagccttttagtatttgacggttcttttttcccaggacatttgctaggaataacaacgtttcaatgtttttaatctacttgagcaacactatcgtgtcttacaaaagttgttcatatgtaaatgatcatcacatttcgtgaattgaggccatgttcaggtgctaaggaagttcgccttttacacagaagattgagaaaatttcctagatataaatacagataaatcagacgttacagtggtgacgtagtaaccatcatggcaatggaaaggagtccaattcatagcctaaaacttcaaatgtattcttaggagtcagattttactgaatattttacccacaatagctgcctattttgttataataaaatatatataaatatatatataaaactttctttaaactgtaactatgggaattattttctttacatagttgcgcacacacacaaacatatatatatatttaaaatatattttgtttcttttgccacctactcctaactttttgtttggtttttaaattaaatattaattgaatagacttatcttccttaatcatgtgaactgaaaatgggggcatggtggtcatgaggaggaaacatttagggaaattagattataagtaaaagtgtgggcatattctcctcttttctacaaaggttttcaaatggttcctgaggttttttgttgttgtccgtgttgttactgttgttcttgtcatcaggtttgattttggtccttgccctttccttctagttctccttttattaataggaaggcaggcaaaagccccatttatgtgtgtgttttcccctcagacagctttcatccactgctctgcactagaattgcacaaatcttcatggtgagcaattttaagaaatgttagtgaaaggtagaaattatttcacaaatcagtttctctggtccttcatattaataataatatttggcttcccattgctctttggagttgtttattaaatatgtgtttttgacaacctcctcattagtttcttaaatgagtactggtttgtaaagaattatcaacattatccattccatttatgaagaagaggagaacagctaataaactgtattgtaaaatccatatgttaagtgtgtcttgaattttgaaagaaaaaatatattttgcaagctaacattttcttgaaacaatttgaggcatcatgtaacttataaccgaatccaagagccgttaggcagcagagtgtgttaccacattgaaatacacagtgctgctgttagactaaatgtcgtaggttgttaaccacatagaaacacactagtatgaagaaaactgttgtaaaatctcaagagcttcagaaactgccttacaagaccgcagcataagctattttgaagtatttaccaaatagtcacatgttgtaaaatatcaagtggttataaaaggatgccatttatatattaaaatttacataacattgttttctgga

SEQ ID NO: 81390 - DNA, 2682 bp, Artificial Sequence
  derived and/or modified sequence
atgccggtccggaagcaagatacccagagagcattgcaccttttggaggaatatcgttcaaaactaagccaaactgaagacagacagctcagaagttccatagaacgggttattaacatatttcagagcaacctctttcaggctttaatagatattcaagaattttatgaagtgaccttactggataatccaaaatgtatagatcgttcaaagccgtctgaaccaattcaacctgtgaatacttgggagatttccagccttccaagctctactgtgacttcagagacactgccaagcagccttagccctagtgtagagaaatacaggtatcaggatgaagatacacctcctcaagagcatatttccccacaaatcacaaatgaagtgataggtccagaattggttcatgtctcagagaagaacttatcagagattgagaatgtccatggatttgtttctcattctcatatttcaccaataaaggcaaatcctcccccagtactggtcaacacagatagcttggaaacaccaacttacgttaatggcacagatgcagattatgaatatgaagaaatcacacttgaaaggggaaattcagggcttggtttcagcattgcaggaggtacggacaacccacacattggagatgactcaagtattttcattaccaaaattatcacagggggagcagccgcccaagatggaagattgcgggtcaatgactgtatattacgagtaaatgaagtagatgttcgtgatgtaacacatagcaaagcagttgaagcgttgaaagaagcagggtctattgtacgcttgtatgtaaaaagaaggaaaccagtgtcagaaaaaataatggaaataaagctcattaaaggtcctaaaggtcttgggtttagcattgctggaggtgttggaaatcagcatattcctggggataatagcatctatgtaaccaaaataattgaaggaggtgcagcacataaggatggcaaacttcagattggagataaacttttagcagtgaataacgtatgtttagaagaagttactcatgaagaagcagtaactgccttaaagaacacatctgattttgtttatttgaaagtggcaaaacccacaagtatgtatatgaatgatggctatgcaccacctgatatcaccaactcttcttctcagcctgttgataaccatgttagcccatcttccttcttgggccagacaccagcatctccagccagatactccccagtttctaaagcagtacttggagatgatgaaattacaagggaacctagaaaagttgttcttcatcgtggctcaacgggccttggtttcaacattgtaggaggagaagatggagaaggaatatttatttcctttatcttagccggaggacctgctgatctaagtggagagctcagaaaaggagatcgtattatatcggtaaacagtgttgacctcagagctgctagtcatgagcaggcagcagctgcattgaaaaatgctggccaggctgtcacaattgttgcacaatatcgacctgaagaatacagtcgttttgaagctaaaatacatgatttacgggagcagatgatgaatagtagtattagttcagggtcaggttctcttcgaactagccagaagcgatccctctatgtcagagccctttttgattatgacaagactaaagacagtgggcttcccagtcagggactgaacttcaaatttggagatatcctccatgttattaatgcttctgatgatgaatggtggcaagccaggcaggttacaccagatggtgagagcgatgaggtcggagtgattcccagtaaacgcagagttgagaagaaagaacgagcccgattaaaaacagtgaaattcaattctaaaacgagagataaagggcagtcattcaatgacaagcgtaaaaagaacctcttttcccgaaaattccccttctacaagaacaaggaccagagtgagcaggaaacaagtgatgctgaccagcatgtaacttctaatgccagcgatagtgaaagtagttaccgtggtcaagaagaatacgtcttatcttatgaaccagtgaatcaacaagaagttaattatactcgaccagtgatcatattgggacctatgaaagacaggataaatgatgacttgatctcagaatttcctgacaaatttggatcctgtgttcctcatacaactagaccaaaacgagattatgaggtagatggaagagattatcattttgtgacttcaagagagcagatggaaaaagatatccaggaacataaattcattgaagctggccagtataacaatcatctatatggaacaagtgttcagtctgtacgagaagtagcagaaaagggcaaacactgtatccttgatgtgtctggaaatgccataaagagattacagattgcacagctttaccctatctccatttttattaaacccaaatccatggaaaatatcatggaaatgaataagcgtctaacagaagaacaagccagaaaaacatttgagagagccatgaaactggaacaggagtttactgaacatttcacagctattgtacagggggatacgctggaagacatttacaaccaagtgaaacagatcatagaagaacaatctggttcttacatctgggttccggcaaaagaaaagctatga

SEQ ID NO: 81391 - protein, 800 aa, Artificial Sequence
  derived and/or modified sequence
MNYIFGNNTLLYSRGSRGGNTSSSHGSAGPKQKHWAKKGSSDELQAEPEPSRWQQIVAFFTRRHSFIDCISVATSSTQANPPPVLVNTDSLETPTYVNGTDADYEYEEITLERGNSGLGFSIAGGTDNPHIGDDSSIFITKIITGGAAAQDGRLRVNDCILRVNEVDVRDVTHSKAVEALKEAGSIVRLYVKRRKPVSEKIMEIKLIKGPKGLGFSIAGGVGNQHIPGDNSIYVTKIIEGGAAHKDGKLQIGDKLLAVNNVCLEEVTHEEAVTALKNTSDFVYLKVAKPTSMYMNDGYAPPDITNSSSQPVDNHVSPSSFLGQTPASPARYSPVSKAVLGDDEITREPRKVVLHRGSTGLGFNIVGGEDGEGIFISFILAGGPADLSGELRKGDRIISVNSVDLRAASHEQAAAALKNAGQAVTIVAQYRPEEYSRFEAKIHDLREQMMNSSISSGSGSLRTSQKRSLYVRALFDYDKTKDSGLPSQGLNFKFGDILHVINASDDEWWQARQVTPDGESDEVGVIPSKRRVEKKERARLKTVKFNSKTRDKGEIPDDMGSKGLKHVTSNASDSESSYLILITDEYGCSKGGQEEYVLSYEPVNQQEVNYTRPVIILGPMKDRINDDLISEFPDKFGSCVPHTTRPKRDYEVDGRDYHFVTSREQMEKDIQEHKFIEAGQYNNHLYGTSVQSVREVAEKGKHCILDVSGNAIKRLQIAQLYPISIFIKPKSMENIMEMNKRLTEEQARKTFERAMKLEQEFTEHFTAIVQGDTLEDIYNQVKQIIEEQSGSYIWVPAKEKL

SEQ ID NO: 81392 - DNA, 2403 bp, Artificial Sequence
  derived and/or modified sequence
atgaattacattttcggtaataatactcttctgtattctcgcggctcacgggggggaaatacatcctccagccacggctccgctgggcccaaacagaagcattgggctaaaaagggtagctcagatgagctccaggcagagccagaaccttcacgttggcagcagattgtggctttctttactaggagacactcgttcatcgattgcattagtgttgcaaccagctctactcaggccaatccaccccctgtattagtgaatacagactccctggagacacccacctatgtcaacggcactgacgcggattatgagtatgaagaaattacgctggagcggggtaactccggcctggggttcagcattgccggcggcaccgacaacccgcacatcggagacgatagttctatcttcataaccaaaatcatcacagggggcgccgccgcacaggacgggagattgagagtcaatgactgcatccttagggtgaatgaagttgatgttcgagacgtaacccactccaaggccgttgaggctttgaaagaggccggaagtattgtgcggctgtacgtcaagagaagaaagcccgtgagtgaaaagattatggagattaagttaataaagggaccaaagggactgggattcagtatcgccggtggcgttggcaatcaacatattcccggcgataatagcatctacgtgacaaaaattatcgaaggcggagcggcccacaaggatggcaaactccaaatcggggataagcttctggccgtcaacaatgtgtgcctggaagaggttacacacgaggaagccgtcaccgccctcaaaaatacatcagacttcgtgtatcttaaagtcgccaagccaaccagcatgtacatgaacgacggctatgcaccacccgatattaccaacagcagcagtcaacctgttgataaccacgtgtccccctccagtttcctggggcagaccccagcctctccggcaaggtatagccctgtttctaaagcggtgctgggggacgatgagatcactcgagagccgcgaaaggtggtgctgcacagaggatcaaccggtctgggctttaacatcgtcggtggcgaagatggggaagggatttttatttcattcatcctggctggtgggcccgctgacctctccggcgaactccggaagggggatagaattatctccgtgaattccgtggatctacgcgccgcttcacatgagcaggctgctgctgcacttaagaatgccggccaagccgtaacaatagttgctcagtatcgccccgaagaatacagcagattcgaggccaaaattcacgacttacgggaacagatgatgaactctagcatctcaagcggatcagggtcactgcgcactagccaaaagcggtcgttatatgtgcgggctctttttgactacgacaagaccaaagactccgggctcccttctcagggcctgaactttaagttcggcgacatcttacacgtcattaatgccagcgacgatgaatggtggcaggctagacaagtgactccggacggtgagtcagatgaagtgggggtcatcccttctaagcggagggtagagaagaaagaacgggctaggctgaagaccgtaaagttcaattcaaaaacacgggacaaaggggaaattcctgatgacatgggatctaaggggctgaagcatgtcacctcaaatgcaagcgattccgagtccagctatcttatacttattaccgatgaatacggctgctccaagggcgggcaagaggaatatgtattgagctatgaacctgtgaaccagcaggaagtcaactacacaaggcccgtgatcattctggggccaatgaaggaccgaatcaatgatgatctcatttctgaattcccggacaagtttgggtcatgtgtgccgcataccacacgcccaaaaagggactacgaggtggatggaagagactatcattttgtgacttctagggagcagatggagaaggacattcaggagcataagttcatcgaggcgggacagtataataatcacttatatgggactagcgtccagagcgtccgggaagtcgcagaaaaggggaaacattgcatactggatgtttcaggaaatgctattaaaaggttacagattgcgcagttgtatcctatatcgatcttcatcaagcccaagtcaatggagaacatcatggagatgaataagcgcttaactgaagagcaggctcgcaagacctttgagcgtgcgatgaagctcgagcaggagtttacagagcacttcacagcaattgtgcagggagacactctggaagacatatataaccaggtgaaacagataatagaggagcagtctggttcatacatttgggtgcctgccaaggagaagctgtag

SEQ ID NO: 81393 - DNA, 2403 bp, Artificial Sequence
  derived and/or modified sequence
atgaactacatctttggaaacaacaccctgctgtacagccggggcagccggggcggcaacaccagcagcagccacggcagcgctggccccaagcagaagcactgggccaagaagggcagcagtgatgagctgcaggccgagcctgagcccagccgctggcagcagatcgtggccttcttcacccggcggcacagcttcatcgactgcatctctgtggccaccagcagcacccaggccaaccccccacctgtgctggtgaacacagacagcctggagacccccacctacgtgaatggaacagatgctgactatgaatatgaggagatcaccctggagcggggcaacagcggcctgggcttcagcattgctgggggcacagacaacccccacatcggagatgacagcagcatcttcatcaccaagatcatcaccggcggggccgccgcccaggacggccgcctgcgggtgaatgactgcatcctgcgggtgaatgaggtggatgtgagagatgtgacccacagcaaggctgtggaggccctgaaggaggccggcagcatcgtgcggctgtatgtgaagaggaggaagcctgtgtctgagaagatcatggagatcaagctgatcaagggccccaagggcctgggcttcagcattgctgggggcgtgggcaaccagcacatccctggggacaacagcatctacgtgaccaagatcatcgagggcggggccgcccacaaggatggcaagctgcagattggagacaagctgctggccgtgaacaacgtgtgcctggaggaggtgacccatgaggaggccgtgacagccctgaagaacaccagtgactttgtgtacctgaaggtggccaagcccacctccatgtacatgaatgatggctacgcccccccagacatcaccaacagcagcagccagcctgtggacaaccacgtgagccccagcagcttcctgggccagaccccagccagccctgcccgctacagccctgtgtccaaggctgtgctgggagatgatgagatcacccgggagcccaggaaggtggtgctgcaccggggcagcacaggcctgggcttcaacatcgtgggcggggaggatggagagggcatcttcatctccttcatcctggccggcggccctgctgacctgtctggagagctgaggaagggggaccgcatcatctctgtgaacagcgtggacctgcgggccgccagccatgagcaggccgccgccgccctgaagaatgccggccaggccgtgaccatcgtggcccagtacagacctgaggagtacagcagatttgaggccaagatccatgacctgcgggagcagatgatgaacagcagcatcagcagcggcagcggcagcctgcggaccagccagaagaggagcctgtatgtgcgggccctgtttgattatgacaagaccaaggacagcggcctgcccagccagggcctgaacttcaagtttggagacatcctgcacgtgatcaatgccagtgatgatgagtggtggcaggcccggcaggtgaccccagatggagagagtgatgaggtgggcgtcatccccagcaagagaagagtggagaagaaggagcgggcccggctgaagacagtgaagttcaacagcaagacccgggacaagggggagatcccagatgacatgggcagcaagggcctgaagcacgtgaccagcaatgccagtgacagcgagagcagctacctgatcctgatcacagatgaatatggctgcagcaaaggaggccaggaggagtatgtgctgtcctatgagcctgtgaaccagcaggaggtgaactacaccaggcctgtgatcatcctgggccccatgaaggaccgcatcaatgatgacctgatcagcgagttcccagacaagtttggcagctgtgtgccccacaccacccggcccaagagggactatgaggtggatggccgggactaccactttgtgaccagccgggagcagatggagaaggacatccaggagcacaagttcattgaagctggccagtacaacaaccacctgtatggcacctctgtgcagagcgtgcgggaggtggccgagaagggcaagcactgcatcctggatgtgtctggaaatgccatcaagaggctgcagatcgcccagctgtaccccatcagcatcttcatcaagcccaagtccatggagaacatcatggagatgaacaagaggctgacagaggagcaggccaggaagacctttgagcgggccatgaagctggagcaggagttcacagagcacttcaccgccatcgtgcagggcgacaccctggaggacatctacaaccaggtgaagcagatcatcgaggagcagagcggcagctacatctgggtgcctgccaaggagaagctgtag

SEQ ID NO: 81394 - DNA, 2403 bp, Artificial Sequence
  derived and/or modified sequence
atgaactacatcttcggcaacaacaccctgctgtacagccggggctcaagaggaggtaacacttcttcttcccatggctcagcgggccccaagcagaaacactgggctaagaagggatcttccgatgaactgcaggcggagcccgagcccagtaggtggcagcagatagtggcgttttttactcgtcggcattccttcattgattgcattagtgtcgccacctcttccacccaggctaatccaccccccgttctggtcaacactgattccctggaaacccccacctatgtgaacggcaccgatgcggactacgaatatgaggaaataacccttgagcgaggaaatagcgggctgggcttctctatcgctggcggtacggacaaccctcatatcggcgatgacagctcaattttcattaccaaaattatcaccgggggagctgctgcccaagacggtagactgagagtaaatgattgcatcctgagggtaaacgaggtggacgttagagacgttacgcactccaaagccgttgaagcactgaaggaggctggaagtattgtcaggctttatgtcaaaagacggaagccagtgtctgagaagattatggaaataaagttgattaagggccctaaaggacttggcttcagtatagctggcggcgtgggcaaccagcacatccccggagataattccatttacgtgactaagattatcgagggcggcgctgctcacaaggacggcaagctgcaaatcggcgataagctcttggctgttaacaatgtgtgcctggaggaggtgacccatgaagaggctgtgacagctttgaaaaatacttccgattttgtgtacctgaaagtggccaagccaacgagtatgtatatgaatgatgggtatgccccccctgacattacaaattcttccagtcagccagtagacaaccacgtgagcccttcatcctttctgggtcagacaccggcatcaccggctaggtacagccccgtgtccaaagcagttctgggcgacgacgaaatcacacgagagccacgcaaagtggttttgcatagagggtctaccggtctggggttcaacattgtgggaggcgaggatggggaaggaatattcatctctttcattctggctgggggacccgccgatttgagtggcgaactcaggaaaggagatcgcataattagcgttaattctgtcgacttgcgtgccgcctcccacgagcaggccgccgcagccctaaagaatgccggccaagcagtgactatcgttgcccagtacagacccgaggaatactccaggtttgaggccaaaattcacgacctgcgggagcaaatgatgaactcatcgatctctagtgggtcagggagtttgaggactagccagaaaagaagcctctatgtacgggctctgttcgactacgacaagacgaaagatagcggtcttccatctcagggcttgaattttaagtttggagacattcttcatgtgatcaacgccagtgatgacgagtggtggcaagcgagacaggtgacccctgacggggagtcagacgaagttggggtgattcctagcaagcggcgcgtggagaagaaagagcgggccagactgaaaaccgtcaaattcaatagtaaaaccagggacaaaggggagatacctgacgacatgggatcgaaaggtcttaagcacgtgacatccaacgctagtgattccgagtcaagctatctgatcctgatcacagacgaatatggctgctccaaaggtggccaggaggaatatgtcctgtcctacgaacccgtcaaccagcaagaggtcaattatacacgtccagtgataatactgggccccatgaaagataggataaatgacgacctcatatccgaattcccggacaaattcggttcctgcgtccctcacactacaaggcctaagcgcgactatgaggtagacggacgcgattatcacttcgtgacatctagggaacagatggagaaggatatacaagagcacaagttcattgaagctgggcaatacaacaaccacctgtacgggacatcagtacagtccgtgcgggaggtagctgagaaaggaaagcactgtatccttgacgtgagtggcaacgccatcaaaagactgcagatcgcgcaactttaccccatatcaatttttataaaacccaaatcaatggaaaatattatggagatgaacaagagattgaccgaggaacaggcaagaaaaacattcgagcgtgctatgaaactggagcaggaattcaccgagcattttaccgcgatagtccagggagacacactcgaggacatctataaccaggttaagcagattatcgaggaacagtcgggtagctatatatgggtacccgcaaaagagaaactatag

SEQ ID NO: 81395 - DNA, 2403 bp, Artificial Sequence
  derived and/or modified sequence
atgaactacatattcgggaacaacacactgctgtacagtcgcggttcacggggtggtaacacgtcttcctcccatggctccgccggacctaaacaaaaacactgggcaaaaaaggggagttctgatgagctccaagccgaacctgagcccagtcgctggcaacagattgtcgccttctttactcgcagacattcatttattgactgcattagcgttgccacatccagcacacaggctaatccaccccctgtgttggtgaacactgattccctggaaacccctacatatgtgaatggtactgacgccgattatgaatacgaggagatcacgctcgagagggggaatagtgggctcgggtttagcatcgctggcggtactgacaatccgcatattggagacgactcctccatctttataaccaagattattacaggaggggctgctgcccaagacggtcgactgcgggtcaatgactgtatcttacgcgtgaacgaagttgatgtgcgcgatgtcacccactcaaaggccgtcgaagccttaaaagaagctggtagcatcgtgcgcctctatgttaaacgacgaaagccagtgagcgagaagatcatggagatcaaactgattaaggggccaaaaggcctcggattcagcattgctggtggtgtgggtaaccagcacatccccggagacaatagcatctacgttaccaaaatcatcgagggcggtgctgcccacaaagacggtaaactgcagatcggtgacaaattactggctgtaaacaatgtttgcctggaggaagtgacccatgaggaagcagttaccgctctgaagaacacaagcgatttcgtgtatctcaaagtcgcaaaaccgacaagcatgtatatgaatgatggatacgcccctccggacattaccaattcttccagccagccggttgataaccatgtgtcgccctctagctttctcggccaaactcccgcatccccagcaagatacagccctgtaagtaaggctgtgttgggtgatgatgagatcaccagagaacctaggaaggtggttcttcacagaggttctacaggactggggttcaacatagttggcggagaggacggcgagggaatcttcatttccttcattttggccggtggacccgcagatttgtctggtgagttgcgcaagggtgacaggataatctccgtgaattcagtcgacttgagagcggcatcccacgaacaggcagccgcagctttgaagaacgcagggcaggccgtgactattgtggctcaatacaggccagaggaatattccagattcgaggcaaaaattcatgacctgagagaacagatgatgaattcctcaatctccagcgggtccggatctctgcggaccagccagaaacgttcgctttacgtcagggccctttttgactatgacaagactaaggattccggactgccgagccagggcctgaacttcaagttcggtgacattctgcatgtgattaacgccagtgacgacgaatggtggcaggcccgacaggtgacccccgatggcgagtctgacgaggtgggggtcatacccagcaaacgtcgggtcgaaaaaaaggaacgagctagactcaagacagtcaagttcaatagcaagactagagacaagggtgagatccctgacgatatgggctctaaaggtttaaagcatgtcacatccaacgcgtcagacagcgagagttcttacttgatcctgatcacagacgagtacggctgttccaaaggtgggcaagaagagtacgtcctaagctatgagcctgttaaccaacaggaagtgaactacactcggcctgtcattatcctagggccaatgaaggacaggatcaatgatgacctgatctcagaattccccgacaaattcggatcctgcgttccccatacgacaaggccaaaaagggattatgaagtggatggcagagattatcacttcgtgacgtctcgcgagcagatggaaaaagacattcaggaacacaaattcattgaagccggtcagtataataatcacctctacggcacgtcagtacagtctgttcgggaggtggccgaaaaagggaagcattgcatcctcgatgtcagcggaaacgcgatcaagagactgcagatagctcagctctatcccattagcatcttcatcaagcccaagtcgatggaaaatattatggaaatgaataaaaggctcaccgaagagcaagccaggaagacctttgaacgcgcaatgaaactggaacaggagttcactgaacactttactgcaatagtacagggagacaccctggaagacatctataatcaggtgaaacaaataattgaggagcaatcgggctcctatatttgggtccccgcaaaagagaaactctag

SEQ ID NO: 81396 - DNA, 2403 bp, Artificial Sequence
  derived and/or modified sequence
atgaactacatcttcggcaacaacaccctgctgtacagcagaggcagcagaggcggcaacaccagcagcagccacggcagcgccggccccaagcagaagcactgggccaagaagggcagcagcgacgagctgcaggccgagcccgagcccagcagatggcagcagatcgtggccttcttcaccagaagacacagcttcatcgactgcatcagcgtggccaccagcagcacccaggccaaccccccccccgtgctggtgaacaccgacagcctggagacccccacctacgtgaacggcaccgacgccgactacgagtacgaggagatcaccctggagagaggcaacagcggcctgggcttcagcatcgccggcggcaccgacaacccccacatcggcgacgacagcagcatcttcatcaccaagatcatcaccggcggcgccgccgcccaggacggcagactgagagtgaacgactgcatcctgagagtgaacgaggtggacgtgagagacgtgacccacagcaaggccgtggaggccctgaaggaggccggcagcatcgtgagactgtacgtgaagagaagaaagcccgtgagcgagaagatcatggagatcaagctgatcaagggccccaagggcctgggcttcagcatcgccggcggcgtgggcaaccagcacatccccggcgacaacagcatctacgtgaccaagatcatcgagggcggcgccgcccacaaggacggcaagctgcagatcggcgacaagctgctggccgtgaacaacgtgtgcctggaggaggtgacccacgaggaggccgtgaccgccctgaagaacaccagcgacttcgtgtacctgaaggtggccaagcccaccagcatgtacatgaacgacggctacgccccccccgacatcaccaacagcagcagccagcccgtggacaaccacgtgagccccagcagcttcctgggccagacccccgccagccccgccagatacagccccgtgagcaaggccgtgctgggcgacgacgagatcaccagagagcccagaaaggtggtgctgcacagaggcagcaccggcctgggcttcaacatcgtgggcggcgaggacggcgagggcatcttcatcagcttcatcctggccggcggccccgccgacctgagcggcgagctgagaaagggcgacagaatcatcagcgtgaacagcgtggacctgagagccgccagccacgagcaggccgccgccgccctgaagaacgccggccaggccgtgaccatcgtggcccagtacagacccgaggagtacagcagattcgaggccaagatccacgacctgagagagcagatgatgaacagcagcatcagcagcggcagcggcagcctgagaaccagccagaagagaagcctgtacgtgagagccctgttcgactacgacaagaccaaggacagcggcctgcccagccagggcctgaacttcaagttcggcgacatcctgcacgtgatcaacgccagcgacgacgagtggtggcaggccagacaggtgacccccgacggcgagagcgacgaggtgggcgtgatccccagcaagagaagagtggagaagaaggagagagccagactgaagaccgtgaagttcaacagcaagaccagagacaagggcgagatccccgacgacatgggcagcaagggcctgaagcacgtgaccagcaacgccagcgacagcgagagcagctacctgatcctgatcaccgacgagtacggctgcagcaagggcggccaggaggagtacgtgctgagctacgagcccgtgaaccagcaggaggtgaactacaccagacccgtgatcatcctgggccccatgaaggacagaatcaacgacgacctgatcagcgagttccccgacaagttcggcagctgcgtgccccacaccaccagacccaagagagactacgaggtggacggcagagactaccacttcgtgaccagcagagagcagatggagaaggacatccaggagcacaagttcatcgaggccggccagtacaacaaccacctgtacggcaccagcgtgcagagcgtgagagaggtggccgagaagggcaagcactgcatcctggacgtgagcggcaacgccatcaagagactgcagatcgcccagctgtaccccatcagcatcttcatcaagcccaagagcatggagaacatcatggagatgaacaagagactgaccgaggagcaggccagaaagaccttcgagagagccatgaagctggagcaggagttcaccgagcacttcaccgccatcgtgcagggcgacaccctggaggacatctacaaccaggtgaagcagatcatcgaggagcagagcggcagctacatctgggtgcccgccaaggagaagctgtag

SEQ ID NO: 81397 - DNA, 2516 bp, Artificial Sequence
  derived and/or modified sequence
agctggtagagaagtaagcctgcttggcaaccacctgcagggctgcagagatgaattacattttcggaaacaacacacttctatactctcgcggcagtcgaggaggcaatactagctctagccatggctcagcaggcccaaagcagaaacactgggcaaaaaagggctcgtcagatgaactgcaagctgagccagaaccttcacgctggcagcagatagttgcatttttcactcgaagacacagctttattgactgcatctcggtagccaccagctccacccaggcaaatcctcccccagtactggtcaacacagatagcttggaaacaccaacttacgttaatggcacagatgcagattatgaatatgaagaaatcacacttgaaaggggaaattcagggcttggtttcagcattgcaggaggtacggacaacccacacattggagatgactcaagtattttcattaccaaaattatcacagggggagcagccgcccaagatggaagattgcgggtcaatgactgtatattacgagtaaatgaagtagatgttcgtgatgtaacacatagcaaagcagttgaagcgttgaaagaagcagggtctattgtacgcttgtatgtaaaaagaaggaaaccagtgtcagaaaaaataatggaaataaagctcattaaaggtcctaaaggtcttgggtttagcattgctggaggtgttggaaatcagcatattcctggggataatagcatctatgtaaccaaaataattgaaggaggtgcagcacataaggatggcaaacttcagattggagataaacttttagcagtgaataacgtatgtttagaagaagttactcatgaagaagcagtaactgccttaaagaacacatctgattttgtttatttgaaagtggcaaaacccacaagtatgtatatgaatgatggctatgcaccacctgatatcaccaactcttcttctcagcctgttgataaccatgttagcccatcttccttcttgggccagacaccagcatctccagccagatactccccagtttctaaagcagtacttggagatgatgaaattacaagggaacctagaaaagttgttcttcatcgtggctcaacgggccttggtttcaacattgtaggaggagaagatggagaaggaatatttatttcctttatcttagccggaggacctgctgatctaagtggagagctcagaaaaggagatcgtattatatcggtaaacagtgttgacctcagagctgctagtcatgagcaggcagcagctgcattgaaaaatgctggccaggctgtcacaattgttgcacaatatcgacctgaagaatacagtcgttttgaagctaaaatacatgatttacgggagcagatgatgaatagtagtattagttcagggtcaggttctcttcgaactagccagaagcgatccctctatgtcagagccctttttgattatgacaagactaaagacagtgggcttcccagtcagggactgaacttcaaatttggagatatcctccatgttattaatgcttctgatgatgaatggtggcaagccaggcaggttacaccagatggtgagagcgatgaggtcggagtgattcccagtaaacgcagagttgagaagaaagaacgagcccgattaaaaacagtgaaattcaattctaaaacgagagataaaggggagatccctgacgacatgggatcaaaaggcctgaagcatgtaacttctaatgccagcgatagtgaaagtagttacctaatcttgattacagatgagtatggctgctcaaaaggtggtcaagaagaatacgtcttatcttatgaaccagtgaatcaacaagaagttaattatactcgaccagtgatcatattgggacctatgaaagacaggataaatgatgacttgatctcagaatttcctgacaaatttggatcctgtgttcctcatacaactagaccaaaacgagattatgaggtagatggaagagattatcattttgtgacttcaagagagcagatggaaaaagatatccaggaacataaattcattgaagctggccagtataacaatcatctatatggaacaagtgttcagtctgtacgagaagtagcagaaaagggcaaacactgtatccttgatgtgtctggaaatgccataaagagattacagattgcacagctttaccctatctccatttttattaaacccaaatccatggaaaatatcatggaaatgaataagcgtctaacagaagaacaagccagaaaaacatttgagagagccatgaaactggaacaggagtttactgaacatttcacagctattgtacagggggatacgctggaagacatttacaaccaagtgaaacagatcatagaagaacaatctggttcttacatctgggttccggcaaaagaaaagctatgaaaactcatgtttctctgtttctcttttccacaattccattttctttggcatctctttgccctt

SEQ ID NO: 81398 - protein, 788 aa, Artificial Sequence
  derived and/or modified sequence
MNYIFGNNTLLYSRGSRGGNTSSSHGSAGPKQKHWAKKGSSDELQAEPEPSRWQQIVAFFTRRHSFIDCISVATSSTQANPPPVLVNTDSLETPTYVNGTDADYEYEEITLERGNSGLGFSIAGGTDNPHIGDDSSIFITKIITGGAAAQDGRLRVNDCILRVNEVDVRDVTHSKAVEALKEAGSIVRLYVKRRKPVSEKIMEIKLIKGPKGLGFSIAGGVGNQHIPGDNSIYVTKIIEGGAAHKDGKLQIGDKLLAVNNVCLEEVTHEEAVTALKNTSDFVYLKVAKPTSMYMNDGYAPPDITNSSSQPVDNHVSPSSFLGQTPASPARYSPVSKAVLGDDEITREPRKVVLHRGSTGLGFNIVGGEDGEGIFISFILAGGPADLSGELRKGDRIISVNSVDLRAASHEQAAAALKNAGQAVTIVAQYRPEEYSRFEAKIHDLREQMMNSSISSGSGSLRTSQKRSLYVRALFDYDKTKDSGLPSQGLNFKFGDILHVINASDDEWWQARQVTPDGESDEVGVIPSKRRVEKKERARLKTVKFNSKTRDKGEIPDDMGSKGLKHVTSNASDSESSYRGQEEYVLSYEPVNQQEVNYTRPVIILGPMKDRINDDLISEFPDKFGSCVPHTTRPKRDYEVDGRDYHFVTSREQMEKDIQEHKFIEAGQYNNHLYGTSVQSVREVAEKGKHCILDVSGNAIKRLQIAQLYPISIFIKPKSMENIMEMNKRLTEEQARKTFERAMKLEQEFTEHFTAIVQGDTLEDIYNQVKQIIEEQSGSYIWVPAKEKL

SEQ ID NO: 81399 - DNA, 2367 bp, Artificial Sequence
  derived and/or modified sequence
atgaactatatattcggtaacaacacccttctgtatagtcggggttcgcgtggagggaacaccagttcttcacacggctcagctggacctaagcaaaaacactgggctaaaaagggatcctccgatgagctccaggcggagccagagccgtcccggtggcagcagatcgttgctttctttacccgccgccactcgtttattgactgcatatcagtcgcaacatcctctacacaggccaatcctccaccagttctcgtaaatactgattcgctcgaaacccccacctacgtcaacggcaccgacgccgactatgaatacgaggaaattactctcgagcgcggaaacagtggattgggctttagcattgccggtggtactgataacccacatattggtgacgatagcagcatatttataactaaaataatcacgggcggggccgccgctcaggatggtcggcttagggtgaatgactgtatccttcgggtcaacgaggtggatgtacgggatgtaacccacagtaaggctgtggaggcactaaaagaagcgggaagcattgttcggctctacgttaaacgcaggaagcccgttagcgagaagattatggagattaaactgatcaaaggaccaaagggcctgggattctccattgcaggcggagtgggtaatcagcacataccaggagacaacagcatctatgtgactaaaataatcgaggggggagcagcacataaagatggaaagctgcaaatcggggacaaactgctggccgtaaacaatgtgtgcctcgaagaggtgacacatgaagaagctgtcacggcactaaagaacacatcagatttcgtctatctcaaggtggcaaaacctaccagcatgtacatgaatgacggttatgccccccccgacatcacaaatagttcctcacagcctgttgataaccatgtcagccctagttcattcttaggacaaaccccagctagccctgcccggtattccccagtgagtaaggctgtgctcggggatgatgaaattacacgggagcctcgcaaggtagttcttcacaggggttccacaggactagggttcaacatcgtgggcggcgaggatggggagggcatctttattagcttcattcttgccggtggccccgccgatctctccggtgaactcaggaagggggatcggattatatctgtcaattcagttgacttgcgtgccgctagccacgaacaggccgccgctgccctaaaaaacgctggccaggccgttaccattgtggcacagtacagacccgaggaatactcaaggttcgaggccaaaattcatgacttgcgggaacagatgatgaactccagtatcagttctggttctggaagccttcggacttcacagaaaaggtcattgtatgtgcgcgcgctctttgattatgacaaaaccaaagattccggcctcccatcgcaaggcctgaacttcaaattcggggatatactgcacgtgatcaacgcatccgacgatgagtggtggcaagccagacaagtgacaccagatggtgaatcggatgaagtgggtgtaatccccagcaaacgcagggtggaaaagaaagaacgggcaaggctgaagacagtaaagtttaacagcaagacccgggataagggggaaatacccgacgatatggggtctaagggactaaagcatgtaaccagcaatgcatccgattctgagagctcctacaggggccaggaagagtatgtgctgtcctatgagcccgtgaaccagcaggaggtgaattatactcgccccgtaatcatccttggacctatgaaggatagaatcaacgatgatctgattagtgaatttcccgacaagttcggctcatgtgtgccacatacgactcgcccgaaaagggactatgaggtggacggccgtgactatcacttcgtaactagccgcgagcagatggagaaagatatccaggagcacaagttcatagaagcaggccagtataacaatcatctttatggtacgtccgtacagagcgtccgagaagttgccgagaaagggaaacactgtatcctggacgttagtggcaatgccatcaagaggctgcaaattgcacaactatatcccatttctatctttatcaaaccaaagagtatggagaatatcatggagatgaacaagcgactgacagaagagcaagcaaggaagaccttcgaaagagctatgaagttagagcaggagttcaccgaacacttcactgccatagtgcagggggatacactcgaagacatctataatcaggtcaaacagatcattgaggaacagtcagggtcctacatctgggtcccagcaaaagagaagctttag

SEQ ID NO: 81400 - DNA, 2367 bp, Artificial Sequence
  derived and/or modified sequence
atgaactacatctttggaaacaacaccctgctgtacagccggggcagccggggcggcaacaccagcagcagccacggcagcgctggccccaagcagaagcactgggccaagaagggcagcagtgatgagctgcaggccgagcctgagcccagccgctggcagcagatcgtggccttcttcacccggcggcacagcttcatcgactgcatctctgtggccaccagcagcacccaggccaaccccccacctgtgctggtgaacacagacagcctggagacccccacctacgtgaatggaacagatgctgactatgaatatgaggagatcaccctggagcggggcaacagcggcctgggcttcagcattgctgggggcacagacaacccccacatcggagatgacagcagcatcttcatcaccaagatcatcaccggcggggccgccgcccaggacggccgcctgcgggtgaatgactgcatcctgcgggtgaatgaggtggatgtgagagatgtgacccacagcaaggctgtggaggccctgaaggaggccggcagcatcgtgcggctgtatgtgaagaggaggaagcctgtgtctgagaagatcatggagatcaagctgatcaagggccccaagggcctgggcttcagcattgctgggggcgtgggcaaccagcacatccctggggacaacagcatctacgtgaccaagatcatcgagggcggggccgcccacaaggatggcaagctgcagattggagacaagctgctggccgtgaacaacgtgtgcctggaggaggtgacccatgaggaggccgtgacagccctgaagaacaccagtgactttgtgtacctgaaggtggccaagcccacctccatgtacatgaatgatggctacgcccccccagacatcaccaacagcagcagccagcctgtggacaaccacgtgagccccagcagcttcctgggccagaccccagccagccctgcccgctacagccctgtgtccaaggctgtgctgggagatgatgagatcacccgggagcccaggaaggtggtgctgcaccggggcagcacaggcctgggcttcaacatcgtgggcggggaggatggagagggcatcttcatctccttcatcctggccggcggccctgctgacctgtctggagagctgaggaagggggaccgcatcatctctgtgaacagcgtggacctgcgggccgccagccatgagcaggccgccgccgccctgaagaatgccggccaggccgtgaccatcgtggcccagtacagacctgaggagtacagcagatttgaggccaagatccatgacctgcgggagcagatgatgaacagcagcatcagcagcggcagcggcagcctgcggaccagccagaagaggagcctgtatgtgcgggccctgtttgattatgacaagaccaaggacagcggcctgcccagccagggcctgaacttcaagtttggagacatcctgcacgtgatcaatgccagtgatgatgagtggtggcaggcccggcaggtgaccccagatggagagagtgatgaggtgggcgtcatccccagcaagagaagagtggagaagaaggagcgggcccggctgaagacagtgaagttcaacagcaagacccgggacaagggggagatcccagatgacatgggcagcaagggcctgaagcacgtgaccagcaatgccagtgacagcgagagcagctaccggggccaggaggagtatgtgctgtcctatgagcctgtgaaccagcaggaggtgaactacaccaggcctgtgatcatcctgggccccatgaaggaccgcatcaatgatgacctgatcagcgagttcccagacaagtttggcagctgtgtgccccacaccacccggcccaagagggactatgaggtggatggccgggactaccactttgtgaccagccgggagcagatggagaaggacatccaggagcacaagttcattgaagctggccagtacaacaaccacctgtatggcacctctgtgcagagcgtgcgggaggtggccgagaagggcaagcactgcatcctggatgtgtctggaaatgccatcaagaggctgcagatcgcccagctgtaccccatcagcatcttcatcaagcccaagtccatggagaacatcatggagatgaacaagaggctgacagaggagcaggccaggaagacctttgagcgggccatgaagctggagcaggagttcacagagcacttcaccgccatcgtgcagggcgacaccctggaggacatctacaaccaggtgaagcagatcatcgaggagcagagcggcagctacatctgggtgcctgccaaggagaagctgtag

SEQ ID NO: 81401 - DNA, 2367 bp, Artificial Sequence
  derived and/or modified sequence
atgaactacatcttcggcaacaacaccctgctgtacagccggggcagccgaggcggcaacacatcgagcagccatgggtccgctggtccgaagcagaagcattgggctaagaaaggcagtagtgatgagctgcaagctgagccagaaccatcaaggtggcaacagattgttgctttctttacacgacgccatagttttattgattgtatctcagtcgctacatcaagcacccaggcgaacccaccacccgtgcttgtgaatactgatagtttggaaactcccacatatgtgaatgggaccgacgccgactacgagtacgaagagatcaccctcgaaagaggcaactccgggctgggcttcagcatcgccggtgggaccgacaacccccacattggggacgacagttccatttttatcaccaagatcatcaccggtggagctgccgcacaggacggcagattacgagtaaacgactgcatactcagagtcaacgaagtagatgttagagacgtgacacatagtaaagcggtcgaggcactgaaggaggctgggtcaattgtacgtttgtatgtgaaacggaggaagcctgttagtgagaagatcatggagatcaaattgataaagggccctaaaggactcggcttcagtatcgcggggggagttggtaatcagcatatacccggcgacaactctatttacgtgaccaagatcattgaggggggcgcagctcacaaggatgggaaacttcagataggggacaagcttctagccgtgaacaacgtgtgcctggaagaagttacacacgaagaggccgtcaccgctctgaaaaacacttccgactttgtgtacctgaaagtggccaagcccaccagtatgtacatgaatgatgggtacgcaccaccggatatcacgaatagttcatcccaacccgttgacaatcacgtatctccttcaagtttcttgggacagacccctgcttcaccagcacgatattcccctgtgagtaaggcggtgctgggagacgatgagatcacccgggagccaagaaaggtggtcttgcaccggggatccaccgggctgggattcaacatcgtaggaggcgaagatggcgaaggcatcttcattagctttattctagcaggcgggcccgccgatctctcaggtgagctcaggaagggtgatcggatcataagcgtgaactcagtcgatctgcgggcagctagccatgaacaggctgccgcggccctaaaaaacgcgggccaggccgtcactattgttgcccaatacaggccagaggaatactcccgcttcgaggctaagatccatgatctgcgcgagcagatgatgaattcttctatatcctctggttctgggagtctgaggacgtcccaaaaacggagtttgtatgttcgggctctcttcgattatgacaaaaccaaggacagtggcctcccatcccagggcctgaacttcaaatttggcgacatattgcacgtgataaatgcaagtgacgacgaatggtggcaggctcggcaagttacccccgatggcgaatccgacgaagtaggtgtgataccatccaaaagacgcgtggagaagaaagagagggcacgattgaagaccgttaagtttaactccaagacccgggacaagggtgagatcccagacgacatgggttccaaggggcttaaacatgttacgagcaacgcgagtgattctgaaagctcttaccggggccaggaagagtatgtgctctcatacgagcccgtgaatcagcaagaagtgaattatactagacctgtgatcatccttggccctatgaaggatcggatcaatgatgacctgatttcagagttcccggacaaatttggatcttgcgtgccccacaccacgagaccgaaacgggattacgaagtagatggccgggactatcactttgtgaccagtagggagcagatggagaaagatattcaggaacataagtttattgaggcaggtcaatacaataaccacttgtatggcacaagtgtccaaagcgtccgcgaggtcgccgaaaaaggaaaacactgcatcctggacgtttctggtaatgctattaagcgcctccagatagcccaactctatccaatttcaatctttatcaaacccaagtcgatggagaatataatggaaatgaataagagactgaccgaagagcaggcccggaaaaccttcgaaagggccatgaaattggagcaagagttcacggaacatttcacagccatcgttcagggagacaccttggaagacatttataatcaggttaagcagattatcgaggaacagtctggatcatacatctgggtgccggctaaggagaagctgtag

SEQ ID NO: 81402 - DNA, 2367 bp, Artificial Sequence
  derived and/or modified sequence
atgaattatatattcggaaacaatactctgctgtactctcggggatctagaggcggtaacactagttcctctcatgggagtgccggtccaaaacagaagcactgggccaaaaaaggaagttcagatgagttgcaggccgagccagagcctagtcgctggcaacagattgtcgcctttttcaccaggcgacactcattcatcgattgtatcagcgtggcaacatctagcactcaagctaatcctcctcccgtattggtgaacacagactctttggaaaccccaacttacgtgaacggcaccgatgccgactatgagtacgaagaaataacacttgaaagagggaattcaggtcttggcttctcgatcgccggtgggacagataacccccacattggagacgattccagtatatttattacaaaaatcattaccggcggagctgccgcacaggatgggagacttcgagtcaacgattgtatccttcgggtgaacgaagttgacgtccgcgacgtgacacatagtaaggcagttgaggccctgaaggaggccggatcaatagtgcggctctacgtaaagaggaggaagcccgtgtcagaaaaaatcatggaaattaaactgatcaaaggtcccaagggcctgggcttcagtatcgcgggtggagtcggaaatcaacatatccccggagataactcaatatatgtcaccaaaatcatcgaaggtggtgctgcacacaaagacggcaaactgcagatcggcgataagctcctcgccgtgaacaatgtgtgtttggaggaggtgacccacgaagaagcagtaaccgctctcaagaatacatcggatttcgtgtaccttaaagtcgccaaacctacatcaatgtacatgaacgacggatacgcccctccagatattaccaattcctccagtcaacccgttgacaaccacgtgagtcccagctcgttcctgggacagacccccgcaagccctgctcgctactcacctgtatctaaggccgttttaggtgacgatgagatcacacgggagccacggaaggttgtgctccaccggggttccaccgggcttgggtttaatatagtgggaggagaggatggtgagggaatcttcatctccttcatccttgcagggggaccggcagacctgagtggagaactgcgcaagggcgatcggatcatcagcgttaactctgtggatttaagggcggcttctcatgagcaggcggcagctgcactcaagaatgccggacaagcggtgactattgtggcacagtaccggccagaggagtactctcgattcgaggcgaagatccatgaccttcgggaacagatgatgaatagttccatctccagcgggagtggatctttgagaacttctcagaaacgatccctgtacgttagagctctgttcgattatgataagacaaaggattcaggactcccaagtcagggcctgaactttaagtttggtgacattctgcacgtgattaacgcctctgacgacgagtggtggcaggctcgccaagtaaccccggatggtgagagtgacgaggtgggagtgatcccctcaaaacggagagtggaaaaaaaggagcgcgcacggctcaaaaccgtgaaatttaacagtaagacacgcgacaaaggcgagattccggatgacatggggagtaaggggctgaagcacgtgaccagcaacgcttccgactccgaaagcagctatagaggccaggaggagtatgtgctgtcttacgaacccgtaaaccaacaagaggtgaattatacacgcccagttatcatcctggggccaatgaaagatagaatcaacgacgatttgattagcgaattcccagataagttcggcagttgcgtaccacataccacacgaccaaagagggactatgaggtcgatggacgtgactatcacttcgtcacctctagggagcaaatggaaaaagacatccaggagcacaagtttatcgaagcaggtcaatataacaatcatctctacggtacttctgtgcaaagcgttagggaggtcgctgaaaaggggaagcactgcatcctggacgttagcggtaatgccataaagagactgcaaatcgctcagttgtatccaattagcattttcatcaagcccaaatccatggaaaatattatggaaatgaacaagcgtctaaccgaagagcaagctcggaaaacctttgagcgcgctatgaagttagaacaggagttcacagaacacttcactgcaattgttcagggtgatacgctggaggatatatataatcaggtgaagcagattatcgaagaacaatccggctcttatatctgggtgccggctaaggagaagctgtag

SEQ ID NO: 81403 - DNA, 2367 bp, Artificial Sequence
  derived and/or modified sequence
atgaactacatcttcggcaacaacaccctgctgtacagcagaggcagcagaggcggcaacaccagcagcagccacggcagcgccggccccaagcagaagcactgggccaagaagggcagcagcgacgagctgcaggccgagcccgagcccagcagatggcagcagatcgtggccttcttcaccagaagacacagcttcatcgactgcatcagcgtggccaccagcagcacccaggccaaccccccccccgtgctggtgaacaccgacagcctggagacccccacctacgtgaacggcaccgacgccgactacgagtacgaggagatcaccctggagagaggcaacagcggcctgggcttcagcatcgccggcggcaccgacaacccccacatcggcgacgacagcagcatcttcatcaccaagatcatcaccggcggcgccgccgcccaggacggcagactgagagtgaacgactgcatcctgagagtgaacgaggtggacgtgagagacgtgacccacagcaaggccgtggaggccctgaaggaggccggcagcatcgtgagactgtacgtgaagagaagaaagcccgtgagcgagaagatcatggagatcaagctgatcaagggccccaagggcctgggcttcagcatcgccggcggcgtgggcaaccagcacatccccggcgacaacagcatctacgtgaccaagatcatcgagggcggcgccgcccacaaggacggcaagctgcagatcggcgacaagctgctggccgtgaacaacgtgtgcctggaggaggtgacccacgaggaggccgtgaccgccctgaagaacaccagcgacttcgtgtacctgaaggtggccaagcccaccagcatgtacatgaacgacggctacgccccccccgacatcaccaacagcagcagccagcccgtggacaaccacgtgagccccagcagcttcctgggccagacccccgccagccccgccagatacagccccgtgagcaaggccgtgctgggcgacgacgagatcaccagagagcccagaaaggtggtgctgcacagaggcagcaccggcctgggcttcaacatcgtgggcggcgaggacggcgagggcatcttcatcagcttcatcctggccggcggccccgccgacctgagcggcgagctgagaaagggcgacagaatcatcagcgtgaacagcgtggacctgagagccgccagccacgagcaggccgccgccgccctgaagaacgccggccaggccgtgaccatcgtggcccagtacagacccgaggagtacagcagattcgaggccaagatccacgacctgagagagcagatgatgaacagcagcatcagcagcggcagcggcagcctgagaaccagccagaagagaagcctgtacgtgagagccctgttcgactacgacaagaccaaggacagcggcctgcccagccagggcctgaacttcaagttcggcgacatcctgcacgtgatcaacgccagcgacgacgagtggtggcaggccagacaggtgacccccgacggcgagagcgacgaggtgggcgtgatccccagcaagagaagagtggagaagaaggagagagccagactgaagaccgtgaagttcaacagcaagaccagagacaagggcgagatccccgacgacatgggcagcaagggcctgaagcacgtgaccagcaacgccagcgacagcgagagcagctacagaggccaggaggagtacgtgctgagctacgagcccgtgaaccagcaggaggtgaactacaccagacccgtgatcatcctgggccccatgaaggacagaatcaacgacgacctgatcagcgagttccccgacaagttcggcagctgcgtgccccacaccaccagacccaagagagactacgaggtggacggcagagactaccacttcgtgaccagcagagagcagatggagaaggacatccaggagcacaagttcatcgaggccggccagtacaacaaccacctgtacggcaccagcgtgcagagcgtgagagaggtggccgagaagggcaagcactgcatcctggacgtgagcggcaacgccatcaagagactgcagatcgcccagctgtaccccatcagcatcttcatcaagcccaagagcatggagaacatcatggagatgaacaagagactgaccgaggagcaggccagaaagaccttcgagagagccatgaagctggagcaggagttcaccgagcacttcaccgccatcgtgcagggcgacaccctggaggacatctacaaccaggtgaagcagatcatcgaggagcagagcggcagctacatctgggtgcccgccaaggagaagctgtag

SEQ ID NO: 81404 - DNA, 3053 bp, Artificial Sequence
  derived and/or modified sequence
atcagctaacaaaagaacagcttttggttcctgcagacgctggtgaaaaaataatcatgagaaagaaatccaccttatgtcgtcttttttgtctgcaaaaataaactcagccatcatacagctaacaggtacagagggaagatacgagctctttcataggaagaaatcactgagaaaatgagcatcatttctcaaggtttttattttcactgatctacaagtgatgctgctgtaattgtagctgcagtttttaccgatcattcaccactcagcagctggtagagaagtaagcctgcttggcaaccacctgcagggctgcagagatgaattacattttcggaaacaacacacttctatactctcgcggcagtcgaggaggcaatactagctctagccatggctcagcaggcccaaagcagaaacactgggcaaaaaagggctcgtcagatgaactgcaagctgagccagaaccttcacgctggcagcagatagttgcatttttcactcgaagacacagctttattgactgcatctcggtagccaccagctccacccaggcaaatcctcccccagtactggtcaacacagatagcttggaaacaccaacttacgttaatggcacagatgcagattatgaatatgaagaaatcacacttgaaaggggaaattcagggcttggtttcagcattgcaggaggtacggacaacccacacattggagatgactcaagtattttcattaccaaaattatcacagggggagcagccgcccaagatggaagattgcgggtcaatgactgtatattacgagtaaatgaagtagatgttcgtgatgtaacacatagcaaagcagttgaagcgttgaaagaagcagggtctattgtacgcttgtatgtaaaaagaaggaaaccagtgtcagaaaaaataatggaaataaagctcattaaaggtcctaaaggtcttgggtttagcattgctggaggtgttggaaatcagcatattcctggggataatagcatctatgtaaccaaaataattgaaggaggtgcagcacataaggatggcaaacttcagattggagataaacttttagcagtgaataacgtatgtttagaagaagttactcatgaagaagcagtaactgccttaaagaacacatctgattttgtttatttgaaagtggcaaaacccacaagtatgtatatgaatgatggctatgcaccacctgatatcaccaactcttcttctcagcctgttgataaccatgttagcccatcttccttcttgggccagacaccagcatctccagccagatactccccagtttctaaagcagtacttggagatgatgaaattacaagggaacctagaaaagttgttcttcatcgtggctcaacgggccttggtttcaacattgtaggaggagaagatggagaaggaatatttatttcctttatcttagccggaggacctgctgatctaagtggagagctcagaaaaggagatcgtattatatcggtaaacagtgttgacctcagagctgctagtcatgagcaggcagcagctgcattgaaaaatgctggccaggctgtcacaattgttgcacaatatcgacctgaagaatacagtcgttttgaagctaaaatacatgatttacgggagcagatgatgaatagtagtattagttcagggtcaggttctcttcgaactagccagaagcgatccctctatgtcagagccctttttgattatgacaagactaaagacagtgggcttcccagtcagggactgaacttcaaatttggagatatcctccatgttattaatgcttctgatgatgaatggtggcaagccaggcaggttacaccagatggtgagagcgatgaggtcggagtgattcccagtaaacgcagagttgagaagaaagaacgagcccgattaaaaacagtgaaattcaattctaaaacgagagataaaggggagatccctgacgacatgggatcaaaaggcctgaagcatgtaacttctaatgccagcgatagtgaaagtagttaccgtggtcaagaagaatacgtcttatcttatgaaccagtgaatcaacaagaagttaattatactcgaccagtgatcatattgggacctatgaaagacaggataaatgatgacttgatctcagaatttcctgacaaatttggatcctgtgttcctcatacaactagaccaaaacgagattatgaggtagatggaagagattatcattttgtgacttcaagagagcagatggaaaaagatatccaggaacataaattcattgaagctggccagtataacaatcatctatatggaacaagtgttcagtctgtacgagaagtagcagaaaagggcaaacactgtatccttgatgtgtctggaaatgccataaagagattacagattgcacagctttaccctatctccatttttattaaacccaaatccatggaaaatatcatggaaatgaataagcgtctaacagaagaacaagccagaaaaacatttgagagagccatgaaactggaacaggagtttactgaacatttcacagctattgtacagggggatacgctggaagacatttacaaccaagtgaaacagatcatagaagaacaatctggttcttacatctgggttccggcaaaagaaaagctatgaaaactcatgtttctctgtttctcttttccacaattccattttctttggcatctctttgccctttcctctggagtctttcttgagtactgatttcatgttgaattgtatcccacacatcatggtctgcagcttctttttcacatgtagtgtctccttcaagttacatcgtgtgtattatttaatgtcactattggttagtggccatttttcagaactgaagatggaatggcctgaccagctattaagaacgtggggagacgcagaaattgtggtaaaattccttaatgtttaagggaaagtaactttaagagatttttggaaaagctttatatacattcttttcaaatttcagtacaaatgaaa

SEQ ID NO: 81405 - protein, 1861 aa, Artificial Sequence
  derived and/or modified sequence
MASSASSSPAGTEDSAPAQGGFGSDYSRSSRKSDANASYLRAARAGHLEKALDYIKNGVDINICNQNGLNALHLASKEGHVEVVSELLQREANVDAATKKGNTALHIASLAGQAEVVKVLVTNGANVNAQSQNGFTPLYMAAQENHLEVVKFLLDNGASQSLATEDGFTPLAVALQQGHDQVVSLLLENDTKGKVRLPALHIAARKDDTKAAALLLQNDNNADVESKSGFTPLHIAAHYGNINVATLLLNRAAAVDFTARNDITPLHVASKRGNANMVKLLLDRGAKIDAKTRDGLTPLHCGARSGHEQVVEMLLDRAAPILSKTKNGLSPLHMATQGDHLNCVQLLLQHNVPVDDVTNDYLTALHVAAHCGHYKVAKVLLDKKANPNAKALNGFTPLHIACKKNRIKVMELLLKHGASIQAVTESGLTPIHVAAFMGHVNIVSQLMHHGASPNTTNVRGETALHMAARSGQAEVVRYLVQDGAQVEAKAKDDQTPLHISARLGKADIVQQLLQQGASPNAATTSGYTPLHLSAREGHEDVAAFLLDHGASLSITTKKGFTPLHVAAKYGKLEVANLLLQKSASPDAAGKSGLTPLHVAAHYDNQKVALLLLDQGASPHAAAKNGYTPLHIAAKKNQMDIATTLLEYGADANAVTRQGIASVHLAAQEGHVDMVSLLLGRNANVNLSNKSGLTPLHLAAQEDRVNVAEVLVNQGAHVDAQTKMGYTPLHVGCHYGNIKIVNFLLQHSAKVNAKTKNGYTPLHQAAQQGHTHIINVLLQNNASPNELTVNGNTALGIARRLGYISVVDTLKIVTEETMTTTTVTEKHKMNVPETMNEVLDMSDDEVRKANAPEMLSDGEYISDVEEGEDAMTGDTDKYLGPQDLKELGDDSLPAEGYMGFSLGARSASLRSFSSDRSYTLNRSSYARDSMMIEELLVPSKEQHLTFTREFDSDSLRHYSWAADTLDNVNLVSSPIHSGFLVSFMVDARGGSMRGSRHHGMRIIIPPRKCTAPTRITCRLVKRHKLANPPPMVEGEGLASRLVEMGPAGAQFLGPVIVEIPHFGSMRGKERELIVLRSENGETWKEHQFDSKNEDLTELLNGMDEELDSPEELGKKRICRIITKDFPQYFAVVSRIKQESNQIGPEGGILSSTTVPLVQASFPEGALTKRIRVGLQAQPVPDEIVKKILGNKATFSPIVTVEPRRRKFHKPITMTIPVPPPSGEGVSNGYKGDTTPNLRLLCSITGGTSPAQWEDITGTTPLTFIKDCVSFTTNVSARFWLADCHQVLETVGLATQLYRELICVPYMAKFVVFAKMNDPVESSLRCFCMTDDKVDKTLEQQENFEEVARSKDIEVLEGKPIYVDCYGNLAPLTKGGQQLVFNFYSFKENRLPFSIKIRDTSQEPCGRLSFLKEPKTTKGLPQTAVCNLNITLPAHKKIEKTDRRQSFASLALRKRYSYLTEPGMSPQSPCERTDIRMAIVADHLGLSWTELARELNFSVDEINQIRVENPNSLISQSFMLLKKWVTRDGKNATTDALTSVLTKINRIDIVTLLEGPIFDYGNISGTRSFADENNVFHDPVDGYPSLQVELETPTGLHYTPPTPFQQDDYFSDISSIESPLRTPSRLSDGLVPSQGNIEHSADGPPVVTAEDASLEDSKLEDSVPLTEMPEAVDVDESQLENVCLSWQNETSSGNLESCAQARRVTGGLLDRLDDSPDQCRDSITSYLKGEAGKFEANGSHTEITPEAKTKSYFPESQNDVGKQSTKETLKPKIHGSGHVEEPASPLAAYQKSLEETSKLIIEETKPCVPVSMKKMSRTSPADGKPRLSLHEEEGSSGSEQKQGEGFKVKTKKEIRHVEKKSHS

SEQ ID NO: 81406 - DNA, 5586 bp, Artificial Sequence
  derived and/or modified sequence
atggcctctagcgccagttcatcccccgccggaacagaggactcggcccctgcacaggggggcttcgggtcagactactctcggagctcgcggaaatcagacgcaaacgcttcatatctgagagccgcccgggctggccaccttgagaaagcccttgactacataaagaacggagtggatatcaatatttgcaatcaaaacggattaaacgctctccacttagcatccaaagagggccatgtcgaggtggtctctgagctgctgcaacgcgaggctaatgtggatgctgccactaaaaaaggaaacactgccttacacatagcaagtctggctggtcaggccgaagtggtgaaagtcctcgtaaccaatggcgctaatgtgaacgcccaatcacaaaacggatttacaccgctgtatatggccgcacaagaaaaccacctggaagtcgttaagtttctgctggataacggcgcctcccaaagcctagcgaccgaggatgggttcacgccactggctgtcgccctgcaacagggccacgatcaagtcgtgtcgcttctgctggagaacgatactaagggaaaagtgcggcttcccgccttgcacatagccgcccgcaaggacgatactaaagccgcagccctgctactgcagaacgataacaacgcagacgtggagtcgaagtctggatttaccccactccacatcgccgctcactacgggaatatcaacgtagcaacattgctgctcaatagagccgccgctgttgatttcacagccaggaacgacataacacccctgcatgttgcttccaagaggggtaatgccaacatggttaagcttcttctcgaccggggagctaaaatagatgcaaaaaccagagatggcctcaccccgctgcactgcggtgcacgctccgggcacgagcaggtggtagagatgctgctcgaccgcgccgctcccattctcagcaaaacaaagaacggcctctctccattacatatggccacccagggcgatcacctgaattgtgtgcagctgctgttacagcataacgtgccagtggacgatgttaccaacgactaccttacagccctgcatgttgcagcccattgcggtcattataaagtagcaaaggttctattagataagaaagccaatcctaacgctaaggcgctgaatggctttacccctctgcacattgcatgcaaaaagaaccggatcaaagtcatggaactgctgcttaaacatggcgcatcaatccaggccgttacagagtctggtctcacccctatccacgtggccgcgttcatgggccatgtgaacatcgtgagtcaactgatgcaccacggcgctagcccgaacaccacgaacgtcagaggagagacagcgttgcatatggcagcccgcagcggccaggctgaggtggttaggtatctagtccaggatggggcacaagttgaggcgaaagcgaaggatgaccagacgcccttgcacatttccgcaagactaggcaaagccgatatcgtccagcagcttctgcagcaaggggctagtcccaacgccgctacaacgagtggttacaccccactccatctgtcggccagggaaggccatgaggatgtggccgctttcctgttggatcacggcgcaagcctgtctattacaacaaagaaaggttttacacctctacacgtggcagctaaatacggaaaactggaagtggctaacctgttgttgcagaagagcgccagccctgatgctgcaggaaagagtggcttgaccccgctacacgtggccgcccattacgacaatcaaaaggtcgccttgctgctgctggatcagggagcctcacctcacgctgcggccaagaacggatataccccattgcacatcgccgctaagaagaaccaaatggatattgccacgacgctgctcgaatacggcgccgatgctaatgctgtaacccgccagggcatagcaagcgtgcacctcgcggcccaggaagggcacgtggacatggtgagcctcctgctgggccgcaacgccaacgtaaacctttctaataagagcggactgacaccactccatcttgcggctcaagaagatcgtgtgaatgtcgcagaggtactggtaaatcagggtgctcacgtggatgcacagacaaagatgggttatacgcccctccacgttggctgtcattacggaaatataaagatcgtaaactttctgttgcagcacagcgcaaaggtaaacgcaaaaactaaaaacggctacactccgcttcatcaagcagcgcaacaggggcatacacacatcatcaacgtgctgttacagaacaacgcttcacccaacgaattgaccgttaatggaaatacggccctaggtatagcacggcgcctcggttacatttccgtcgttgatactctgaagatcgtgacagaagagactatgacaacaacaacagttacagagaagcacaaaatgaacgtcccggagacaatgaatgaggtactggacatgagcgacgacgaagtgcgaaaggcgaacgctcccgaaatgctatctgatggggaatacatttcagatgtagaggaaggcgaggacgctatgacaggcgatactgataaatacctgggcccacaagatttgaaggaacttggagatgattccctccctgctgaagggtacatgggattttccctgggcgcccggtcagctagcctaagatccttctcatctgacaggtcctatactctgaacagaagttcttacgccagggattctatgatgattgaagagctcctcgtgccctcaaaggaacagcatctgacttttacccgcgaattcgattcagactccctgcgccactactcctgggctgcagacacacttgacaacgtcaatctggtatcatcccccatccattctgggttcctcgtgtcattcatggtggacgcaaggggtggatcgatgcggggatctcggcaccacgggatgagaataataattccgcccagaaagtgcaccgcccctaccagaatcacatgccgtctggtcaaacggcataaattagctaatcctcctcctatggtggaaggagaagggcttgcaagtcggttggttgaaatgggccccgccggcgcccagttccttggccccgttatcgtcgagatcccacactttggcagtatgcggggtaaggaacgcgagttgatcgtgcttcgctccgaaaacggcgagacatggaaggagcatcagttcgatagcaagaacgaggatctgaccgaactcctgaacgggatggacgaggaacttgacagccccgaggagctcgggaaaaagaggatttgtcgcatcataaccaaagacttcccgcagtactttgcagtggtatcccggatcaaacaggaatctaatcagattgggcccgaagggggcattctcagtagcactactgtccctctcgttcaggcctcatttccagaaggtgccttgaccaagcgaataagagttggcttgcaggcgcagccagtccctgatgaaattgtgaagaagatcctcggaaacaaagccacctttagccctatagtgactgtggagccccgacggcgcaaattccataagccgataactatgactattccggtcccaccccccagcggcgagggagtttctaacgggtacaagggggacaccactcccaacctcagattgttatgctcgatcaccggcggcacatcccccgctcagtgggaggacattacaggcacgacacctttaacctttattaaggactgtgtatcattcaccacaaacgtatctgccagattctggttggcggactgccaccaggtgttagagacagtgggtcttgccactcagctgtatagagaactgatctgtgtaccctacatggccaaattcgtcgtctttgccaagatgaatgacccggtcgagagtagcctcaggtgtttctgtatgactgacgacaaagtggacaaaacgcttgagcaacaagagaacttcgaggaagtggctcgcagcaaggatatagaagtcctcgagggaaagccaatctacgtggactgctatgggaatctggcgcccctaacgaagggtgggcaacaactggtattcaatttttactccttcaaagagaatagactgcctttcagcattaaaattagagacactagccaggagccctgtgggcggctgtctttcctgaaggagcctaagacaaccaaaggcttgccgcagaccgccgtatgtaatttaaacatcacacttcccgcacacaaaaagattgagaagacggatagacgtcagtcattcgcctccctggcattgcgtaagcggtacagttatctgaccgaacccggtatgagtcctcagtccccctgcgagagaacggatattcggatggccattgtggcagaccacctgggcctcagctggactgagctggctagagagctgaatttctcagttgatgaaattaatcagattcgagtcgaaaatcccaattcgcttatctcacagtcttttatgctgttgaagaagtgggtcaccagggatggcaagaatgcaaccactgatgctctcacgtcagtgcttaccaaaattaatcggattgatatcgtaaccctgctggagggccctatcttcgactatgggaatatcagcggcactagaagttttgccgacgagaacaacgtgtttcatgatcccgtcgatggttacccctcgctgcaggtagagctggagacccctacaggtctgcactataccccgcctacacccttccagcaggacgattatttctccgatattagtagcattgagtctccactgagaactccatctagactctccgatggcttagttccaagccaagggaatatcgagcactccgccgacgggccccccgttgtgactgctgaggatgccagtttggaagactccaaactggaggactccgtacccctgactgaaatgcccgaggcagttgatgtagacgagagtcagctggaaaatgtgtgcctctcatggcagaatgaaacatccagtggcaacctggagtcctgcgctcaagctcgcagggttacaggtgggctgctggacaggctcgatgactcccccgaccagtgccgcgattcaatcactagttacctgaaaggggaggccggcaaatttgaagcgaatggctctcacacagaaattaccccggaagcgaaaacgaaatcctacttcccggagtcacaaaatgacgtgggcaagcagagtactaaagaaacccttaagcccaagattcacggttcaggccacgtagaagagccagcctccccacttgccgcctatcaaaagagcctggaagagacttcgaaactcattattgaagagaccaagccttgtgtgcctgtatcaatgaagaagatgagtcgtaccagcccagcggacgggaaaccgaggttgtcattgcacgaagaggaaggcagttcaggcagtgaacagaagcagggcgaaggatttaaggtgaaaaccaagaaggagattcggcacgttgagaaaaagtcacactcatag

SEQ ID NO: 81407 - DNA, 5586 bp, Artificial Sequence
  derived and/or modified sequence
atggccagcagcgccagcagcagccctgctggaacagaagattctgccccagcccagggcggcttcggcagtgactacagccgcagcagcaggaagagtgatgccaatgccagctacctgcgggccgcccgggccggccacctggagaaggccctggactacatcaagaatggagtggacatcaacatctgcaaccagaatggcctgaatgccctgcacctggccagcaaggagggccacgtggaggtggtgtctgagctgctgcagcgggaggccaacgtggatgctgccaccaagaagggcaacacagccctgcacatcgccagcctggccggccaggccgaggtggtgaaggtgctggtgaccaatggagccaacgtgaatgcccagagccagaatggcttcacccccctgtacatggccgcccaggagaaccacctggaggtggtgaagttcctgctggacaacggggccagccagagcctggccacagaagatggcttcacccccctggccgtggccctgcagcagggccatgaccaggtggtgtccctgctgctggagaatgacaccaagggcaaggtgcggctgcctgccctgcacatcgccgccaggaaggatgacaccaaggccgccgccctgctgctgcagaatgacaacaatgctgatgtggagagcaagagcggcttcacccccctgcacatcgccgcccactacggcaacatcaacgtggccaccctgctgctgaacagagctgctgctgtggacttcaccgccagaaatgacatcacccccctgcacgtggccagcaagagaggaaatgccaacatggtgaagctgctgctggacagaggagccaagattgatgccaagaccagagatggcctgacccccctgcactgtggggcccggagcggccacgagcaggtggtggagatgctgctggaccgggccgcccccatcctgagcaagaccaagaatggcctgagccccctgcacatggccacccagggcgaccacctgaactgtgtgcagctgctgctgcagcacaacgtgcctgtggatgatgtgaccaatgactacctgacagccctgcacgtggccgcccactgcggccactacaaggtggccaaggtgctgctggacaagaaggccaaccccaatgccaaggccctgaatggcttcacccccctgcacatcgcctgcaagaagaaccgcatcaaggtgatggagctgctgctgaagcacggggccagcatccaggccgtgacagagagcggcctgacccccatccacgtggccgccttcatgggccacgtgaacatcgtgtcccagctgatgcaccacggggccagccccaacaccaccaacgtgcggggggagacagccctgcacatggccgcccggagcggccaggccgaggtggtgcgctacctggtgcaggatggagcccaggtggaggccaaggccaaggatgaccagacccccctgcacatcagcgcccggctgggcaaggctgacatcgtgcagcagctgctgcagcagggcgccagccccaatgctgccaccaccagcggctacacccccctgcacctgagcgcccgggagggccatgaagatgtggccgccttcctgctggaccacggggccagcctgagcatcaccaccaagaagggcttcacccccctgcacgtggccgccaagtatggcaagctggaggtggccaacctgctgctgcagaagagcgccagcccagatgctgctgggaagagcggcctgacccccctgcacgtggccgcccactatgacaaccagaaggtggccctgctgctgctggaccagggcgccagcccccacgccgccgccaagaatggctacacccccctgcacatcgccgccaagaagaaccagatggacatcgccaccaccctgctggagtatggagcagatgccaatgctgtgacccggcagggcatcgcctctgtgcacctggccgcccaggagggccacgtggacatggtgtccctgctgctgggcagaaatgccaacgtgaacctgagcaacaagagcggcctgacccccctgcacctggccgcccaggaggacagagtgaatgtggccgaggtgctggtgaaccagggcgcccacgtggatgcccagaccaagatgggctacacccccctgcacgtgggctgccactacggcaacatcaagatcgtgaacttcctgctgcagcacagcgccaaggtgaatgccaagaccaagaatggctacacccccctgcaccaggccgcccagcagggccacacccacatcatcaacgtgctgctgcagaacaatgccagccccaatgagctgactgtgaatggaaacacagccctgggcatcgcccggcggctgggctacatctctgtggtggacaccctgaagatcgtgacagaggagaccatgaccaccaccaccgtgacagagaagcacaagatgaatgtgcctgagaccatgaatgaggtgctggacatgtctgatgatgaggtgaggaaggccaatgcccctgagatgctgagtgatggagagtacatcagtgatgtggaggagggagaagatgccatgactggagacacagacaagtacctgggcccccaggacctgaaggagctgggagatgacagcctgcctgctgagggctacatgggcttcagcctgggcgcccggagcgccagcctgcggagcttcagcagtgacaggagctacaccctgaacagaagcagctatgcccgggacagcatgatgattgaggagctgctggtgcccagcaaggagcagcacctgaccttcacccgggagtttgacagcgacagcctgcggcactacagctgggccgctgacaccctggacaacgtgaacctggtgagcagccccatccacagcggcttcctggtgtccttcatggtggatgcccggggcggctccatgaggggcagccgccaccacggcatgaggatcatcatcccccccaggaaatgtacagcccccacccgcatcacctgccgcctggtgaagaggcacaagctggccaaccccccacccatggtggagggggagggcctggccagccggctggtggagatgggccctgctggggcccagttcctgggccctgtgattgtggagatcccccacttcggctccatgaggggcaaggagcgggagctgattgtgctgcggagtgaaaatggagagacctggaaggagcaccagtttgacagcaagaatgaagacctgacagagctgctgaatggcatggatgaggagctggacagccctgaggagctgggcaagaagaggatctgccgcatcatcaccaaggacttcccccagtactttgctgtggtgagccgcatcaagcaggagagcaaccagatcggccctgagggcggcatcctgagcagcaccaccgtgcccctggtgcaggccagcttccctgagggcgccctgaccaagaggatccgggtgggcctgcaggcccagcctgtgcctgatgagatcgtgaagaagatcctgggcaacaaggccaccttcagccccatcgtgacagtggagcccaggaggaggaagttccacaagcccatcaccatgaccatccctgtgcccccacccagcggggagggcgtgtccaatggctacaagggggacaccacccccaacctgcggctgctgtgcagcatcactggaggcaccagccctgcccagtgggaggacatcaccggcaccacccccctgaccttcatcaaggactgtgtgtccttcaccaccaacgtgtctgcccgcttctggctggccgactgccaccaggtgctggagaccgtgggcctggccacccagctgtaccgggagctgatctgtgtgccctacatggccaagtttgtggtgtttgccaagatgaatgaccctgtggagagcagcctgcgctgcttctgcatgacagatgacaaggtggacaagaccctggagcagcaggagaactttgaggaggtggcccggagcaaggacatcgaggtgctggagggcaagcccatctacgtggactgctacggcaacctggcccccctgaccaagggcggccagcagctggtgttcaacttctacagcttcaaggagaaccggctgcccttcagcatcaagatccgggacaccagccaggagccctgtggccgcctgtccttcctgaaggagcccaagaccaccaagggcctgccccagacagctgtgtgcaacctgaacatcaccctgcctgcccacaagaagattgagaagacagaccggcggcagagctttgccagcctggccctgaggaagcgctacagctacctgacagagcccggcatgagcccccagagcccctgtgagaggacagacatccgcatggccatcgtggccgaccacctgggcctgtcctggacagagctggcccgggagctgaacttctctgtggatgagatcaaccagatccgggtggagaaccccaacagcctcatcagccagagcttcatgctgctgaagaagtgggtgaccagagatggcaagaatgccaccacagatgccctgacctctgtgctgaccaagatcaacagaattgatattgtgaccctgctggagggccccatctttgattatggcaacatcagcggcaccaggagctttgctgatgagaacaacgtgttccatgaccctgtggatggctaccccagcctgcaggtggagctggagacccccaccggcctgcactacaccccacccacccccttccagcaggatgactacttcagtgacatcagcagcattgagagccccctgcggacccccagccggctgagtgatggcctggtgcccagccagggcaacatcgagcacagcgcagatggcccccctgtggtgacagcagaagatgccagcctggaggacagcaagctggaggacagcgtgcccctgacagagatgcctgaggccgtggatgtggatgagagccagctggagaatgtgtgcctgtcctggcagaatgagaccagcagcggcaacctggagagctgtgcccaggcccggcgggtgactggaggcctgctggaccggctggatgacagcccagaccagtgccgggacagcatcaccagctacctgaagggggaggccggcaagtttgaggccaacggcagccacacagagatcaccccagaggccaagaccaagagctacttccctgagagccagaatgatgtgggcaagcagagcaccaaggagaccctgaagcccaagatccacggcagcggccacgtggaggagcccgccagccccctggccgcctaccagaagagcctggaggagaccagcaagctgatcatcgaggagaccaagccctgtgtgcctgtgtccatgaagaagatgagcaggaccagccctgcagatggcaagccccggctgagcctgcacgaggaggagggcagcagcggcagcgagcagaagcagggcgagggcttcaaggtgaagaccaagaaggagatccgccacgtggagaagaagagccacagctag

SEQ ID NO: 81408 - DNA, 5586 bp, Artificial Sequence
  derived and/or modified sequence
atggccagcagcgccagcagcagccccgccggcaccgaggacagcgcgccagctcagggaggtttcggctccgattactctcgttcctcacgcaagagcgatgcgaatgcaagttacctccgtgccgcgcgtgcaggccacttggagaaagcccttgactacatcaaaaatggggtggacatcaacatttgcaaccagaacggcctcaatgcattacatctggcttccaaggagggtcacgtggaagttgtgtccgaactcttgcagagggaagcaaacgtggacgcagcaacgaagaagggaaacacagctctgcacatagcatcgctggcaggtcaagccgaagtagtaaaggtgcttgttaccaacggggctaacgtaaacgcccaatcgcagaacgggtttactcctctgtatatggcagcacaggagaaccatctcgaagtggtcaaatttctcttggataacggcgcttcccagtctctcgccacagaagacgggttcaccccactggctgtcgcactgcagcagggccacgaccaggttgtgagcttgctgctcgagaacgatactaaaggtaaggtaagactgccagcacttcacatcgccgccagaaaggatgacactaaagccgccgcactgctccttcaaaatgacaataacgcagacgtagagtctaaatcaggatttaccccgcttcatattgccgcacactacggaaacataaacgtggctaccctcctgctcaaccgcgccgccgccgtggacttcactgccaggaatgatattacacccctgcacgtcgctagtaaaagaggaaacgcgaatatggtcaagctcctgctcgatcggggggctaaaattgatgcgaagacccgagatggcctgacacccttgcattgtggcgctagatccggtcacgaacaggtggtcgagatgctactcgacagagcagcaccaatcctgagcaagacaaaaaacggactgtcccccctacacatggccacacagggagaccacctcaattgcgtgcagctgctcttacaacacaatgtgcctgtggacgatgtcacaaacgactacttgacagccctgcatgtggccgcgcattgtggacactacaaagtggccaaggtgttgctggacaagaaagccaaccctaatgcgaaggctctgaatggattcactccactgcacatagcatgcaagaagaaccgcataaaagtgatggagctgctactgaagcatggagccagtattcaagccgtgaccgagagcggactcacccctatccatgtggcggcttttatggggcacgttaatattgttagtcaacttatgcaccacggagctagccccaacacaacaaatgtgaggggcgaaactgcactgcacatggccgcaagatcagggcaggccgaagttgtaaggtatctggtgcaggacggggcgcaagtggaggccaaggccaaagatgaccagacacccctgcacatctctgccagactgggcaaggctgacattgtgcaacagctgctgcagcagggcgcatcccccaacgcagcaacaacaagcggctacacccctctccatctgtccgccagagaaggccacgaggatgtggctgccttccttctggatcacggcgcctcactgtcaattactacaaagaaaggctttaccccacttcacgttgctgcaaaatacggcaagctggaagttgccaacctgctgctgcagaaaagcgcgtctcctgatgctgctggtaaatccggcttaacccccctccacgtggctgctcattacgacaaccaaaaggtggcgctgctcctcctggatcaaggcgcctctccccacgcagctgccaagaacggatacacacctctccatattgctgccaaaaaaaaccagatggacatcgccacaacgctgctggaatacggggccgacgccaacgcagtgaccaggcagggcatcgcctctgtacatctcgcagcccaggaaggacacgtggacatggtgagtttgttactcggaaggaatgcaaacgttaacctaagcaataagtccggtcttacaccacttcatttggcagcgcaagaagatagagtgaatgtcgccgaggtcctcgtaaaccagggagcccacgtagacgcccagacgaagatgggatatacccccttacacgtcggatgtcattacgggaacatcaagatcgtgaacttcctcctgcaacactctgctaaagttaatgccaagacaaaaaacggatataccccgctccatcaggcagctcaacaaggacacacacacattataaacgtgctgctccagaacaacgcctcacctaacgaactcacggtcaacggcaacacggcccttggcatcgcacggcggttgggctatatcagcgtggttgataccctgaagattgtcactgaggaaactatgaccaccaccacggtcactgagaagcacaagatgaacgttccggagactatgaacgaagtgttggacatgtcagatgacgaagtgcgaaaggcaaatgcgcctgaaatgctctcagatggtgaatatatcagtgatgtggaagagggagaggatgctatgacgggagacactgacaagtacctgggcccacaagatctgaaggagctgggagacgatagccttccagctgaaggatatatggggttctctctgggggcccgttccgcaagtctgcggagtttctccagtgaccgatcctacaccctcaaccgatcttcgtacgccagggattcaatgatgatagaagaactgttggttccttctaaagaacagcatctgacttttactcgggagtttgactccgattcgctgagacactactcctgggccgcagatactcttgacaacgtgaatctcgttagctccccaatacacagtggttttctcgtgtcgtttatggtggacgctcgcgggggctccatgagaggctcccggcaccacggtatgagaataattataccacctcgtaagtgcaccgcgccaacgcggatcacctgcaggctggtgaagaggcacaaactcgccaaccctccaccaatggttgagggggaaggcctcgcgagtcggctggtggaaatgggaccagcaggcgcccagtttttaggaccggttatagtggagattccccacttcggttctatgagggggaaagagcgggaactgatagtccttcggtcagagaatggagagacctggaaagaacaccagtttgattctaaaaacgaagacctgacagaacttctcaacggcatggacgaagaacttgattctccagaggaactgggtaaaaagcgaatttgcaggatcatcaccaaggattttcctcagtattttgcagttgtcagcaggatcaagcaagaaagcaaccaaattggcccagagggaggcatcttgagcagcacaaccgttccgctggttcaggcttcattccccgaaggtgccctcactaagcggattagggtaggcctccaggcccaacccgtgcccgatgagattgttaagaaaattctgggcaacaaggccactttctccccaatcgtgaccgttgagccgaggcggaggaaattccataagcccataacaatgaccatcccggtgccacccccaagtggcgaaggcgtctctaacgggtataagggcgataccactcctaacttaagattgctttgttccattactggcgggacaagcccagcacaatgggaggacatcacaggcacaacacctttaacattcatcaaagactgtgtgtcattcacaacgaatgtgagcgcaagattctggctcgctgactgccaccaggtgctggaaacagtcgggctagctacacagctctaccgggagctcatttgtgtgccttacatggcaaagtttgttgtgttcgccaagatgaacgacccggtcgagtcaagcttaagatgtttctgcatgaccgatgataaggttgacaagacactcgaacaacaggagaatttcgaagaagtggccagaagcaaggacattgaagttctcgaaggtaaacctatttacgtcgactgctatggtaacctcgcccccctgactaaagggggccagcagctggtcttcaacttttacagtttcaaggaaaataggctacccttcagcattaagattagagatacatcccaggagccctgcggaagattaagctttctcaaagagcctaagactacgaaggggctgcctcagaccgccgtttgtaacctcaacatcaccctgccagcgcataaaaagattgaaaagacggataggaggcagtccttcgcctccctggccctcagaaaaagatactcctacctaacagagccagggatgagccctcaatctccctgtgaacggaccgatattaggatggctattgtggccgatcacctgggactgtcatggaccgagctcgcccgcgagttgaacttttctgtggatgagatcaatcaaatacgagtcgagaatcccaattctctcattagtcagagcttcatgcttctcaagaaatgggtgaccagagatggcaaaaatgccaccacggatgccctcaccagcgtgctgaccaagatcaatcggatcgacattgtcactcttctggaagggcccatcttcgattacggcaatatcagcgggacccggtctttcgcagatgagaacaatgtgtttcatgacccagtggacggatacccttcacttcaggtggagctggaaacacctacaggtctgcactacaccccaccaactcccttccagcaggatgactacttctccgacattagctccatcgaaagtcccctgagaacgccttctcgcctatcggacggcctggtgccttctcaaggcaatatcgagcactccgcggacggtccaccggtggtgaccgccgaagacgcttccctagaagactccaagctagaagactccgttcctcttacagagatgcccgaagccgtggatgtcgacgagagccaactggagaacgtctgtctctcctggcagaatgaaacctcttccggcaatctggaaagttgcgcgcaggccagaagggtgacgggtgggctcctcgacagactggatgatagcccagaccaatgtcgtgactcaattaccagctacctcaagggagaggctgggaaatttgaggcaaacgggtcccacacggaaattacacccgaagccaagacaaagtcctactttccagagagccaaaatgacgtggggaagcagagtactaaagagacactcaaaccgaagatccatggcagtgggcatgtagaggaacctgcatctccccttgccgcttaccaaaagtctctagaagaaacgagcaagctgataattgaagagaccaagccctgcgtccccgttagcatgaagaagatgagccgcacttctccagccgatggaaagcccaggctgtccctgcatgaggaggagggtagtagcggtagtgagcagaagcaaggggagggcttcaaggtgaaaactaagaaggagatccgacatgtcgagaagaagtctcacagctag

SEQ ID NO: 81409 - DNA, 7202 bp, Artificial Sequence
  derived and/or modified sequence
acagcaggaggaggataggccgcgctgggcgggcgtcgcggggccgcgcttggtgttcctgagccgcggccgaactttttcccaagaagtcccacgtttggaggcccgaggagcgggacggggaggagagactggagttcctggaaggagcagcagcagcagccccacaacatggcctcctccgcctcctcctctcccgcgggcaccgaggactccgctcctgcccagggtggctttggatcagattattcacgaagctctagaaagtctgatgccaatgcaagttacttaagagcagctcgagctggacaccttgaaaaggccctcgactacataaaaaatggagttgacatcaacatttgcaatcagaatgggttgaacgctctccaccttgcttccaaagaaggccatgtagaggttgtttctgagctgctgcagagagaagccaatgtggatgcagctacaaagaaaggaaacacagcattgcacatcgcatctttggctgggcaagcagaggtggtaaaagtcttggttacaaatggagccaatgtcaatgcacaatctcagaatggtttcacgccattgtatatggcagcccaggaaaatcacctggaagttgtcaagtttcttcttgacaatggtgcaagccagagcctagccacagaggatggcttcacaccattggcagtggctttgcaacaaggtcacgaccaagtcgtttcgctcctgctagagaatgacaccaaaggaaaagtgcgtctcccagctcttcatatcgcggcccgaaaagacgacacgaaagccgccgccctgctgctgcagaatgacaacaatgcagatgtggaatcaaagagtggcttcactccgctccacatagctgctcactatggaaatatcaatgtagccacgttgctgttaaaccgagcggctgctgtggatttcaccgcaaggaatgacatcactcctttacatgttgcatcaaaaagaggaaatgcaaatatggtaaaactattgctcgatcgaggagctaaaatcgatgccaaaaccagggatggtctgacaccactgcactgtggagcaaggagtggccacgagcaggtggtagaaatgttgcttgatcgagctgcccccattctttcaaaaaccaagaatggattatctccattgcacatggccacacaaggggatcatttaaactgcgtccagcttctcctccagcataatgtacccgtggatgatgtcaccaatgactacctgactgccctacacgtggctgcccactgtggccattacaaagttgccaaggttctcttggataagaaagctaaccccaatgccaaagccctgaatggctttacccctcttcatattgcctgcaagaagaatcgaattaaagtaatggaactccttctgaaacacggtgcatccatccaagctgtaaccgagtcgggccttaccccaatccatgttgctgccttcatggggcatgtaaatattgtatcacaactaatgcatcatggagcctcaccaaacaccaccaatgtgagaggagaaacagcactgcacatggcagctcgctccggccaagctgaagttgtgcggtatctggtacaagacggagctcaggtagaagctaaagctaaggatgaccaaacaccactccacatttcagcccgactggggaaagcagacatagtacaacagctgttgcagcaaggggcatctccaaatgcagccacaacttctgggtacaccccacttcacctttccgcccgagaggggcatgaggatgtggccgcgttccttttggatcatggagcgtctttatctataacaacaaagaaaggatttactcctcttcatgtggcagcaaaatatggaaagcttgaagtcgccaatctcctgctacagaaaagtgcatctccagatgctgctgggaagagcgggctaacaccactgcatgtagctgcacattacgataatcagaaagtggcccttctgcttttggaccaaggagcctcacctcacgcagccgcaaagaatggttatacgccactgcacatcgctgccaaaaagaaccagatggacatagcgacaactctgctggaatatggtgctgatgccaacgcagttacccggcaaggaattgcttccgtccatctcgcagctcaggaagggcacgtggacatggtgtcgctgctcctcggtagaaatgcgaatgtgaacctgagcaataagagcggcctgaccccactccatttggctgctcaagaagatcgagtgaatgtggcagaagtcctcgtaaaccaaggggctcatgtggacgcccagacaaagatgggatacacaccactgcatgtgggctgccactatggaaatatcaagattgttaatttcctgctccagcattctgcaaaagttaatgccaaaacaaagaatgggtatacgccattacatcaagcagcacagcaggggcatacgcatataataaatgtcttacttcagaacaacgcctcccccaatgaactcactgtgaatgggaatactgcccttggcattgcccggcgcctcggctacatctcagtagtggacaccctgaagatagtgaccgaagagaccatgaccacaactactgtcacagagaagcacaaaatgaatgttccagaaacgatgaatgaagttcttgatatgtctgatgatgaagttcgtaaagccaatgcccctgaaatgctcagtgatggcgaatatatctcagatgttgaagaaggtgaagatgcaatgaccggggacacagacaaatatcttgggccacaggaccttaaggaattgggtgatgattccctgcctgcagagggttacatgggctttagtctcggagcgcgttctgccagcctccgctccttcagttcggataggtcttacaccttgaacagaagctcctatgcacgggacagcatgatgattgaagaactccttgtgccatccaaagagcagcatctaacattcacaagggaatttgattcagattctcttagacattacagctgggctgcagacaccttagacaatgtcaatcttgtttcaagccccattcattctgggtttctggttagctttatggtggacgcgagagggggctccatgagaggaagccgtcatcacgggatgagaatcatcattcctccacgcaagtgtacggcccccactcgaatcacctgccgtttggtaaagagacataaactggccaacccaccccccatggtggaaggagagggattagccagtaggctggtagaaatgggtcctgcaggggcacaatttttaggccctgtcatagtggaaatccctcactttgggtccatgagaggaaaagagagagaactcattgttcttcgaagtgaaaatggtgaaacttggaaggagcatcagtttgacagcaaaaatgaagatttaaccgagttacttaatggcatggatgaagaacttgatagcccagaagagttagggaaaaagcgtatctgcaggattatcacgaaagatttcccccagtattttgcagtggtttcccggattaagcaggaaagcaaccagattggtcctgaaggtggaattctgagcagcaccacagtgccccttgttcaagcatctttcccagagggtgccctaactaaaagaattcgagtgggcctccaggcccagcctgttccagatgaaattgtgaaaaagatccttggaaacaaagcaacttttagcccaattgtcactgtggaaccaagaagacggaaattccataaaccaatcacaatgaccattccggtgcccccgccctcaggagaaggtgtatccaatggatacaaaggggacactacacccaatctgcgtcttctctgtagcattacagggggcacttcgcctgctcagtgggaagacatcacaggaacaactcctttgacgtttataaaagattgtgtctcctttacaaccaatgtttcagccagattttggcttgcagactgccatcaagttttagaaactgtggggttagccacgcaactgtacagagaattgatatgtgttccatatatggccaagtttgttgtttttgccaaaatgaatgatcccgtagaatcttccttgcgatgtttctgcatgacagatgacaaagtggacaaaactttagagcaacaagagaattttgaggaagtcgcaagaagcaaagatattgaggttctggaaggaaaacctatttatgttgattgttatggaaatttggccccacttaccaaaggaggacagcaacttgtttttaacttttattctttcaaagaaaatagactgccattttccatcaagattagagacaccagccaagagccctgtggtcgtctgtcttttctgaaagaaccaaagacaacaaaaggactgcctcaaacagcggtttgcaacttaaatatcactctgccagcacataaaaagattgagaaaacagatagacgacagagcttcgcatccttagctttacgtaagcgctacagctacttgactgagcctggaatgagtccacagagtccatgtgaacggacagatatcaggatggcaatagtagccgatcacctgggacttagttggacagaactggcaagggaactgaatttttcagtggatgaaatcaatcaaatacgtgtggaaaatccaaattctttaatttctcagagcttcatgttattaaaaaaatgggttaccagagacggaaaaaatgccacaactgatgccttaacttcggtcttgacaaaaattaatcgaatagatatagtgacactgctagaaggaccaatatttgattatggaaatatttcaggcaccagaagttttgcagatgagaacaatgttttccatgaccctgttgatggttatccttcccttcaagtggaactggaaacccccacagggttgcactacacaccacctacccctttccagcaagatgattattttagtgatatctctagcatagaatctccccttagaacccctagtagactgagtgatgggctagtgccttcccaggggaacatagagcattccgcagatggacctccagtcgtaactgcagaagacgcttccttagaagacagcaaactggaagactcagtgcctttaacagaaatgcctgaagcagtggatgtagatgagagccagttggagaatgtatgtctgagttggcagaatgagacatcaagtggaaacctagagtcctgcgctcaagctcgaagagtaactggtgggttactagatcgactggatgacagccctgaccagtgtagagattccattacctcatatctcaaaggagaagctggcaaatttgaagcaaatggaagccatacagaaatcactccagaagcaaagacaaaatcttactttccagaatcccaaaatgatgtaggaaaacagagtaccaaggaaactctgaaaccaaaaatacatggatctggtcatgttgaagaaccagcatcaccactagcagcatatcagaaatctctagaagaaaccagcaagcttataatagaagagactaaaccctgtgtgcctgtcagtatgaaaaagatgagtaggacttctccagcagatggcaagccaaggcttagcctccatgaagaagaggggtccagtgggtctgagcaaaagcagggagaaggttttaaggtgaaaacgaagaaagaaatccggcatgtggaaaagaagagccactcgtaacagcgaacggtcagtcaaggatcataagtttttactgccagtattgagaaattcgtggaagaaatgtcagcaggaagtaaaaattcaccgagaagtgtgtgtgtgttcgctgcttccacacattaatggcatgattttttttatgcaaaaagaaaagaaaagaaaaccacccacattttaatttagcatgagccaatttacagagcatggaaatcactttcatttccggattggcgcgtgtgcaattagcaatgcagtgtatatacaagaagccatgctgttaacagtttatctcaagtaatttggtgtcatttacaaaaggaagaaattcctgccatcagaagggacagaaggagatggaatgatcaaatcacagagaaacactaaaattactaaatctacaacagctcgccttatttttcttggacccaaactgtcagggtataaacactatttgtttcttttttaaaacatcgatagttttgctgtaaataataacactgtataaattctaacagaaaaatagaataaaatgttgataaggcactgcctcttagaacacaaacagaatattgcaaatgcatttaacaaataggggtctcaagtgacttcaccctagaagaggagggagggattctgggtgggggtgactcttcactgattcttgtatattagcaattataatgtttgtatatgcaaaactgctagcttgattttaaaaaaaaacaaatctttaaaatctgctgcaaatttaaataattcccaaaatgaggaattctgtagttctgtgaaaaatttttttcttcagaatactaatattttgatgcatgtgtatcaccttattttgattaaatcttttccaattttgcaaacactacagtatactgcaacacaaaagattttatctgtaaacacaaagcccttcatctaatatttgttgctattgccaatttttcaatgaaatgacctaaaaacaacaaaaaaaaataacctatacggtagttgctttagggggtggggggatgctatctgttagtgcttaaaagggggtaaatgcttgccgctttagaggtggatggtgctcataaaaggccccagtcgggggtatttaaaaaggactgaacagaaatccttagctagtagaatggcagcacgctgtaaaattattactgtattgtgtactggctataagatgtagacacctttcagtaagccaatcatttgtaaccattctagcagtgtcatattaggttaataaggctgctgtgttttaaagggcatttttatttgggttttggtgaaattctttaatttgttgattatattcacataaaatcagcattcattgacacatagctctaatgacatatgtatgaaaaaccatacactggatgacctagtcgattatttaagcataaaataaattgtgttaaactcttcaccta

SEQ ID NO: 81410 - DNA, 5585 bp, Artificial Sequence
  derived and/or modified sequence
atggcgtcatccgctagctcttcccccgctggcaccgaagatagtgctcctgcccaggggggatttggatccgattactcccgttcctccaggaagagcgacgccaacgcttcatatctgagagctgcaagggctggccacctggagaaggcgctggactacatcaagaatggcgtagacataaacatttgcaaccagaacggcctgaatgctctgcaccttgcctctaaagagggccatgtggaggtcgtgtcagagctcctccagcgcgaagccaatgtggacgcggctaccaagaaaggcaacactgccctccacatagcctctctggctgggcaggctgaagtggttaaagtgctggtgacaaatggagcaaacgttaacgcccagtcccagaacggctttacacctctgtatatggccgcacaggaaaaccatctcgaggtcgttaagttcttacttgataacggcgctagccagtccctggctacagaggacgggttcactccgcttgcagttgccctacagcaaggacatgaccaggtagtatctctgcttctggaaaacgatactaagggtaaggtcagactcccagccctgcatattgccgctcgaaaagacgacacgaaggccgcagccctgctccttcagaacgacaacaacgccgatgtggagtcaaagtccggatttaccccactccacatcgcagctcactatggcaatattaacgtggcaaccttgctgctgaatcgagccgcagccgttgactttaccgcccgaaatgacattacccctttgcacgtggcttccaagaggggcaacgcgaatatggtgaagctgctgctggatcgtggggctaaaatagacgcaaagacgcgggacggtttgacaccgcttcactgcggggcaagaagcggtcacgagcaggtggtggaaatgctgctggaccgggcagcccctattttaagcaagacaaaaaacgggcttagtcccctacacatggcgacccagggagaccatctgaactgcgtccaactcctattgcagcacaatgtcccggtggacgacgtcacgaacgattacctgacggccttgcacgtcgctgctcactgtggccactacaaagtggccaaggttctgctggataaaaaggctaaccccaacgcaaaagcattgaacggcttcaccccgttgcacattgcttgtaagaagaaccggataaaggtgatggagctattgcttaagcacggcgctagcattcaggccgtaacagaatccggactcacgcctattcatgttgcggctttcatgggacacgtgaatattgttagtcagctgatgcaccacggcgctagccccaatacaactaacgtgaggggcgaaaccgcgctccacatggccgcacggtccggccaggccgaggtggtcaggtatttggtccaggatggagcacaagtcgaggctaaggccaaggacgatcagacccctcttcacatctctgcacggttaggcaaggctgacatcgtccagcagttactgcagcagggagcatcccctaacgcagctacaactagcggctacactcctctccacctttcggcgagagagggccatgaagatgtggctgctttccttcttgatcacggcgcatcactctctatcacaactaaaaaaggattcacacctttgcatgttgctgctaaatacggcaaactcgaagttgccaatctgctcttgcagaagtctgcttcgccggatgcggcagggaaatcaggccttactccgcttcacgttgctgctcactatgataatcagaaggtggccctgctcctcctggatcagggtgcctcgccccacgccgctgctaagaacgggtatacacccctgcacatcgctgccaaaaagaatcagatggatatcgccaccacactacttgaatatggagccgacgccaatgctgttacacgccagggcatagcatccgtgcatcttgctgcacaggaaggacatgtggatatggtgtcacttttattgggcagaaatgccaacgtcaacctgtctaataagtctgggctgacacctctgcatctagccgcacaggaggacagagtcaacgtggctgaagttctcgttaaccagggcgcacacgtggacgcgcagactaagatgggctacactcctttgcacgtgggctgtcattacggcaatattaagattgttaacttcctgctgcagcactctgctaaagtgaatgcaaagaccaagaacggatatacgccactgcatcaggcagctcagcagggccacactcatataataaatgtcctactccagaataacgctagccctaatgagctgactgtgaacggcaacacagcactgggcatcgcgcgacgcttaggatacattagcgtggtggatacactcaaaatcgttaccgaagagacaatgactacaaccaccgttaccgaaaagcacaaaatgaacgtccctgagacaatgaatgaagtgttggacatgagcgacgacgaggtgaggaaggcgaatgctcccgaaatgttatccgatggcgaatatatctcggacgtggaagagggagaggatgctatgacaggtgataccgataagtacttgggcccacaggatctgaaagaactcggggacgatagtctccccgcagagggctacatgggcttcagtctgggcgctagatccgcatccctgcggagtttctcctccgatcggagctacacactgaacaggtcttcatacgccagggatagcatgatgatagaggagctattagtccccagtaaagaacagcacctaacattcactagagaattcgatagtgacagcctgagacattacagctgggcggctgatacactggacaacgtaaatctggtcagcagcccgatccattctggctttttggtgagctttatggtcgatgcaagggggggtagtatgcgcggatcgcgacaccacggaatgagaatcataattccaccccgtaaatgtacggcgcctacccgaataacctgtcgactggtgaagagacataagcttgcaaatcctcccccaatggtcgagggcgagggacttgccagtcgcctcgtggaaatgggtcccgctggcgcacagtttttaggcccagtgattgtcgagatcccacactttgggtctatgagggggaaagagcgcgaactgatagtactcagaagcgagaatggggaaacttggaaggaacaccagtttgactccaagaatgaggatttgacagaactgttaaacggaatggatgaagaactcgatagccctgaggagctgggcaagaaaaggatttgcagaataattaccaaggattttccccagtactttgctgtcgtgtctagaatcaaacaggagagcaaccagatcggtccggagggaggaatcctgagttccacgacggtgcccctagttcaggctagttttccagagggagccttgacaaaaaggatccgggtgggactgcaggcacaacccgtgcctgacgagatcgtgaagaaaatccttggcaataaggcaacattttcccccatcgttacagtagaacccaggcgtcgtaaattccacaagcctataactatgactattccagtacccccacctagcggtgaaggggtgagtaacggatataagggagatactacccccaacttgcggctcttatgctcaattaccggcggtacaagccctgcccagtgggaggacattacaggcacaaccccgctgacattcattaaggactgtgtaagttttactacaaatgtgtccgcacggttctggttggcagattgtcatcaagtgttggagactgtgggtctagcgacacagctatatcgtgagctaatctgtgtaccctacatggccaagttcgtggtctttgcaaagatgaacgaccccgtggagtcttccctccggtgcttttgcatgactgatgacaaggtagacaaaacccttgaacagcaagagaacttcgaggaagtggctcgtagtaaagacattgaggtgttggaggggaagcctatctacgtagactgctatggtaatcttgcgccactgaccaagggaggtcaacaattagtgtttaacttctactcattcaaagagaatcgactgcccttctctattaagatccgagatacatcacaagagccctgtggccgattgtccttcctaaaagaaccaaagaccaccaagggcctgcctcagaccgccgtttgcaaccttaatattaccctgcctgcccacaaaaagatcgagaaaactgaccgtagacaatcttttgccagcttggcacttaggaagagatacagctacctcaccgagcctggcatgagtccgcagtccccctgcgaacggacagatattagaatggccattgtggccgatcatttgggacttagctggaccgagcttgcacgagagctgaatttttccgtcgacgaaatcaaccagattcgggtcgagaatccaaatagtctcatatcccagtcattcatgttgctcaagaagtgggttacaagagacgggaaaaacgccaccacagacgccctcactagtgttctcaccaaaattaaccgtatcgacatagttactttgttagaaggcccaatcttcgactacggtaacataagcggcactcggagttttgctgacgaaaataacgtgtttcacgatcctgttgatggctacccctcgctgcaggtggaattagagactccaacgggactccactacacgcctcccacaccgttccagcaggacgattatttcagcgacatctccagcatcgaatctccgttaagaaccccgagcagactcagcgatgggctggtgccaagccagggcaacatcgaacactccgcagatgggcctccggtggtgacggcagaagacgcaagcctcgaagactcaaagcttgaagactctgttcccttaaccgaaatgccggaagccgtcgatgtagatgaatcacagttagagaacgtctgcctatcttggcagaatgagaccagttcaggaaacttagaatcctgcgcgcaagcccgtagagttacaggcggtctgttagaccgtctggatgactcaccagatcagtgtcgcgacagtatcacttcatacctgaaaggagaagcaggcaaatttgaagctaacggatcccacactgaaattactcccgaagccaaaacaaaatcatatttccctgaatcccagaatgatgtcggtaaacaaagcacaaaagaaactctcaaaccaaaaatccacggcagtggacacgttgaggagccagcaagtcctctagccgcataccagaagagcctcgaagagacgtcaaaactgatcattgaggaaaccaaaccatgcgtgcctgtgagcatgaaaaagatgagcagaacaagcccagcagacggcaaacccaggctcagcctgcatgaagaggagggcagctctgggtcggagcaaaaacagggggagggatttaaggtgaagaccaagaaggagatccgacacgtcgagaagaagagccactcata

SEQ ID NO: 81411 - DNA, 5586 bp, Artificial Sequence
  derived and/or modified sequence
atggccagcagcgccagcagcagccccgccggcaccgaggacagcgcccccgcccagggcggcttcggcagcgactacagcagaagcagcagaaagagcgacgccaacgccagctacctgagagccgccagagccggccacctggagaaggccctggactacatcaagaacggcgtggacatcaacatctgcaaccagaacggcctgaacgccctgcacctggccagcaaggagggccacgtggaggtggtgagcgagctgctgcagagagaggccaacgtggacgccgccaccaagaagggcaacaccgccctgcacatcgccagcctggccggccaggccgaggtggtgaaggtgctggtgaccaacggcgccaacgtgaacgcccagagccagaacggcttcacccccctgtacatggccgcccaggagaaccacctggaggtggtgaagttcctgctggacaacggcgccagccagagcctggccaccgaggacggcttcacccccctggccgtggccctgcagcagggccacgaccaggtggtgagcctgctgctggagaacgacaccaagggcaaggtgagactgcccgccctgcacatcgccgccagaaaggacgacaccaaggccgccgccctgctgctgcagaacgacaacaacgccgacgtggagagcaagagcggcttcacccccctgcacatcgccgcccactacggcaacatcaacgtggccaccctgctgctgaacagagccgccgccgtggacttcaccgccagaaacgacatcacccccctgcacgtggccagcaagagaggcaacgccaacatggtgaagctgctgctggacagaggcgccaagatcgacgccaagaccagagacggcctgacccccctgcactgcggcgccagaagcggccacgagcaggtggtggagatgctgctggacagagccgcccccatcctgagcaagaccaagaacggcctgagccccctgcacatggccacccagggcgaccacctgaactgcgtgcagctgctgctgcagcacaacgtgcccgtggacgacgtgaccaacgactacctgaccgccctgcacgtggccgcccactgcggccactacaaggtggccaaggtgctgctggacaagaaggccaaccccaacgccaaggccctgaacggcttcacccccctgcacatcgcctgcaagaagaacagaatcaaggtgatggagctgctgctgaagcacggcgccagcatccaggccgtgaccgagagcggcctgacccccatccacgtggccgccttcatgggccacgtgaacatcgtgagccagctgatgcaccacggcgccagccccaacaccaccaacgtgagaggcgagaccgccctgcacatggccgccagaagcggccaggccgaggtggtgagatacctggtgcaggacggcgcccaggtggaggccaaggccaaggacgaccagacccccctgcacatcagcgccagactgggcaaggccgacatcgtgcagcagctgctgcagcagggcgccagccccaacgccgccaccaccagcggctacacccccctgcacctgagcgccagagagggccacgaggacgtggccgccttcctgctggaccacggcgccagcctgagcatcaccaccaagaagggcttcacccccctgcacgtggccgccaagtacggcaagctggaggtggccaacctgctgctgcagaagagcgccagccccgacgccgccggcaagagcggcctgacccccctgcacgtggccgcccactacgacaaccagaaggtggccctgctgctgctggaccagggcgccagcccccacgccgccgccaagaacggctacacccccctgcacatcgccgccaagaagaaccagatggacatcgccaccaccctgctggagtacggcgccgacgccaacgccgtgaccagacagggcatcgccagcgtgcacctggccgcccaggagggccacgtggacatggtgagcctgctgctgggcagaaacgccaacgtgaacctgagcaacaagagcggcctgacccccctgcacctggccgcccaggaggacagagtgaacgtggccgaggtgctggtgaaccagggcgcccacgtggacgcccagaccaagatgggctacacccccctgcacgtgggctgccactacggcaacatcaagatcgtgaacttcctgctgcagcacagcgccaaggtgaacgccaagaccaagaacggctacacccccctgcaccaggccgcccagcagggccacacccacatcatcaacgtgctgctgcagaacaacgccagccccaacgagctgaccgtgaacggcaacaccgccctgggcatcgccagaagactgggctacatcagcgtggtggacaccctgaagatcgtgaccgaggagaccatgaccaccaccaccgtgaccgagaagcacaagatgaacgtgcccgagaccatgaacgaggtgctggacatgagcgacgacgaggtgagaaaggccaacgcccccgagatgctgagcgacggcgagtacatcagcgacgtggaggagggcgaggacgccatgaccggcgacaccgacaagtacctgggcccccaggacctgaaggagctgggcgacgacagcctgcccgccgagggctacatgggcttcagcctgggcgccagaagcgccagcctgagaagcttcagcagcgacagaagctacaccctgaacagaagcagctacgccagagacagcatgatgatcgaggagctgctggtgcccagcaaggagcagcacctgaccttcaccagagagttcgacagcgacagcctgagacactacagctgggccgccgacaccctggacaacgtgaacctggtgagcagccccatccacagcggcttcctggtgagcttcatggtggacgccagaggcggcagcatgagaggcagcagacaccacggcatgagaatcatcatcccccccagaaagtgcaccgcccccaccagaatcacctgcagactggtgaagagacacaagctggccaaccccccccccatggtggagggcgagggcctggccagcagactggtggagatgggccccgccggcgcccagttcctgggccccgtgatcgtggagatcccccacttcggcagcatgagaggcaaggagagagagctgatcgtgctgagaagcgagaacggcgagacctggaaggagcaccagttcgacagcaagaacgaggacctgaccgagctgctgaacggcatggacgaggagctggacagccccgaggagctgggcaagaagagaatctgcagaatcatcaccaaggacttcccccagtacttcgccgtggtgagcagaatcaagcaggagagcaaccagatcggccccgagggcggcatcctgagcagcaccaccgtgcccctggtgcaggccagcttccccgagggcgccctgaccaagagaatcagagtgggcctgcaggcccagcccgtgcccgacgagatcgtgaagaagatcctgggcaacaaggccaccttcagccccatcgtgaccgtggagcccagaagaagaaagttccacaagcccatcaccatgaccatccccgtgcccccccccagcggcgagggcgtgagcaacggctacaagggcgacaccacccccaacctgagactgctgtgcagcatcaccggcggcaccagccccgcccagtgggaggacatcaccggcaccacccccctgaccttcatcaaggactgcgtgagcttcaccaccaacgtgagcgccagattctggctggccgactgccaccaggtgctggagaccgtgggcctggccacccagctgtacagagagctgatctgcgtgccctacatggccaagttcgtggtgttcgccaagatgaacgaccccgtggagagcagcctgagatgcttctgcatgaccgacgacaaggtggacaagaccctggagcagcaggagaacttcgaggaggtggccagaagcaaggacatcgaggtgctggagggcaagcccatctacgtggactgctacggcaacctggcccccctgaccaagggcggccagcagctggtgttcaacttctacagcttcaaggagaacagactgcccttcagcatcaagatcagagacaccagccaggagccctgcggcagactgagcttcctgaaggagcccaagaccaccaagggcctgccccagaccgccgtgtgcaacctgaacatcaccctgcccgcccacaagaagatcgagaagaccgacagaagacagagcttcgccagcctggccctgagaaagagatacagctacctgaccgagcccggcatgagcccccagagcccctgcgagagaaccgacatcagaatggccatcgtggccgaccacctgggcctgagctggaccgagctggccagagagctgaacttcagcgtggacgagatcaaccagatcagagtggagaaccccaacagcctgatcagccagagcttcatgctgctgaagaagtgggtgaccagagacggcaagaacgccaccaccgacgccctgaccagcgtgctgaccaagatcaacagaatcgacatcgtgaccctgctggagggccccatcttcgactacggcaacatcagcggcaccagaagcttcgccgacgagaacaacgtgttccacgaccccgtggacggctaccccagcctgcaggtggagctggagacccccaccggcctgcactacaccccccccacccccttccagcaggacgactacttcagcgacatcagcagcatcgagagccccctgagaacccccagcagactgagcgacggcctggtgcccagccagggcaacatcgagcacagcgccgacggcccccccgtggtgaccgccgaggacgccagcctggaggacagcaagctggaggacagcgtgcccctgaccgagatgcccgaggccgtggacgtggacgagagccagctggagaacgtgtgcctgagctggcagaacgagaccagcagcggcaacctggagagctgcgcccaggccagaagagtgaccggcggcctgctggacagactggacgacagccccgaccagtgcagagacagcatcaccagctacctgaagggcgaggccggcaagttcgaggccaacggcagccacaccgagatcacccccgaggccaagaccaagagctacttccccgagagccagaacgacgtgggcaagcagagcaccaaggagaccctgaagcccaagatccacggcagcggccacgtggaggagcccgccagccccctggccgcctaccagaagagcctggaggagaccagcaagctgatcatcgaggagaccaagccctgcgtgcccgtgagcatgaagaagatgagcagaaccagccccgccgacggcaagcccagactgagcctgcacgaggaggagggcagcagcggcagcgagcagaagcagggcgagggcttcaaggtgaagaccaagaaggagatcagacacgtggagaagaagagccacagctag

SEQ ID NO: 81412 - protein, 1868 aa, Artificial Sequence
  derived and/or modified sequence
MSEEPKEKNAKPAHRKRKGKKSDANASYLRAARAGHLEKALDYIKNGVDINICNQNGLNALHLASKEGHVEVVSELLQREANVDAATKKGNTALHIASLAGQAEVVKVLVTNGANVNAQSQNGFTPLYMAAQENHLEVVKFLLDNGASQSLATEDGFTPLAVALQQGHDQVVSLLLENDTKGKVRLPALHIAARKDDTKAAALLLQNDNNADVESKSGFTPLHIAAHYGNINVATLLLNRAAAVDFTARNDITPLHVASKRGNANMVKLLLDRGAKIDAKTRDGLTPLHCGARSGHEQVVEMLLDRAAPILSKTKNGLSPLHMATQGDHLNCVQLLLQHNVPVDDVTNDYLTALHVAAHCGHYKVAKVLLDKKANPNAKALNGFTPLHIACKKNRIKVMELLLKHGASIQAVTESGLTPIHVAAFMGHVNIVSQLMHHGASPNTTNVRGETALHMAARSGQAEVVRYLVQDGAQVEAKAKDDQTPLHISARLGKADIVQQLLQQGASPNAATTSGYTPLHLSAREGHEDVAAFLLDHGASLSITTKKGFTPLHVAAKYGKLEVANLLLQKSASPDAAGKSGLTPLHVAAHYDNQKVALLLLDQGASPHAAAKNGYTPLHIAAKKNQMDIATTLLEYGADANAVTRQGIASVHLAAQEGHVDMVSLLLGRNANVNLSNKSGLTPLHLAAQEDRVNVAEVLVNQGAHVDAQTKMGYTPLHVGCHYGNIKIVNFLLQHSAKVNAKTKNGYTPLHQAAQQGHTHIINVLLQNNASPNELTVNGNTALGIARRLGYISVVDTLKIVTEETMTTTTVTEKHKMNVPETMNEVLDMSDDEVRKANAPEMLSDGEYISDVEEGNRCTWYKIPKVQEFTVKSEDAMTGDTDKYLGPQDLKELGDDSLPAEGYMGFSLGARSASLRSFSSDRSYTLNRSSYARDSMMIEELLVPSKEQHLTFTREFDSDSLRHYSWAADTLDNVNLVSSPIHSGFLVSFMVDARGGSMRGSRHHGMRIIIPPRKCTAPTRITCRLVKRHKLANPPPMVEGEGLASRLVEMGPAGAQFLGPVIVEIPHFGSMRGKERELIVLRSENGETWKEHQFDSKNEDLTELLNGMDEELDSPEELGKKRICRIITKDFPQYFAVVSRIKQESNQIGPEGGILSSTTVPLVQASFPEGALTKRIRVGLQAQPVPDEIVKKILGNKATFSPIVTVEPRRRKFHKPITMTIPVPPPSGEGVSNGYKGDTTPNLRLLCSITGGTSPAQWEDITGTTPLTFIKDCVSFTTNVSARFWLADCHQVLETVGLATQLYRELICVPYMAKFVVFAKMNDPVESSLRCFCMTDDKVDKTLEQQENFEEVARSKDIEVLEGKPIYVDCYGNLAPLTKGGQQLVFNFYSFKENRLPFSIKIRDTSQEPCGRLSFLKEPKTTKGLPQTAVCNLNITLPAHKKIEKTDRRQSFASLALRKRYSYLTEPGMSPQSPCERTDIRMAIVADHLGLSWTELARELNFSVDEINQIRVENPNSLISQSFMLLKKWVTRDGKNATTDALTSVLTKINRIDIVTLLEGPIFDYGNISGTRSFADENNVFHDPVDGYPSLQVELETPTGLHYTPPTPFQQDDYFSDISSIESPLRTPSRLSDGLVPSQGNIEHSADGPPVVTAEDASLEDSKLEDSVPLTEMPEAVDVDESQLENVCLSWQNETSSGNLESCAQARRVTGGLLDRLDDSPDQCRDSITSYLKGEAGKFEANGSHTEITPEAKTKSYFPESQNDVGKQSTKETLKPKIHGSGHVEEPASPLAAYQKSLEETSKLIIEETKPCVPVSMKKMSRTSPADGKPRLSLHEEEGSSGSEQKQGEGFKVKTKKEIRHVEKKSHS

SEQ ID NO: 81413 - DNA, 5607 bp, Artificial Sequence
  derived and/or modified sequence
atgtcggaagagcccaaggaaaaaaatgccaagcccgcccatcgcaaaagaaaggggaaaaaaagtgacgccaatgcgagctacttgagggcggctagggccggacatttagaaaaagccctcgattatattaagaacggcgttgacatcaatatatgtaatcagaatggcctcaatgccttgcacttagcttccaaagaaggccacgtggaggtagtgagcgagctgctccaacgggaagccaacgtggacgccgcgactaaaaaaggtaatacggccctgcatattgcctccctggccggacaggccgaagttgtcaaggtcctcgttacaaacggagcaaatgtgaatgcccaatctcagaatgggttcaccccactgtacatggcagctcaggagaaccatctcgaagttgtaaagttcttgctggataatggggctagtcagtctttggccactgaggatggctttacacccttggcagtggccctccagcagggacacgatcaggtggtgtctctgctccttgaaaatgacactaagggaaaggtgcgcttgccggcgctgcacatcgctgcccggaaggatgacacaaaggccgcagctctcctattgcaaaacgacaacaacgccgatgtagaatcaaaaagtggctttactccccttcatatcgccgctcactatggtaatatcaatgtggccaccctcctgctgaaccgagctgccgctgtagactttacagcgcggaacgatataacccctctccacgtcgctagcaagcgagggaatgccaacatggttaagctgttgctcgaccggggcgcgaagattgacgctaaaacccgggatgggctgaccccgctacactgcggagccaggtctgggcacgaacaggtggttgagatgttgcttgatagggcagccccaattctgtctaaaaccaagaacgggctcagccccctgcatatggctacccagggagatcacttaaattgtgtgcagctcctcttacagcacaatgtcccagtcgacgatgttacaaatgactatctgacagccctgcatgtagctgcccactgcgggcactacaaggtagctaaagttttgcttgacaagaaggctaatcccaatgctaaggcgcttaatgggttcacccctttacatattgcctgtaagaagaatcggataaaagtgatggagctcctgttaaagcacggtgcttcaattcaggccgtcacagaatccgggttgacaccgatccatgtcgctgccttcatgggacacgttaacattgtcagccagctgatgcaccatggtgcaagccccaataccaccaacgtccgcggggagaccgcattgcatatggccgccagaagcggccaagctgaagtggtgagatatttggtacaggatggggcgcaggtagaagccaaagccaaagacgaccagacacccctgcacatatccgcgcgcctcggcaaggccgatatcgtccaacagctgttgcaacaaggcgcatcgccaaatgccgctaccacatctggctacaccccccttcaccttagcgcacgtgagggacacgaggacgtcgccgcttttctactggatcacggagctagcctgtccatcactaccaaaaagggtttcacgccattgcacgtcgcagccaagtacggaaagttggaggtggcaaaccttctgcttcaaaaaagcgcctctcctgatgccgccggaaagtccggcttaacacctttgcacgtggctgcacactacgacaaccagaaagtggccctccttctgttggaccagggagcgtcaccgcatgcagctgccaagaatggctacacccctctacatatagcagccaaaaagaaccagatggacatcgcaacaacactcttagaatatggagcggacgcaaatgcagttactcggcagggcatcgcaagtgtgcatctggctgctcaggagggccatgtggacatggtgtccctcctactgggccggaacgctaacgtcaatctgagcaataagtccgggctgactcctttgcatctggctgctcaggaggacagagtgaatgtggccgaggtcctggtaaatcagggggcccatgtggacgcccagacgaaaatgggttatactcctttgcatgtgggctgtcactatggtaacattaagatcgtgaattttcttttacagcacagcgcgaaagtgaacgccaagacgaaaaacggatacacacccctgcaccaagccgcccaacaaggccacacgcacatcattaatgtgctgctgcagaataacgcttcgcccaacgagctgaccgtaaacggcaacactgccctaggaattgctcgccgccttggttacatatccgtggtggacactctgaagattgtaacagaagagactatgaccactacaacggtaacagagaaacacaagatgaacgtcccagaaaccatgaacgaggtgctcgacatgtccgacgacgaggtacggaaagccaatgcccctgagatgctgagtgatggtgagtacataagtgacgtggaagaagggaacaggtgcacttggtataagatccctaaggtgcaagagtttacggtcaagtcagaagacgccatgaccggtgataccgataagtacctggggccccaggacctaaaggagctgggggacgacagtctgcccgccgaaggatacatggggtttagtctaggcgcgcgctctgccagcctcaggagtttctcctccgatcggtcttatactctaaataggtcgtcatatgcccgcgacagcatgatgattgaggaactcctggttccttctaaagagcaacacctaacgtttactcgcgagttcgactctgacagcctgcgccactacagctgggcagcagacacactcgataatgtcaaccttgtctctagccctattcactccgggttcctcgttagctttatggtggatgcccgcggcggaagtatgcgcggaagccgtcatcacggcatgcgcatcatcatcccccccagaaagtgtaccgccccgacccggattacctgccgcctggtgaagaggcataaactggcaaatccccccccaatggtggagggtgaagggctggccagcaggctggtggaaatgggcccagccggcgctcagttcctggggccagtgatcgtcgaaatccctcacttcgggagtatgagaggcaaagagcgagagttgatcgtcctacgcagcgagaacggcgagacatggaaagagcatcagttcgattccaagaacgaagatctgactgagttgcttaacggtatggacgaagaactcgactcgccggaggagctgggcaaaaaaaggatctgccggataatcacaaaggattttcctcagtacttcgccgtagtctctcgaatcaagcaagagtccaaccagatcggaccggagggcggaatcctgtcgagtaccactgttcccctcgtccaggccagctttcctgaaggtgccctcaccaagcgtatcagagtgggcctccaggcgcagcctgtacccgacgagattgtgaaaaaaatcttggggaacaaggctactttctcacccatagttacagtcgaaccacgtcggcggaagttccacaaacccattacaatgacaattcctgttccccctcctagtggcgaaggcgttagtaatggttacaaaggggacaccacccctaatctgcggctgctgtgcagtatcacaggtggcaccagccctgcccagtgggaggacattacaggtaccacgccactgacctttatcaaagactgcgtgtccttcactaccaatgttagcgcccgattttggctcgctgactgtcaccaggtattggaaacagtaggccttgccacacaactgtatcgagagctgatttgtgttccttatatggccaagtttgttgtattcgcaaaaatgaatgaccctgtcgaatcatcgttgagatgtttctgtatgaccgacgacaaagtagacaagacactggaacaacaggaaaacttcgaggaggtcgcaaggtccaaggacatagaagtgctggagggcaaaccaatctacgtggactgctacggaaacctggccccattgacgaagggcgggcagcaactagtgtttaacttctactccttcaaagaaaatcgactgcccttcagcataaagataagggacactagtcaggagccctgcgggaggctgtccttcttgaaggagcccaagacaacaaaaggcctgccccagaccgctgtctgcaatctgaacatcactttaccagcccataagaaaatcgagaagacagacaggcggcagtcatttgcgtcactggccctgcggaaacgctatagttacttaactgaacccggcatgtcgccccagagcccctgcgaaaggactgacatccgcatggctatcgtggccgaccacttgggcctatcctggacggaactcgccagggagctcaatttcagcgtggacgagataaatcagatccgggtggaaaacccaaactccttgataagtcagtcttttatgttgctaaagaagtgggtcacaagggatgggaaaaatgccactaccgatgctctgacatcagtgctgactaagatcaataggatcgacatcgtgacactcctagaggggccgatttttgactatggcaacattagcggcacgaggtcttttgccgatgaaaataacgtctttcacgacccagtcgacggctatcctagcctgcaggtcgaactcgagaccccaacgggattacactacacacctccaaccccattccagcaagacgattacttttccgatatttcctcaatcgaatcaccactcagaacaccaagtagattatcagacggactggtgccatcccagggcaatattgagcacagcgctgatggaccacccgtcgtaaccgctgaggatgcatccttggaggattccaagctggaagatagcgtgccattgaccgaaatgcccgaagccgtcgacgttgatgagagtcaactggagaatgtctgtttgagctggcaaaacgagacttcttctggtaatcttgaatcatgtgcgcaggctcggagggtgacgggcggccttctggaccgtctggacgacagtcctgaccaatgtagagatagtataacctcttatctgaagggcgaggcgggcaagttcgaagctaatgggtcccacactgagatcacccctgaggcaaagaccaagagctactttcccgaatcccagaatgatgtcggtaagcagagcaccaaggagactttgaagccaaaaatacacggaagcggtcacgtggaagagcctgcttctccgctcgcagcttaccagaaatccctggaggagacatccaaattgatcattgaagagaccaagccctgtgttcctgtaagcatgaagaagatgtcaagaacttctccagctgatggaaagccccgtctgagtctacacgaggaggagggatccagtggctctgagcaaaaacagggagaaggcttcaaagttaagacaaagaaagaaatcaggcacgtggaaaagaagtctcacagttag

SEQ ID NO: 81414 - DNA, 5607 bp, Artificial Sequence
  derived and/or modified sequence
atgtctgaggagcccaaggagaagaatgccaagccagcccacaggaagaggaagggcaagaagagtgatgccaatgccagctacctgcgggccgcccgggccggccacctggagaaggccctggactacatcaagaatggagtggacatcaacatctgcaaccagaatggcctgaatgccctgcacctggccagcaaggagggccacgtggaggtggtgtctgagctgctgcagcgggaggccaacgtggatgctgccaccaagaagggcaacacagccctgcacatcgccagcctggccggccaggccgaggtggtgaaggtgctggtgaccaacggggccaacgtgaatgcccagagccagaatggcttcacccccctgtacatggccgcccaggagaaccacctggaggtggtgaagttcctgctggacaatggagccagccagagcctggccacagaagatggcttcacccccctggccgtggccctgcagcagggccatgaccaggtggtgtccctgctgctggagaatgacaccaagggcaaggtgcggctgcctgccctgcacatcgccgccaggaaggatgacaccaaggctgctgccctgctgctgcagaatgacaacaatgctgatgtggagagcaagagcggcttcacccccctgcacatcgccgcccactacggcaacatcaacgtggccaccctgctgctgaacagagctgctgctgtggacttcaccgccagaaatgacatcacccccctgcacgtggccagcaagagaggaaatgccaacatggtgaagctgctgctggacagaggagccaagattgatgccaagaccagagatggcctgacccccctgcactgtggggcccggagcggccacgagcaggtggtggagatgctgctggacagagctgcccccatcctgagcaagaccaagaatggcctgagccccctgcacatggccacccagggcgaccacctgaactgtgtgcagctgctgctgcagcacaacgtgcctgtggatgatgtgaccaatgactacctgacagccctgcacgtggccgcccactgcggccactacaaggtggccaaggtgctgctggacaagaaggccaaccccaatgccaaggccctgaatggcttcacccccctgcacatcgcctgcaagaagaaccgcatcaaggtgatggagctgctgctgaagcatggagccagcatccaggccgtgacagaaagtggcctgacccccatccacgtggccgccttcatgggccacgtgaacatcgtgtcccagctgatgcaccacggggccagccccaacaccaccaacgtgcggggggagacagccctgcacatggccgcccggagcggccaggccgaggtggtgcgctacctggtgcaggatggagcccaggtggaggccaaggccaaggatgaccagacccccctgcacatcagcgcccggctgggcaaggctgacatcgtgcagcagctgctgcagcagggcgccagccccaatgctgccaccaccagcggctacacccccctgcacctgagcgcccgggagggccatgaagatgtggccgccttcctgctggaccatggagccagcctgagcatcaccaccaagaagggcttcacccccctgcacgtggccgccaagtatggcaagctggaggtggccaacctgctgctgcagaagagcgccagcccagatgctgctgggaagagcggcctgacccccctgcacgtggccgcccactatgacaaccagaaggtggccctgctgctgctggaccagggcgccagcccccatgctgctgccaagaatggctacacccccctgcacatcgccgccaagaagaaccagatggacatcgccaccaccctgctggagtatggagcagatgccaatgctgtgacccggcagggcatcgcctctgtgcacctggccgcccaggagggccacgtggacatggtgtccctgctgctgggcagaaatgccaacgtgaacctgagcaacaagagcggcctgacccccctgcacctggccgcccaggaggacagagtgaatgtggccgaggtgctggtgaaccagggcgcccacgtggatgcccagaccaagatgggctacacccccctgcacgtgggctgccactacggcaacatcaagatcgtgaacttcctgctgcagcacagcgccaaggtgaatgccaagaccaagaatggctacacccccctgcaccaggccgcccagcagggccacacccacatcatcaacgtgctgctgcagaacaatgccagccccaatgagctgactgtgaatggaaacacagccctgggcatcgcccggcggctgggctacatctctgtggtggacaccctgaagatcgtgacagaggagaccatgaccaccaccaccgtgacagagaagcacaagatgaatgtgcctgagaccatgaatgaggtgctggacatgtctgatgatgaggtgaggaaggccaatgcccctgagatgctgagtgatggagagtacatcagtgatgtggaggagggcaaccgctgcacctggtacaagatccccaaggtgcaggagttcaccgtgaagtcagaagatgccatgaccggggacacagacaagtacctgggcccccaggacctgaaggagctgggagatgacagcctgcctgctgagggctacatgggcttcagcctgggcgcccggagcgccagcctgcgctccttcagcagtgacaggagctacaccctgaacagaagcagctatgcccgggacagcatgatgattgaggagctgctggtgcccagcaaggagcagcacctgaccttcacccgggagtttgacagcgacagcctgcggcactacagctgggccgctgacaccctggacaacgtgaacctggtgagcagccccatccacagcggcttcctggtgtccttcatggtggatgcccggggcggctccatgaggggcagccgccaccacggcatgaggatcatcatcccccccaggaagtgcacagcccccacccgcatcacctgccgcctggtgaagaggcacaagctggccaaccccccacccatggtggagggggagggcctggccagccggctggtggagatgggccctgctggggcccagttcctgggccctgtgattgtggagatcccccacttcggctccatgaggggcaaggagcgggagctgattgtgctgcggagtgaaaatggagagacctggaaggagcaccagtttgacagcaagaatgaagacctgacagagctgctgaatggcatggatgaggagctggacagccctgaggagctgggcaagaagaggatctgccgcatcatcaccaaggacttcccccagtactttgctgtggtgagccgcatcaagcaggagagcaaccagatcggccctgagggcggcatcctgagcagcaccaccgtgcccctggtgcaggccagcttccctgagggcgccctgaccaagaggatccgggtgggcctgcaggcccagcctgtgcctgatgaaattgtgaagaagatcctgggcaacaaggccaccttcagccccatcgtgacagtggagcccaggaggaggaagttccacaagcccatcaccatgaccatccctgtgcccccaccttctggagagggcgtgtccaatggctacaagggggacaccacccccaacctgcggctgctgtgcagcatcaccggcggcaccagccctgcccagtgggaggacatcaccggcaccacccccctgaccttcatcaaggactgtgtgtccttcaccaccaacgtgtctgcccgcttctggctggccgactgccaccaggtgctggagaccgtgggcctggccacccagctgtaccgggagctgatctgtgtgccctacatggccaagtttgtggtgtttgccaagatgaatgaccctgtggagagcagcctgcgctgcttctgcatgacagatgacaaggtggacaagaccctggagcagcaggagaactttgaggaggtggcccggagcaaggacatcgaggtgctggagggcaagcccatctacgtggactgctacggcaacctggcccccctgaccaagggcggccagcagctggtgttcaacttctacagcttcaaggaaaatcggctgcccttcagcatcaagatccgggacaccagccaggagccctgtggccgcctgtccttcctgaaggagcccaagaccaccaagggcctgccccagacagctgtgtgcaacctgaacatcaccctgcctgcccacaagaagattgagaagacagaccggcggcagagctttgccagcctggccctgaggaagcgctacagctacctgacagagcccggcatgagcccccagagcccctgtgagaggacagacatccgcatggccatcgtggccgaccacctgggcctgtcctggacagagctggcccgggagctgaacttctctgtggatgagatcaaccagatccgggtggagaaccccaacagcctcatcagccagagcttcatgctgctgaagaagtgggtgaccagagatggcaagaatgccaccacagatgccctgacctctgtgctgaccaagatcaacagaattgacatcgtgaccctgctggagggccccatctttgattatggcaacatcagcggcaccaggagctttgctgatgaaaataatgtgttccatgaccctgtggatggctaccccagcctgcaggtggagctggagacccccaccggcctgcactacaccccacccacccccttccagcaggatgactacttcagtgacatcagcagcattgagagccccctgcggacccccagccggctgagtgatggcctggtgcccagccagggcaacatcgagcacagcgcagatggcccccctgtggtgacagcagaagatgccagcctggaggacagcaagctggaggacagcgtgcccctgacagagatgcctgaggccgtggatgtggatgagagccagctggagaatgtgtgcctgtcctggcagaatgagaccagcagcggcaacctggagagctgtgcccaggcccggcgggtgactggaggcctgctggaccggctggatgacagcccagaccagtgccgggacagcatcaccagctacctgaagggggaggccggcaagtttgaggccaacggcagccacacagagatcaccccagaggccaagaccaagagctacttccctgagagccagaatgatgtgggcaagcagagcaccaaggagaccctgaagcccaagatccacggcagcggccacgtggaggagcccgccagccccctggccgcctaccagaagagcctggaggagaccagcaagctgatcatcgaggagaccaagccctgtgtgcctgtgtccatgaagaagatgagcaggaccagccctgcagatggcaagccccggctgagcctgcacgaggaggagggcagcagcggcagcgagcagaagcagggcgagggcttcaaggtgaagaccaagaaggagatcagacatgtggagaagaagagccacagctag

SEQ ID NO: 81415 - DNA, 5607 bp, Artificial Sequence
  derived and/or modified sequence
atgagcgaggagcccaaggagaagaacgccaagcccgcccaccggaaacgtaagggaaaaaaaagcgacgccaatgccagttacttacgcgcagcgcgggcaggtcatttagaaaaagccctcgattatatcaagaacggagtcgatataaacatttgtaatcagaacgggctcaatgcactgcacctggcctctaaagaggggcacgttgaagtggtgtcagaattgctccaacgagaggccaacgtagacgcagctactaaaaaggggaacacagccctccacatcgcatctttggctgggcaggctgaagtcgtgaaggtacttgtaacaaacggcgcaaacgtgaatgctcagtctcaaaacggcttcacacctctgtacatggcagctcaggagaatcaccttgaggtagttaaatttcttctggacaatggcgcttctcagagcctagcgaccgaggacggttttactcccttggccgtggctctgcagcagggccatgatcaggttgtgtccctgctgcttgaaaatgatactaaaggcaaggtcagattgcctgctctgcacattgctgccagaaaagatgatacaaaagcagccgccctcctgcttcagaatgataataacgccgacgtggaaagcaaatcaggcttcactccactccacattgccgcacattatggcaatatcaatgtggccaccctgttgctgaatcgggccgctgcagtggacttcactgccagaaatgacatcactccccttcatgtcgctagtaaaagaggcaacgctaacatggtgaaactgcttctagaccggggtgcgaaaatcgatgctaagacgagggacgggttgactcccctccattgcggggcccgttccggccatgagcaggtggtggaaatgctgctggaccgggccgccccaatactgtcaaaaactaagaacgggctctctcctctgcacatggccacgcagggggaccatttgaactgcgtacagctcttactgcagcacaacgtgccagtggatgatgtcacgaatgattatctcacagccctgcacgtggcagcccactgcggacactacaaagtagccaaggtgctgctcgataagaaagcgaaccccaacgccaaggcactgaacggcttcacacccttgcacatcgcttgtaaaaagaacaggataaaagtaatggagctgctgctaaagcatggagcctcgattcaggccgtgactgagtcggggttaacccctatccacgtggctgctttcatggggcacgtcaacattgtcagccagctaatgcatcatggggcctcccctaatacgactaacgtccgcggggaaaccgccttgcatatggcggctcgttcaggccaagctgaagtggtccggtacctcgtgcaagacggcgcccaagttgaagctaaggctaaagatgaccagacgccgctgcacatcagcgctcggcttggaaaggctgatatcgttcagcaacttctgcagcagggcgctagtccaaacgccgcgaccacatccggctacactcctctccacctcagtgcacgcgaggggcatgaagatgtggcggcattcctgctggaccacggggctagcctgagtattactacaaagaaagggtttactccgctgcatgttgccgccaagtacggcaaactggaggtcgccaacctcctcctacagaagagcgccagcccagatgccgcaggtaaaagcgggctgacgcctctgcacgtcgctgcccactacgacaaccaaaaagttgccttactgcttcttgaccaaggcgcaagccctcatgcggccgcaaagaacggatatacgcccctccacatagccgcaaagaagaatcaaatggacattgcaacaacactgttggaatatggcgcagatgccaacgccgtgacgcgccaagggatcgcatctgtgcatctcgcagcccaggaaggccacgtcgatatggtttccctgctccttgggcggaacgccaacgtgaatttgtcaaataaatccggattgacccctcttcacctcgctgcacaggaggatcgagtcaatgtggccgaggtgctcgtgaatcaaggcgcccacgtggatgcccaaacaaagatggggtataccccactgcacgtggggtgtcactatggaaacatcaaaattgttaattttctgttacagcattctgcgaaagtgaatgcgaaaactaagaacggctacacaccacttcaccaggcagcccagcaaggacatactcatatcattaatgttctgctgcaaaataacgcctcgcccaacgagttaacagttaatggaaataccgctctgggaattgctagaaggctggggtacatctctgtcgtagacactttgaaaatagttactgaagagacaatgaccaccaccacggtaaccgaaaagcataaaatgaatgtccctgaaacaatgaatgaagtcctggacatgtctgatgacgaggtgcggaaggcgaatgcccctgaaatgctgagtgacggtgaatatatctctgatgtggaggaagggaatcggtgtacttggtacaagattcctaaggtccaagaattcactgtgaagtcagaggacgctatgaccggcgatacagataaatatctgggacctcaggacctgaaggagctgggggatgactcgctccccgccgagggttacatgggtttcagtctcggtgctcgtagcgcttcgctcagatccttctcttcagacaggtcatatactctcaaccggtcatcatacgctagggactctatgatgatcgaggaactcctcgttccctctaaagaacaacatttaaccttcacacgcgagttcgactctgactcactgagacactactcgtgggcagccgataccttagacaacgtgaatctggttagttctcctatccatagcggtttccttgtttcattcatggtagacgcgcggggcggaagtatgagaggatcaaggcaccatggaatgaggataattattccgccacgcaagtgtaccgccccaacgaggataacctgccggttagtgaaaaggcataaactcgcgaacccaccacctatggtggaaggggaaggccttgcgagtcggttggtcgaaatgggcccagccggggctcagtttctgggcccagtcatcgtggagattcctcatttcggatccatgcgaggtaaggagcgggagcttattgtgttacggagcgagaacggagagacctggaaagaacaccagttcgacagcaagaacgaggacctgacagagttactgaatggaatggacgaagagctggattctcctgaggagctgggcaaaaagcgcatttgcagaatcatcaccaaagactttccacaatacttcgcagtagtgtcacgcatcaagcaagaatcaaaccagataggccccgagggcggtattcttagtagcacgactgtgcctctggtacaagcgagtttccccgaaggagctctgacgaaaaggatcagagtaggtttgcaagcacaacccgttcccgatgaaattgtcaagaaaattctgggcaataaggcgaccttcagtcctattgtgaccgtggaaccaagaaggaggaaatttcacaagccaataaccatgacgatcccggtccctcctccgagcggggaaggtgtctctaacggatacaagggtgatacgaccccaaacctccggctgctttgttccattaccggaggcacctctcctgctcaatgggaggacattacgggaacaactcccctgactttcatcaaagactgtgtcagcttcacaaccaatgtgtccgcccgattctggttggctgactgccaccaggtccttgaaactgtaggcttggcgacacagttgtaccgggaattgatctgcgtaccgtacatggctaagtttgtggttttcgccaagatgaatgaccctgtggagtcgtcactacggtgtttctgcatgactgatgacaaggtggacaaaacgctcgaacagcaggagaactttgaagaagtcgccagaagcaaagatatcgaggtactcgaaggcaaacccatctacgtagactgctacggaaacctggctccactcactaaaggagggcagcaattagtgttcaatttctacagttttaaggagaataggttgcccttcagcataaagatacgggatacttctcaggaaccctgtggaagattgtctttcttgaaagaacccaagactaccaaagggcttcctcagaccgcagtgtgcaacctgaatatcactctgcctgcccataagaagatagaaaaaaccgatagaagacaaagtttcgccagtttagctctcaggaaacgctattcctacctgacggaacctggaatgtcacctcagtccccatgtgaacgtactgacatcagaatggccattgtggccgaccatttgggattatcatggaccgaactcgcaagagaacttaactttagcgtggacgaaataaaccaaatacgagtcgagaacccaaactctctcatatcccagtcatttatgttactgaaaaaatgggtgacccgagacggtaagaacgccacaactgatgccctgactagcgttctgaccaagatcaaccgtatagatatagtaaccctgctggagggaccaatcttcgattacggaaatattagtggaacaagatcatttgccgacgagaataacgtctttcatgatccggtcgatgggtacccttctctgcaggtagagctggaaactccaaccggtctgcattatactccacctaccccatttcagcaggacgactacttttcagacattagctcaattgagagccccctacggacgcccagccgattgtctgacggactggttccaagtcagggcaacattgaacacagtgcagacggtccgccagttgttactgccgaggatgctagtctggaggactccaagctggaagattctgttccactgacagagatgcccgaagccgtagacgttgacgaaagccagcttgagaatgtgtgtctttcttggcagaatgagacctcatccggaaacctggagtcgtgtgcacaggctcgacgggtcacggggggtctcttagatcggctggacgattctccagaccagtgtagggacagcattacctcctatctcaagggcgaggcaggcaagttcgaagctaacggaagccacaccgaaataacgccagaggcaaagaccaagtcttacttcccagagagccagaatgatgtgggcaagcagtccaccaaagaaaccttgaaaccgaaaatccatggcagtggacacgtggaggagcccgcttctccactcgcagcatatcagaagtctctggaggagacttcaaagttgataattgaggagacgaagccctgcgtgccagtgtcaatgaagaagatgagcaggacgtctcccgccgacggtaaacctagactttctctgcatgaggaggagggctcctccggatcagaacaaaagcagggagaaggcttcaaagttaagacaaaaaaggaaatcaggcatgtagagaagaagtcccacagttag

SEQ ID NO: 81416 - DNA, 5792 bp, Artificial Sequence
  derived and/or modified sequence
aagcagcggctgctttgcctggggagcacccgtaaatggactttggtctcaatgctttgactctttgccgtggttttggatgttggaataccggcggtgatctgtcttttataaactcacctgatttaaaggaaagatgagtgaagaaccaaaggagaaaaatgcaaaacctgctcataggaaaaggaaaggaaaaaagtctgatgccaatgcaagttacttaagagcagctcgagctggacaccttgaaaaggccctcgactacataaaaaatggagttgacatcaacatttgcaatcagaatgggttgaacgctctccaccttgcttccaaagaaggccatgtagaggttgtttctgagctgctgcagagagaagccaatgtggatgcagctacaaagaaaggaaacacagcattgcacatcgcatctttggctgggcaagcagaggtggtaaaagtcttggttacaaatggagccaatgtcaatgcacaatctcagaatggtttcacgccattgtatatggcagcccaggaaaatcacctggaagttgtcaagtttcttcttgacaatggtgcaagccagagcctagccacagaggatggcttcacaccattggcagtggctttgcaacaaggtcacgaccaagtcgtttcgctcctgctagagaatgacaccaaaggaaaagtgcgtctcccagctcttcatatcgcggcccgaaaagacgacacgaaagccgccgccctgctgctgcagaatgacaacaatgcagatgtggaatcaaagagtggcttcactccgctccacatagctgctcactatggaaatatcaatgtagccacgttgctgttaaaccgagcggctgctgtggatttcaccgcaaggaatgacatcactcctttacatgttgcatcaaaaagaggaaatgcaaatatggtaaaactattgctcgatcgaggagctaaaatcgatgccaaaaccagggatggtctgacaccactgcactgtggagcaaggagtggccacgagcaggtggtagaaatgttgcttgatcgagctgcccccattctttcaaaaaccaagaatggattatctccattgcacatggccacacaaggggatcatttaaactgcgtccagcttctcctccagcataatgtacccgtggatgatgtcaccaatgactacctgactgccctacacgtggctgcccactgtggccattacaaagttgccaaggttctcttggataagaaagctaaccccaatgccaaagccctgaatggctttacccctcttcatattgcctgcaagaagaatcgaattaaagtaatggaactccttctgaaacacggtgcatccatccaagctgtaaccgagtcgggccttaccccaatccatgttgctgccttcatggggcatgtaaatattgtatcacaactaatgcatcatggagcctcaccaaacaccaccaatgtgagaggagaaacagcactgcacatggcagctcgctccggccaagctgaagttgtgcggtatctggtacaagacggagctcaggtagaagctaaagctaaggatgaccaaacaccactccacatttcagcccgactggggaaagcagacatagtacaacagctgttgcagcaaggggcatctccaaatgcagccacaacttctgggtacaccccacttcacctttccgcccgagaggggcatgaggatgtggccgcgttccttttggatcatggagcgtctttatctataacaacaaagaaaggatttactcctcttcatgtggcagcaaaatatggaaagcttgaagtcgccaatctcctgctacagaaaagtgcatctccagatgctgctgggaagagcgggctaacaccactgcatgtagctgcacattacgataatcagaaagtggcccttctgcttttggaccaaggagcctcacctcacgcagccgcaaagaatggttatacgccactgcacatcgctgccaaaaagaaccagatggacatagcgacaactctgctggaatatggtgctgatgccaacgcagttacccggcaaggaattgcttccgtccatctcgcagctcaggaagggcacgtggacatggtgtcgctgctcctcggtagaaatgcgaatgtgaacctgagcaataagagcggcctgaccccactccatttggctgctcaagaagatcgagtgaatgtggcagaagtcctcgtaaaccaaggggctcatgtggacgcccagacaaagatgggatacacaccactgcatgtgggctgccactatggaaatatcaagattgttaatttcctgctccagcattctgcaaaagttaatgccaaaacaaagaatgggtatacgccattacatcaagcagcacagcaggggcatacgcatataataaatgtcttacttcagaacaacgcctcccccaatgaactcactgtgaatgggaatactgcccttggcattgcccggcgcctcggctacatctcagtagtggacaccctgaagatagtgaccgaagagaccatgaccacaactactgtcacagagaagcacaaaatgaatgttccagaaacgatgaatgaagttcttgatatgtctgatgatgaagttcgtaaagccaatgcccctgaaatgctcagtgatggcgaatatatctcagatgttgaagaaggtaatagatgcacatggtacaaaattcccaaggtacaagagtttacggtgaaaagtgaagatgcaatgaccggggacacagacaaatatcttgggccacaggaccttaaggaattgggtgatgattccctgcctgcagagggttacatgggctttagtctcggagcgcgttctgccagcctccgctccttcagttcggataggtcttacaccttgaacagaagctcctatgcacgggacagcatgatgattgaagaactccttgtgccatccaaagagcagcatctaacattcacaagggaatttgattcagattctcttagacattacagctgggctgcagacaccttagacaatgtcaatcttgtttcaagccccattcattctgggtttctggttagctttatggtggacgcgagagggggctccatgagaggaagccgtcatcacgggatgagaatcatcattcctccacgcaagtgtacggcccccactcgaatcacctgccgtttggtaaagagacataaactggccaacccaccccccatggtggaaggagagggattagccagtaggctggtagaaatgggtcctgcaggggcacaatttttaggccctgtcatagtggaaatccctcactttgggtccatgagaggaaaagagagagaactcattgttcttcgaagtgaaaatggtgaaacttggaaggagcatcagtttgacagcaaaaatgaagatttaaccgagttacttaatggcatggatgaagaacttgatagcccagaagagttagggaaaaagcgtatctgcaggattatcacgaaagatttcccccagtattttgcagtggtttcccggattaagcaggaaagcaaccagattggtcctgaaggtggaattctgagcagcaccacagtgccccttgttcaagcatctttcccagagggtgccctaactaaaagaattcgagtgggcctccaggcccagcctgttccagatgaaattgtgaaaaagatccttggaaacaaagcaacttttagcccaattgtcactgtggaaccaagaagacggaaattccataaaccaatcacaatgaccattccggtgcccccgccctcaggagaaggtgtatccaatggatacaaaggggacactacacccaatctgcgtcttctctgtagcattacagggggcacttcgcctgctcagtgggaagacatcacaggaacaactcctttgacgtttataaaagattgtgtctcctttacaaccaatgtttcagccagattttggcttgcagactgccatcaagttttagaaactgtggggttagccacgcaactgtacagagaattgatatgtgttccatatatggccaagtttgttgtttttgccaaaatgaatgatcccgtagaatcttccttgcgatgtttctgcatgacagatgacaaagtggacaaaactttagagcaacaagagaattttgaggaagtcgcaagaagcaaagatattgaggttctggaaggaaaacctatttatgttgattgttatggaaatttggccccacttaccaaaggaggacagcaacttgtttttaacttttattctttcaaagaaaatagactgccattttccatcaagattagagacaccagccaagagccctgtggtcgtctgtcttttctgaaagaaccaaagacaacaaaaggactgcctcaaacagcggtttgcaacttaaatatcactctgccagcacataaaaagattgagaaaacagatagacgacagagcttcgcatccttagctttacgtaagcgctacagctacttgactgagcctggaatgagtccacagagtccatgtgaacggacagatatcaggatggcaatagtagccgatcacctgggacttagttggacagaactggcaagggaactgaatttttcagtggatgaaatcaatcaaatacgtgtggaaaatccaaattctttaatttctcagagcttcatgttattaaaaaaatgggttaccagagacggaaaaaatgccacaactgatgccttaacttcggtcttgacaaaaattaatcgaatagatatagtgacactgctagaaggaccaatatttgattatggaaatatttcaggcaccagaagttttgcagatgagaacaatgttttccatgaccctgttgatggttatccttcccttcaagtggaactggaaacccccacagggttgcactacacaccacctacccctttccagcaagatgattattttagtgatatctctagcatagaatctccccttagaacccctagtagactgagtgatgggctagtgccttcccaggggaacatagagcattccgcagatggacctccagtcgtaactgcagaagacgcttccttagaagacagcaaactggaagactcagtgcctttaacagaaatgcctgaagcagtggatgtagatgagagccagttggagaatgtatgtctgagttggcagaatgagacatcaagtggaaacctagagtcctgcgctcaagctcgaagagtaactggtgggttactagatcgactggatgacagccctgaccagtgtagagattccattacctcatatctcaaaggagaagctggcaaatttgaagcaaatggaagccatacagaaatcactccagaagcaaagacaaaatcttactttccagaatcccaaaatgatgtaggaaaacagagtaccaaggaaactctgaaaccaaaaatacatggatctggtcatgttgaagaaccagcatcaccactagcagcatatcagaaatctctagaagaaaccagcaagcttataatagaagagactaaaccctgtgtgcctgtcagtatgaaaaagatgagtaggacttctccagcagatggcaagccaaggcttagcctccatgaagaagaggggtccagtgggtctgagcaaaagcagggagaaggttttaaggtgaaaacgaagaaagaaatccggcatgtggaaaagaagagccactcgtaacagcgaacggtcagtcaaggatcataagtttttactgccagtattgaga

SEQ ID NO: 81417 - DNA, 5606 bp, Artificial Sequence
  derived and/or modified sequence
atgtccgaggagcccaaggaaaagaacgcaaaaccagcgcaccgtaaacggaaggggaagaagtctgatgctaatgccagttacctcagggccgctcgagccggtcaccttgaaaaagccttggactatattaagaacggcgtcgatatcaacatatgcaaccagaatggcttgaacgccttacacctcgcctccaaggaaggccatgtcgaagtggtatctgagttgctgcagcgcgaggccaacgtagatgccgcaaccaagaagggaaacacggctttgcacatcgcatctttggctgggcaggccgaagtggtgaaagtactcgtgacgaacggagccaatgtaaacgcacaaagtcaaaatggatttactcctctgtacatggccgctcaagaaaatcacctggaagtggttaagttcctccttgacaatggcgcatctcaaagtctagccaccgaggatggcttcacacccctggcagtggccctgcaacagggccacgatcaggtggtttcactcttgctggaaaacgacaccaagggaaaagtccgcctgcccgcattacatattgcagcccgaaaagacgacactaaggctgccgctcttctgctgcagaatgacaacaacgcggacgtcgagagcaagagtggatttacccccttgcacatcgctgcccactatggaaacatcaacgtggcaacactgctgctaaaccgggcagctgcggtggattttacggccagaaatgatatcactccccttcatgtcgcctctaaacgcggtaatgccaatatggtgaagttactgttagatagaggagccaagattgatgctaagacgcgagatggcctgacccctctgcattgtggtgctcgctccggccatgaacaggtggttgagatgctgctggatcgcgcagcgcctatactgtccaagaccaagaacggactgtctccactgcatatggccacacagggggaccatctgaattgtgttcaactgctgctgcaacataatgtgcccgttgatgatgtaacgaacgattacctcactgccctacacgttgctgcacactgtgggcactataaggtcgcaaaggttctattggacaaaaaggcaaatccgaacgccaaagccctgaacgggtttacaccgttgcatatcgcgtgcaaaaagaatcgaatcaaggtgatggagctccttctgaagcacggagcttctattcaggctgtaacggagtctggcttaacacctattcatgtcgcagctttcatggggcacgtgaacatagtgtctcagctgatgcaccacggtgcgtcacctaatactactaatgtacggggagagactgccctgcatatggctgccaggtcgggccaagcagaagtggtccgatacctggtccaagatggtgcccaggtcgaggctaaagcaaaagacgatcagacacccctgcacatatccgccagactgggtaaggcagacattgtgcagcaattattacaacagggagcctcccctaacgccgcaacaaccagcggctacacgccactgcacctcagcgcacgagaaggccacgaggacgtcgccgctttcctgctggaccatggcgcttccctgagtattaccaccaagaagggcttcacccccctccatgtagctgcgaagtatggcaagctcgaggtggccaacttacttctacaaaagtcagcgtcccccgatgctgccggaaaaagcggattgactcctctgcatgtggccgctcattacgacaatcaaaaagtggcactgctcttgctggaccagggagccagtccacacgccgcagccaagaatggctacacgccgctgcatatcgccgcaaagaagaatcagatggatatagcaaccactctgctggagtacggggctgacgccaatgcggtcactaggcagggaatcgcttccgtccaccttgctgctcaagagggtcacgtggatatggttagcctcctgcttggccgtaatgccaacgtgaacctctccaataagagcgggctaaccccactgcatctcgcggctcaggaggaccgggtgaatgtggctgaggtgcttgtgaatcagggcgctcacgtggacgctcaaacgaagatgggatacacccctctccacgttggttgtcactacgggaacattaaaatcgtaaacttcctcctgcagcacagcgcaaaagtcaatgccaagaccaagaatgggtatacgcctctccatcaggccgctcaacaggggcatacccatatcataaacgtcctgctgcaaaacaatgcctctcccaatgagctgacagttaacggtaataccgcccttgggatagctcggaggttgggttacatctcagtggtcgacactttgaagatcgtgactgaggagaccatgacaacaactactgtcaccgaaaaacacaaaatgaatgtgccagaaaccatgaacgaagtgttagatatgagtgacgacgaagtaagaaaagctaacgccccagaaatgctgagcgacggtgagtacatctctgacgtggaggagggcaacaggtgtacatggtataaaattcccaaggtgcaagaatttaccgtgaagtctgaagacgcaatgactggagataccgacaaataccttggcccacaggatcttaaggagctgggcgatgactcccttcccgctgaaggctatatgggcttttccttaggggctcgatcagcatccctgagatctttctcttcagatagaagctataccctgaatagaagcagctacgcacgggacagcatgatgatagaggagctgctggtgccttctaaggagcagcacctcacattcaccagggaatttgatagcgattccttgaggcactactcatgggcagccgacacacttgacaatgtaaaccttgtctctagtcctattcactcggggttcttggtgtcgtttatggtcgacgctcgtgggggatcgatgaggggatctcgccaccatggtatgagaatcattataccccctcgaaagtgcacagccccaaccagaatcacatgccgcctcgtgaagcgccacaagctcgccaatccgccaccaatggttgaaggagagggcctggccagcagactggttgaaatggggccagctggcgcacagttccttggacccgttatagtcgaaattccccatttcggatccatgcgcggaaaggagcgcgagttaattgtactcagatccgagaacggggaaacgtggaaggagcaccagttcgattccaagaacgaagatctcactgagcttttaaatggtatggacgaggaactagattccccagaagagcttgggaaaaagaggatctgcagaatcataaccaaggattttccgcaatatttcgccgtggtgagccgcataaaacaggaatccaaccagatcgggcctgagggcggtatcctgtcatccaccactgtaccgctggtgcaggcatccttccctgaaggagcactgaccaaaaggattagggttggtctgcaggcccagcccgtgcccgacgaaatcgtgaagaaaatcttaggcaataaggccacatttagtccgatcgtcactgtcgaacccagacgccgtaagtttcacaaaccaatcactatgacaattcctgtcccgccaccttcaggcgagggcgtgagtaatgggtataaaggcgacaccaccccgaacctgagactactctgttccatcacagggggaacttcccctgcccagtgggaggatatcactggcactacaccactcacatttatcaaagattgcgtttctttcactacaaatgtaagtgctaggttttggcttgcagactgccaccaggtactggagaccgttggactggccacgcaactgtacagggagctgatctgcgtcccatatatggccaagttcgtggtcttcgctaaaatgaatgatcctgttgagagttccctgcgatgcttttgcatgactgacgataaggttgacaaaacccttgagcaacaggagaactttgaagaggtggcccgtagtaaggatatagaggtgctggaggggaagcctatctacgtggactgttacggtaatctggcaccattaaccaagggaggccagcagctagtcttcaatttttactcttttaaagagaacagactgccattctctattaaaattcgtgacaccagccaggaaccttgtggccgactcagctttttgaaagagccaaagacaacaaaaggactcccacaaactgccgtgtgtaacctgaacattacgctgcccgcacacaagaagattgagaagactgacaggaggcagagcttcgcatcactagcacttaggaaacgctactcctatctgaccgagcctggcatgtctcctcaatccccctgtgagagaaccgacattcggatggccattgtggccgaccatctcggccttagctggacagaattggccagggagctcaatttctcagtggacgagatcaatcaaatccgggtcgagaatccaaattcccttatttcccagagctttatgctgcttaagaagtgggtgactagggacgggaaaaacgcaaccaccgacgcactgacctctgtccttactaaaataaatcggattgatattgttactctcctcgaagggcctatctttgattatgggaatatttcagggactcgcagtttcgcggacgaaaacaatgtatttcacgaccctgtcgatggctacccttctctgcaagtcgaacttgaaacacctaccggcctccactataccccccctaccccattccagcaggacgattacttctctgatatctcttcaattgaatccccccttcgaacccccagccggctgagcgatgggctcgtacccagccagggtaacatcgaacacagcgctgatggtcctcccgtagtgacagcagaagatgcttcattggaggacagtaagcttgaagatagcgttccactgactgagatgcccgaagcggtggacgtggacgaaagtcaactcgagaacgtgtgtttatcctggcagaatgaaacctcatcaggcaatttagaaagctgtgctcaggcaaggcgcgtcaccgggggtctgctggatcggcttgatgattctccagatcagtgtcgtgacagtatcacgagctatctgaagggtgaagcaggcaaatttgaagcaaatggatcacatacagaaattaccccagaagccaaaacgaaatcgtacttccctgagtcccaaaatgacgtcgggaagcagtctaccaaggagaccttgaaaccaaaaatccacggctccggacacgttgaagagccagctagtccactggccgcataccaaaagtccctggaggagacctcaaaactcattatcgaagaaacgaagccctgcgtgcccgtctctatgaaaaagatgtctcggacctcccccgctgatggaaaaccacgactttccctgcacgaggaggaaggttcctccggatctgagcagaagcagggggaaggctttaaggtgaagaccaagaaggaaatccgacacgtcgaaaagaagagtcatagcta

SEQ ID NO: 81418 - DNA, 5607 bp, Artificial Sequence
  derived and/or modified sequence
atgagcgaggagcccaaggagaagaacgccaagcccgcccacagaaagagaaagggcaagaagagcgacgccaacgccagctacctgagagccgccagagccggccacctggagaaggccctggactacatcaagaacggcgtggacatcaacatctgcaaccagaacggcctgaacgccctgcacctggccagcaaggagggccacgtggaggtggtgagcgagctgctgcagagagaggccaacgtggacgccgccaccaagaagggcaacaccgccctgcacatcgccagcctggccggccaggccgaggtggtgaaggtgctggtgaccaacggcgccaacgtgaacgcccagagccagaacggcttcacccccctgtacatggccgcccaggagaaccacctggaggtggtgaagttcctgctggacaacggcgccagccagagcctggccaccgaggacggcttcacccccctggccgtggccctgcagcagggccacgaccaggtggtgagcctgctgctggagaacgacaccaagggcaaggtgagactgcccgccctgcacatcgccgccagaaaggacgacaccaaggccgccgccctgctgctgcagaacgacaacaacgccgacgtggagagcaagagcggcttcacccccctgcacatcgccgcccactacggcaacatcaacgtggccaccctgctgctgaacagagccgccgccgtggacttcaccgccagaaacgacatcacccccctgcacgtggccagcaagagaggcaacgccaacatggtgaagctgctgctggacagaggcgccaagatcgacgccaagaccagagacggcctgacccccctgcactgcggcgccagaagcggccacgagcaggtggtggagatgctgctggacagagccgcccccatcctgagcaagaccaagaacggcctgagccccctgcacatggccacccagggcgaccacctgaactgcgtgcagctgctgctgcagcacaacgtgcccgtggacgacgtgaccaacgactacctgaccgccctgcacgtggccgcccactgcggccactacaaggtggccaaggtgctgctggacaagaaggccaaccccaacgccaaggccctgaacggcttcacccccctgcacatcgcctgcaagaagaacagaatcaaggtgatggagctgctgctgaagcacggcgccagcatccaggccgtgaccgagagcggcctgacccccatccacgtggccgccttcatgggccacgtgaacatcgtgagccagctgatgcaccacggcgccagccccaacaccaccaacgtgagaggcgagaccgccctgcacatggccgccagaagcggccaggccgaggtggtgagatacctggtgcaggacggcgcccaggtggaggccaaggccaaggacgaccagacccccctgcacatcagcgccagactgggcaaggccgacatcgtgcagcagctgctgcagcagggcgccagccccaacgccgccaccaccagcggctacacccccctgcacctgagcgccagagagggccacgaggacgtggccgccttcctgctggaccacggcgccagcctgagcatcaccaccaagaagggcttcacccccctgcacgtggccgccaagtacggcaagctggaggtggccaacctgctgctgcagaagagcgccagccccgacgccgccggcaagagcggcctgacccccctgcacgtggccgcccactacgacaaccagaaggtggccctgctgctgctggaccagggcgccagcccccacgccgccgccaagaacggctacacccccctgcacatcgccgccaagaagaaccagatggacatcgccaccaccctgctggagtacggcgccgacgccaacgccgtgaccagacagggcatcgccagcgtgcacctggccgcccaggagggccacgtggacatggtgagcctgctgctgggcagaaacgccaacgtgaacctgagcaacaagagcggcctgacccccctgcacctggccgcccaggaggacagagtgaacgtggccgaggtgctggtgaaccagggcgcccacgtggacgcccagaccaagatgggctacacccccctgcacgtgggctgccactacggcaacatcaagatcgtgaacttcctgctgcagcacagcgccaaggtgaacgccaagaccaagaacggctacacccccctgcaccaggccgcccagcagggccacacccacatcatcaacgtgctgctgcagaacaacgccagccccaacgagctgaccgtgaacggcaacaccgccctgggcatcgccagaagactgggctacatcagcgtggtggacaccctgaagatcgtgaccgaggagaccatgaccaccaccaccgtgaccgagaagcacaagatgaacgtgcccgagaccatgaacgaggtgctggacatgagcgacgacgaggtgagaaaggccaacgcccccgagatgctgagcgacggcgagtacatcagcgacgtggaggagggcaacagatgcacctggtacaagatccccaaggtgcaggagttcaccgtgaagagcgaggacgccatgaccggcgacaccgacaagtacctgggcccccaggacctgaaggagctgggcgacgacagcctgcccgccgagggctacatgggcttcagcctgggcgccagaagcgccagcctgagaagcttcagcagcgacagaagctacaccctgaacagaagcagctacgccagagacagcatgatgatcgaggagctgctggtgcccagcaaggagcagcacctgaccttcaccagagagttcgacagcgacagcctgagacactacagctgggccgccgacaccctggacaacgtgaacctggtgagcagccccatccacagcggcttcctggtgagcttcatggtggacgccagaggcggcagcatgagaggcagcagacaccacggcatgagaatcatcatcccccccagaaagtgcaccgcccccaccagaatcacctgcagactggtgaagagacacaagctggccaaccccccccccatggtggagggcgagggcctggccagcagactggtggagatgggccccgccggcgcccagttcctgggccccgtgatcgtggagatcccccacttcggcagcatgagaggcaaggagagagagctgatcgtgctgagaagcgagaacggcgagacctggaaggagcaccagttcgacagcaagaacgaggacctgaccgagctgctgaacggcatggacgaggagctggacagccccgaggagctgggcaagaagagaatctgcagaatcatcaccaaggacttcccccagtacttcgccgtggtgagcagaatcaagcaggagagcaaccagatcggccccgagggcggcatcctgagcagcaccaccgtgcccctggtgcaggccagcttccccgagggcgccctgaccaagagaatcagagtgggcctgcaggcccagcccgtgcccgacgagatcgtgaagaagatcctgggcaacaaggccaccttcagccccatcgtgaccgtggagcccagaagaagaaagttccacaagcccatcaccatgaccatccccgtgcccccccccagcggcgagggcgtgagcaacggctacaagggcgacaccacccccaacctgagactgctgtgcagcatcaccggcggcaccagccccgcccagtgggaggacatcaccggcaccacccccctgaccttcatcaaggactgcgtgagcttcaccaccaacgtgagcgccagattctggctggccgactgccaccaggtgctggagaccgtgggcctggccacccagctgtacagagagctgatctgcgtgccctacatggccaagttcgtggtgttcgccaagatgaacgaccccgtggagagcagcctgagatgcttctgcatgaccgacgacaaggtggacaagaccctggagcagcaggagaacttcgaggaggtggccagaagcaaggacatcgaggtgctggagggcaagcccatctacgtggactgctacggcaacctggcccccctgaccaagggcggccagcagctggtgttcaacttctacagcttcaaggagaacagactgcccttcagcatcaagatcagagacaccagccaggagccctgcggcagactgagcttcctgaaggagcccaagaccaccaagggcctgccccagaccgccgtgtgcaacctgaacatcaccctgcccgcccacaagaagatcgagaagaccgacagaagacagagcttcgccagcctggccctgagaaagagatacagctacctgaccgagcccggcatgagcccccagagcccctgcgagagaaccgacatcagaatggccatcgtggccgaccacctgggcctgagctggaccgagctggccagagagctgaacttcagcgtggacgagatcaaccagatcagagtggagaaccccaacagcctgatcagccagagcttcatgctgctgaagaagtgggtgaccagagacggcaagaacgccaccaccgacgccctgaccagcgtgctgaccaagatcaacagaatcgacatcgtgaccctgctggagggccccatcttcgactacggcaacatcagcggcaccagaagcttcgccgacgagaacaacgtgttccacgaccccgtggacggctaccccagcctgcaggtggagctggagacccccaccggcctgcactacaccccccccacccccttccagcaggacgactacttcagcgacatcagcagcatcgagagccccctgagaacccccagcagactgagcgacggcctggtgcccagccagggcaacatcgagcacagcgccgacggcccccccgtggtgaccgccgaggacgccagcctggaggacagcaagctggaggacagcgtgcccctgaccgagatgcccgaggccgtggacgtggacgagagccagctggagaacgtgtgcctgagctggcagaacgagaccagcagcggcaacctggagagctgcgcccaggccagaagagtgaccggcggcctgctggacagactggacgacagccccgaccagtgcagagacagcatcaccagctacctgaagggcgaggccggcaagttcgaggccaacggcagccacaccgagatcacccccgaggccaagaccaagagctacttccccgagagccagaacgacgtgggcaagcagagcaccaaggagaccctgaagcccaagatccacggcagcggccacgtggaggagcccgccagccccctggccgcctaccagaagagcctggaggagaccagcaagctgatcatcgaggagaccaagccctgcgtgcccgtgagcatgaagaagatgagcagaaccagccccgccgacggcaagcccagactgagcctgcacgaggaggagggcagcagcggcagcgagcagaagcagggcgagggcttcaaggtgaagaccaagaaggagatcagacacgtggagaagaagagccacagctag

SEQ ID NO: 81419 - DNA, 897 bp, Artificial Sequence
  derived and/or modified sequence
aatgatgaaagagtgcaagctctcacttccccttcctgtacagggcaggttgtgcagctggaggcagagcagtcctctctggggagcctgaagcaaacatggatcaagaaactgtaggcaatgttgtcctgttggccatcgtcaccctcatcagcgtggtccagaatggattctttgcccataaagtggagcacgaaagcaggacccagaatgggaggagcttccagaggaccggaacacttgcctttgagcgggtctacactgccaaccagaactgtgtagatgcgtaccccactttcctcgctgtgctctggtctgcggggctactttgcagccaagttcctgctgcgtttgctggactgatgtacttgtttgtgaggcaaaagtactttgtcggttacctaggagagagaacgcagagcacccctggctacatatttgggaaacgcatcatactcttcctgttcctcatgtccgttgctggcatattcaactattacctcatcttctttttcggaagtgactttgaaaactacataaagacgatctccaccaccatctcccctctacttctcattccctaactctctgctgaatatggggttggtgttctcatctaatcaatacctacaagtcatcataattcagctcttgagagcattctgctcttctttagatggctgtaaatctattggccatctgggcttcacagcttgagttaaccttgcttttccgggaacaaaatgatgtcatgtcagctccgccccttgaacatgaccgtggccccaaatttgctattcccatgcattttgtttgtttcttcacttatcctgttctctgaagatgttttgtgaccaggtttgtgttttcttaaaataaaatgcagagacatgtttt

SEQ ID NO: 81420 - protein, 719 aa, Artificial Sequence
  derived and/or modified sequence
MVQKYQSPVRVYKYPFELIMAAYERRFPTCPLIPMFVGSDTVNEFKSEDGAIHVIERRCKLDVDAPRLLKKIAGVDYVYFVQKNSLNSRERTLHIEAYNETFSNRVIINEHCCYTVHPENEDWTCFEQSASLDIKSFFGFESTVEKIAMKQYTSNIKKGKEIIEYYLRQLEEEGITFVPRWSPPSITTSSETSSSSSKKQAASMAVVIPEAALKEGLSGDALSSPSAPEPVVGTPDDKLDADYIKRYLGDLTPLQESCLIRLRQWLQETHKGKIPKDEHILRFLRARDFNIDKAREIMCQSLTWRKQHQVDYILETWTPPQVLQDYYAGGWHHHDKDGRPLYVLRLGQMDTKGLVRALGEEALLRYVLSINEEGLRRCEENTKVFGRPISSWTCLVDLEGLNMRHLWRPGVKALLRIIEVVEANYPETLGRLLILRAPRVFPVLWTLVSPFIDDNTRRKFLIYAGNDYQGPGGLLDYIDKEIIPDFLSGECMCEVPEGGLVPKSLYRTAEELENEDLKLWTETIYQSASVFKGAPHEILIQIVDASSVITWDFDVCKGDIVFNIYHSKRSPQPPKKDSLGAHSITSPGGNNVQLIDKVWQLGRDYSMVESPLICKEGESVQGSHVTRWPGFYILQWKFHSMPACAASSLPRVDDVLASLQVSSHKCKVMYYTEVIGSEDFRGSMTSLESSHSGFSQLSAATTSSSQSHSSSMISRWRFC

SEQ ID NO: 81421 - DNA, 2160 bp, Artificial Sequence
  derived and/or modified sequence
atggtgcagaagtaccagagccccgtgagagtgtacaagtaccccttcgagctgatcatggccgcctacgagagaagattccccacctgccccctgatccccatgttcgtgggcagcgacaccgtgaacgagttcaagagcgaggacggcgccatccacgtgatcgagagaagatgcaagctggacgtggacgcccccagactgctgaagaagatcgccggcgtggactacgtgtacttcgtgcagaagaacagcctgaacagcagagagagaaccctgcacatcgaggcctacaacgagaccttcagcaacagagtgatcatcaacgagcactgctgctacaccgtgcaccccgagaacgaggactggacctgcttcgagcagagcgccagcctggacatcaagagcttcttcggcttcgagagcaccgtggagaagatcgccatgaagcagtacaccagcaacatcaagaagggcaaggagatcatcgagtactacctgagacagctggaggaggagggcatcaccttcgtgcccagatggagcccccccagcatcaccaccagcagcgagaccagcagcagcagcagcaagaagcaggccgccagcatggccgtggtgatccccgaggccgccctgaaggagggcctgagcggcgacgccctgagcagccccagcgcccccgagcccgtggtgggcacccccgacgacaagctggacgccgactacatcaagagatacctgggcgacctgacccccctgcaggagagctgcctgatcagactgagacagtggctgcaggagacccacaagggcaagatccccaaggacgagcacatcctgagattcctgagagccagagacttcaacatcgacaaggccagagagatcatgtgccagagcctgacctggagaaagcagcaccaggtggactacatcctggagacctggacccccccccaggtgctgcaggactactacgccggcggctggcaccaccacgacaaggacggcagacccctgtacgtgctgagactgggccagatggacaccaagggcctggtgagagccctgggcgaggaggccctgctgagatacgtgctgagcatcaacgaggagggcctgagaagatgcgaggagaacaccaaggtgttcggcagacccatcagcagctggacctgcctggtggacctggagggcctgaacatgagacacctgtggagacccggcgtgaaggccctgctgagaatcatcgaggtggtggaggccaactaccccgagaccctgggcagactgctgatcctgagagcccccagagtgttccccgtgctgtggaccctggtgagccccttcatcgacgacaacaccagaagaaagttcctgatctacgccggcaacgactaccagggccccggcggcctgctggactacatcgacaaggagatcatccccgacttcctgagcggcgagtgcatgtgcgaggtgcccgagggcggcctggtgcccaagagcctgtacagaaccgccgaggagctggagaacgaggacctgaagctgtggaccgagaccatctaccagagcgccagcgtgttcaagggcgccccccacgagatcctgatccagatcgtggacgccagcagcgtgatcacctgggacttcgacgtgtgcaagggcgacatcgtgttcaacatctaccacagcaagagaagcccccagccccccaagaaggacagcctgggcgcccacagcatcaccagccccggcggcaacaacgtgcagctgatcgacaaggtgtggcagctgggcagagactacagcatggtggagagccccctgatctgcaaggagggcgagagcgtgcagggcagccacgtgaccagatggcccggcttctacatcctgcagtggaagttccacagcatgcccgcctgcgccgccagcagcctgcccagagtggacgacgtgctggccagcctgcaggtgagcagccacaagtgcaaggtgatgtactacaccgaggtgatcggcagcgaggacttcagaggcagcatgaccagcctggagagcagccacagcggcttcagccagctgagcgccgccaccaccagcagcagccagagccacagcagcagcatgatcagcagatggagattctgctag

SEQ ID NO: 81422 - DNA, 2160 bp, Artificial Sequence
  derived and/or modified sequence
atggttcaaaagtatcagtcacctgtgcgagtctataaatatccgtttgaactgatcatggctgcatacgagcggaggttcccaacctgccccctaatacccatgtttgttggctctgatacagttaacgaattcaagagcgaagatggcgccatccatgtgattgaaaggcgctgcaagctggacgtggatgcccctagacttctcaagaagatcgcaggtgtcgactatgtgtacttcgtccaaaagaactcattgaacagccgtgaaagaaccctccacatcgaggcctacaacgagactttcagtaaccgagtgattatcaacgagcactgctgttatacagtgcaccccgagaatgaggactggacttgctttgaacagagcgcctctcttgacattaagtccttcttcggctttgagagcaccgtggagaaaatcgccatgaaacagtacaccagcaatatcaagaagggtaaggaaattattgagtactatctgagacagctcgaagaagaaggcattacatttgtgcctagatggtcacctccctccattacaactagctcagagacctcttcatcctcatcgaaaaagcaggccgcctctatggccgtcgtgatccccgaagcagctctcaaggagggacttagtggggatgctttgtctagtccttcagcccccgagccagtggtgggtacccccgacgacaagttggacgctgattatataaagcggtacttgggggacctcactcccctgcaagaatcctgtctcatccgcctccgtcagtggttgcaggaaacacataaaggtaagatccctaaagatgagcacattcttagatttctgcgcgccagggatttcaacatcgacaaagcaagggagattatgtgccagtccctcacatggcgcaaacagcaccaggtagactacatactggagacctggaccccgccccaggtgcttcaggactactacgcaggaggatggcatcaccatgacaaggacggccgccccctttacgtcctgcggttgggccagatggacacgaagggtcttgttagggctctcggagaggaggcccttctacggtacgtgctttcgatcaatgaagaaggattgaggaggtgtgaggagaacacaaaagtatttggacgccccatctcgagctggacttgcttagtggatcttgaaggtctcaatatgaggcacctctggaggcccggcgtaaaagcccttttgcgtattatcgaggtggtcgaggccaactacccagagactctagggcggctcctcattcttcgcgcccctcgggtgtttccagtgctatggaccctggtttccccttttatcgacgataacacccgacggaagttcctgatatatgcagggaacgactatcagggaccaggcgggctattagactacattgataaggagatcatcccagactttctgtcaggcgagtgtatgtgtgaagtacctgagggggggttggtgcctaagtcactgtataggactgccgaggaattggagaatgaagatttaaaactttggacagaaactatctatcaatctgcttctgttttcaaaggggcccctcacgagatactgatccagattgtggacgctagcagcgtcattacatgggattttgacgtgtgcaaaggggatatcgttttcaatatttaccacagcaagcgctctcctcagcctcctaaaaaggatagcttgggtgctcactctatcacatcacctggcggtaacaatgtgcagctcatcgataaggtgtggcagctgggacgcgactattccatggtggaaagccctctcatatgcaaggagggggaatcagttcaggggagtcatgtgacacgctggcctggattctatatcctccaatggaagtttcattcaatgccggcttgtgccgcctcctcattaccaagggtcgatgacgtgctcgctagcctgcaggtttcttctcacaagtgcaaggtcatgtactatacggaggtgatcggatctgaagactttcggggatctatgacctctctcgagagttctcattccgggtttagccaattgtctgctgccacgacttcttcctcacaaagccatagcagttctatgatttcaaggtggcgcttctgctag

SEQ ID NO: 81423 - DNA, 2160 bp, Artificial Sequence
  derived and/or modified sequence
atggtgcaaaaataccagtctccagtccgcgtctacaagtaccccttcgaactgattatggcagcctacgagagacggtttcctacttgtcctctcatccccatgttcgtgggatcagataccgtgaatgagtttaaatccgaagacggagcaatacacgtaattgagaggagatgtaagctggatgttgacgcccctcgactcttgaagaaaatcgcaggggtggactacgtctattttgtgcagaagaattccctgaattctcgcgagaggaccttgcacattgaggcatataatgagacattctcgaacagagttattatcaacgaacactgttgttacactgtccaccccgaaaacgaggattggacctgttttgaacaatctgcgtccctggacattaaatcgttctttggtttcgaatctacagtggagaagattgccatgaagcagtatacaagcaatataaagaaaggaaaggaaattatcgagtactatcttcggcagctggaagaggagggaataactttcgtccctcgctggagccctcccagcatcacaacttccagcgagacatcctctagctccagcaagaaacaggctgcttccatggcagtcgtcattcccgaagccgctctgaaagaaggcctcagcggagatgccctctcaagcccgtccgcgccagagcctgtagtaggcaccccggacgacaagcttgatgccgattacatcaagcgataccttggggatctgacacctttacaggaatcttgcctaattaggctcagacaatggttgcaggagacccataaaggcaagataccaaaagatgagcatatcctaagatttctgagggccagggattttaacatcgacaaggctagagagatcatgtgccaatcactgacctggagaaagcagcatcaggttgactacatcctggaaacctggactcctccacaggtgcttcaagattattacgccgggggctggcaccatcatgataaagacgggagacctctgtatgttctcaggctaggccagatggatacaaaggggctggtgcgcgcgcttggagaagaggctctccttcgttatgtcctgagcattaacgaagaagggctgaggcgctgtgaggagaacacgaaggtttttggccggcccatatctagctggacgtgtctcgtcgatttagagggtttaaacatgaggcacctgtggcgcccaggagtgaaggctctgctgcgcatcattgaagtggtcgaggcaaactatcccgagaccctgggccgactgttaatcctcagagccccaagagtatttcctgtgctgtggaccctggtgtcaccgtttatagacgacaataccagaagaaaattcctgatttatgccgggaatgactaccagggccccggagggttgttagattacatcgataaagaaattattccggattttctaagtggggagtgcatgtgcgaggttcctgaagggggcctcgtgccaaagtcactttaccgtaccgcggaagaactcgaaaacgaagacctgaagttatggactgaaaccatctatcagtctgcctctgtttttaagggcgctccacacgagatcctcatacagatcgttgatgcctcgtctgtgataacttgggacttcgatgtgtgcaaaggagacattgtatttaatatttatcactccaagcgatcaccacaacctcccaagaaagatagcctcggcgctcattccataacctcacctggtggcaacaacgttcagctgatcgacaaagtttggcagcttggcagggactactctatggtagagtcccccctgatttgcaaggagggggagtccgttcaggggtctcatgtcacccgttggcccgggttctatatcctgcagtggaagtttcattctatgcctgcatgtgccgctagcagcctcccccgggtagacgatgtcctggcttccctgcaggtgagctctcacaaatgcaaggtaatgtattatacagaagtgatcggatctgaagatttcaggggctccatgacttcactggaatccagccattcaggctttagtcagctgagcgctgctacaactagctcttctcagtcgcacagctcctccatgattagccgatggcggttttgctag

SEQ ID NO: 81424 - DNA, 2160 bp, Artificial Sequence
  derived and/or modified sequence
atggtgcagaagtaccagagccctgtgcgggtgtacaagtacccctttgagctgatcatggccgcctatgaaagacgcttccccacctgccccctcatccccatgtttgtgggcagtgacacagtgaatgagttcaagtcagaagatggagccatccacgtgattgaaagacgctgcaagctggatgtggatgccccccggctgctgaagaagattgctggggtggactatgtgtactttgtgcagaagaacagcctgaacagccgggagaggaccctgcacatcgaggcctacaatgagaccttcagcaacagagtcatcatcaatgagcactgctgctacacagtgcacccagaaaatgaagactggacctgctttgagcagagcgccagcctggacatcaagagcttcttcggctttgagagcacagtggagaagatcgccatgaagcagtacaccagcaacatcaagaagggcaaggagatcatcgagtactacctgcggcagctggaggaggagggcatcacctttgtgccccgctggagccccccatccatcaccaccagcagcgagaccagcagcagcagcagcaagaagcaggccgcctccatggctgtggtgattcctgaggccgccctgaaggagggcctgtctggagatgccctgagcagccccagcgcccctgagcctgtggtgggcaccccagatgacaagctggatgctgactacatcaagcgctacctgggggacctgacccccctgcaggagagctgcctgatccggctgcggcagtggctgcaggagacccacaagggcaagatccccaaggatgagcacatcctgcgcttcctgcgggcccgggacttcaacatcgacaaggcccgggagatcatgtgccagagcctgacctggaggaagcagcaccaggtggactacatcctggagacctggaccccaccccaggtgctgcaggactactatgctgggggctggcaccaccacgacaaggatggccggcccctgtatgtgctgcggctgggccagatggacaccaagggcctggtgcgggccctgggggaggaggccctgctgcgctacgtgctgagcatcaatgaggagggcctgcggcgctgtgaggagaacaccaaggtgtttggccggcccatcagctcctggacctgcctggtggacctggagggcctgaacatgaggcacctgtggaggcctggggtgaaggccctgctgcgcatcatcgaggtggtggaggccaactacccagagaccctgggccgcctgctgatcctgcgggcccccagggtcttccctgtgctgtggaccctggtgagccccttcattgatgacaacaccaggaggaagttcctgatctatgctggaaatgactaccagggccctgggggcctgctggactacatcgacaaggagatcatcccagacttcctgagcggggagtgcatgtgtgaggtgcctgagggcggcctggtgcccaagagcctgtacagaacagctgaggagctggagaatgaagacctgaagctgtggacagagaccatctaccagagcgcctctgtgttcaagggggcccctcatgagatcctgatccagatcgtggatgccagcagcgtcatcacctgggactttgatgtgtgcaagggggacatcgtgttcaacatctaccacagcaagaggagcccccagccccccaagaaggacagcctgggcgcccacagcatcaccagccctgggggcaacaacgtgcagctgattgacaaggtgtggcagctgggccgggactacagcatggtggagagccccctcatctgcaaggagggggagagcgtgcagggcagccacgtgacccgctggccaggcttctacatcctgcagtggaagttccacagcatgcctgcctgtgccgccagcagcctgccccgggtggatgatgtgctggccagcctgcaggtgagcagccacaagtgcaaggtgatgtactacacagaggtgattggcagcgaggacttccggggctccatgaccagcctggagagcagccacagcggcttcagccagctgtctgctgccaccaccagcagcagccagagccacagcagctccatgatcagccgctggaggttctgctag

SEQ ID NO: 81425 - DNA, 2160 bp, Artificial Sequence
  derived and/or modified sequence
atggtgcagaagtaccagagccccgtgcgggtgtacaagtaccccttcgagctgatcatggctgcctatgagaggcgttttccgacctgcccactcatcccgatgtttgtgggcagcgacaccgtgaatgagttcaagagcgaggatggggctatccacgtgatcgagcgcaggtgcaaactcgacgtggatgctccacgcttgctaaaaaagatcgccggagtagactatgtctattttgttcaaaagaatagcctcaactcccgggaaagaaccttacatatcgaagcctacaacgagaccttctccaaccgggttattatcaacgagcactgctgttacaccgtgcatccagaaaatgaagactggacctgttttgagcagtcagcgtctctggatattaagtctttctttgggtttgagagcactgtggagaaaattgctatgaaacagtacacttctaacattaagaaaggcaaggaaataatcgaatactacctcaggcagcttgaggaggaaggcattactttcgtccctcgctggtccccaccctcaatcaccacaagctctgagacatcctccagctcgagcaaaaaacaggctgcctccatggccgtggtgatcccagaggcagcgttgaaggagggactgtccggcgatgctttgtcatccccttccgctcccgagcctgtcgtggggacacctgatgacaagctggacgccgactacatcaagcggtacctgggcgaccttacacccctccaggagtcctgcctgatccgtctgcgtcagtggcttcaggaaacccacaagggcaagatcccaaaagatgagcacattctgcgtttcctgcgggctagagacttcaacattgataaggctagagagatcatgtgccagagcctgacgtggcgcaaacagcaccaggtggattatattttggaaacttggactccaccgcaggtgctccaggactactatgccgggggctggcaccaccatgataaggacggacgacccctgtatgttctgagattaggtcaaatggatacaaaaggtctcgtcagagctctgggcgaagaagccttactccggtatgtcctgagtatcaatgaagagggccttagacgctgtgaggagaacactaaagtgttcggtcgtccaatctcatcatggacgtgtctggtcgatcttgaaggcctcaatatgagacacttgtggaggcctggggtaaaggctttgctccgtatcattgaagtcgttgaggccaactatccagagaccctcggcagactgttaattttgcgcgccccgagggtgtttccagttctgtggacactcgtcagtccattcatagatgataatacccggcgcaaatttcttatctacgccggaaatgactaccagggcccaggtgggttgctcgactacattgataaagaaattatccccgatttcttaagtggggagtgtatgtgtgaagtgccggaaggcggccttgtgcccaaatctctttaccgaacagccgaggagctggagaatgaagatctgaagttgtggaccgaaaccatttatcagtcagcttcggttttcaagggggctccccatgagatcctgatccagatcgtggacgcgtccagcgtcatcacatgggatttcgatgtatgtaagggggacatcgtattcaacatctatcattccaagaggtctccccagccccctaagaaggactctctaggagctcattcaattacatcccccgggggaaacaacgtccaactgattgataaagtgtggcagctaggaagagactactctatggtagagtctcctttaatttgcaaagagggcgagagtgtgcagggcagccatgtgacccgctggcctggtttctacatactgcagtggaagttccacagtatgcccgcctgtgctgctagctccctaccacgggtggacgacgtgctggcatcactccaagttagcagtcataaatgcaaggttatgtattacacagaggtgatcggaagcgaggacttccgcggttcaatgacctccctcgaaagctcccactctggtttcagccagctctcagcagccacaaccagcagctcacagtctcactcttcctccatgattagtcgctggaggttttgctag

SEQ ID NO: 81426 - DNA, 2160 bp, Artificial Sequence
  derived and/or modified sequence
atggtgcagaagtaccagagccccgtgcgggtgtacaagtacccctttgagctgataatggctgcctacgagagacgattcccaacttgcccccttattccaatgttcgtcggctctgatacggtgaacgaattcaagtcagaggatggcgcaatccacgttattgagcggcggtgtaaacttgacgtggacgcccccagattactgaagaagattgccggagttgactacgtgtacttcgtccaaaagaatagcttaaactctcgtgagagaactctccatatcgaggcttataatgagacctttagcaatagagtcatcattaacgagcattgctgttacacagtgcaccccgagaacgaggactggacctgtttcgagcagagcgcgtctttggatataaaatcatttttcggttttgagtcaacagtcgaaaagatcgccatgaagcagtacacttctaatatcaaaaaagggaaagaaattattgagtactacctgaggcagttagaggaggagggtataactttcgtcccccgctggagtccgcctagcatcacaacttcctccgagacttcctcaagcagttcaaagaaacaggctgcttcaatggctgttgtgatccccgaggcagccctgaaagaagggcttagtggagacgccctatccagcccctcggcacctgagccagtggtcggcaccccggatgacaagctggacgcagattacattaagcgttatttgggagatctcacacccctccaagagagctgtcttatacggctccggcaatggcttcaggagacgcacaagggcaagatccccaaggacgaacatattttacgctttctaagggcccgggacttcaatatcgataaggctcgggaaatcatgtgccagtccctcacctggcggaagcagcaccaggtggattacatactggagacctggactcccccccaggtactccaagattactacgctggtggatggcaccaccatgacaaagatgggcggcctctgtacgtgcttagacttgggcagatggataccaagggtctagtcagggctctcggcgaagaagctctcttgcggtacgtcctctcaattaacgaggagggtctgcgacgctgcgaggagaatactaaggtgtttggtagacccatctcatcctggacatgcttggtggacctcgaaggacttaacatgcgccatctttggcgccccggagttaaggccctgttacgcatcatagaagtcgtcgaagccaattacccagagacactggggcgccttctgattcttagagctccacgggtctttccagttctttggacactggtgtctccattcatcgacgataatacacgtagaaagtttctgatatacgccggcaacgactaccaggggccgggcgggctcctggactacatcgacaaggagataatccccgatttcctttccggcgaatgtatgtgcgaagtccctgagggaggcttagtgcccaagtctttgtatagaacagcagaagagctcgagaacgaggacctgaagctgtggaccgagacaatctatcagtccgcgtcagtcttcaaaggagctccacatgaaatcctcatccagatagtagatgcttcctctgtgattacttgggatttcgatgtatgtaaaggggacatcgtctttaatatctatcattccaagcggtccccacagcctcctaagaaggattcccttggcgcacactctataacctctccaggcggaaataacgtgcagctgattgacaaggtctggcagctcgggcgcgactactccatggttgagtcccccctgatatgcaaagaaggtgagtcggtccaaggctcacatgtgaccagatggcctggattttatatattgcaatggaagttccactccatgcctgcttgcgctgcctcctctttgcctagggtggatgatgtactggcctcccttcaggtttcgagccacaaatgtaaagttatgtattatacagaagtgattgggtcagaggactttcggggctcgatgacttcacttgagagctcccactctgggttttctcagctcagcgcagccacgacatcctcgagccagtctcactcgagcagcatgattagcaggtggcggttttgctag

SEQ ID NO: 81427 - DNA, 2160 bp, Artificial Sequence
  derived and/or modified sequence
atggtgcagaagtatcaatctcccgtgagagtctacaagtacccctttgaattaatcatggccgcttatgagcgacgctttcccacttgtcctctgattccaatgttcgtcgggagcgatactgtaaacgaattcaagtccgaagacggtgcgattcatgtcatcgaacggagatgcaaactggacgtcgacgctccacgccttcttaaaaagatcgctggcgtggactatgtgtacttcgtgcaaaagaacagcctgaatagcagagaaaggacactgcatattgaagcatacaacgaaacatttagcaatcgtgtcatcattaacgagcactgttgctataccgttcaccccgaaaatgaggattggacctgcttcgagcagtcagcatcccttgacattaagagcttctttgggttcgagagcacggtggagaaaattgctatgaagcagtacacttctaatattaaaaaaggaaaggaaatcatcgagtactatcttagacagttggaggaggagggtatcacttttgtgccacggtggtcccctccctcaattacgacgtctagcgagacaagtagttcctccagcaagaagcaggccgcttcgatggctgtcgtcatccctgaggccgctcttaaggagggactctcaggcgatgccctgagctcccctagtgccccagagccggtggtgggtacacccgatgacaaactggacgccgactatatcaagcgatatctcggagatttaactcccttgcaggagtcttgtctgatcaggctccgacagtggttgcaggaaacccataagggcaaaattccaaaggatgagcacatcctccggttcctgcgggcaagagacttcaacatcgataaagccagagagattatgtgccaatcgctgacatggcgaaagcaacaccaggtcgactatatcctcgaaacttggacgccaccacaggttttacaggattactacgcaggcggttggcaccatcacgataaagacggacgcccactgtacgtactgcggttgggccagatggacactaagggtttggtgcgcgctcttggcgaggaggctctgctaagatatgttctgtcaatcaatgaagaagggcttagacgctgtgaggagaatacaaaagtgttcggcaggcccatctcgagctggacctgtttggtggacctggaaggcctgaatatgaggcacttatggcggcctggcgtgaaagctttacttcggattattgaggtcgttgaggctaactatccggagacactggggaggctgttgattttgcgcgcaccaagagtgttccctgtgctttggacgttggtgtcgcctttcattgacgacaacacccggcgtaagttcctcatttacgctggtaatgattatcaaggccctggagggttactcgactatatcgataaagaaatcatccctgatttcctgtcaggcgagtgtatgtgtgaagtgccggaagggggattggtgcctaaatctctctatcgtacagcagaagaattggaaaatgaggaccttaagctctggactgagactatttatcagtctgccagcgtgttcaaaggagctccacacgagatattgattcagatcgtggatgctagttctgtgataacctgggactttgacgtatgtaagggtgatatcgttttcaacatttatcattcaaagcgatcaccacagccgcctaagaaggacagcttgggcgctcattccataacctcccccggtggtaacaacgtccaactaattgataaggtatggcagctcggccgagactattccatggtggaaagcccactgatttgtaaagagggcgaaagcgtgcagggctcacacgttaccagatggccaggcttctatatccttcagtggaagttccactccatgcctgcttgtgcagcctcgtcactgcccagggtggacgacgtattagcttcattacaagtgtcaagccataagtgtaaagtgatgtactacaccgaagttatcggatcagaggacttccgaggatctatgactagcctagagagtagtcactccggcttctcccagttgtccgccgctacaacctctagttcccagtcccacagctcctctatgatctcacggtggaggttctgctag

SEQ ID NO: 81428 - DNA, 2160 bp, Artificial Sequence
  derived and/or modified sequence
atggttcagaagtaccaatcacccgtcagggtgtataaatacccattcgagctgattatggccgcttacgaaaggagattccccacatgccccctgatacctatgttcgtaggatcggacactgttaacgagttcaagagcgaagatggcgctattcatgtgatagagagaagatgtaagttggatgttgacgcccctagactcctgaaaaaaatcgccggagttgattatgtctattttgtacagaagaattctctgaattctagagagcggacgttgcacatagaagcttacaatgaaactttcagcaatcgggtgataatcaacgagcactgctgttacaccgtgcaccctgagaacgaagattggacgtgtttcgaacaatcggccagtctggatattaagtcattcttcgggttcgaatcgaccgttgagaagatcgccatgaaacagtatacatcaaatatcaagaagggcaaagagatcatagagtactatcttcgacaactggaggaagagggcatcacgtttgttccgcgatggtcacctccttccattacaactagttccgagacaagctcctcatcatctaaaaagcaagcagcctctatggctgtggtgattccagaggccgcactgaaggaggggttgagcggcgacgcacttagctccccatctgctccagagccagtggtgggaactcctgatgataagctggatgccgactacataaagcggtacctcggcgaccttactcctttgcaggaatcatgtctcatccgactccgccagtggctgcaagaaactcacaagggcaagattccaaaggacgaacacatcctgcgttttctccgggcaagagacttcaacatcgataaggccagggaaatcatgtgtcagagcctcacttggcgaaaacagcaccaagtcgactatattttggagacttggacaccaccccaggtgctgcaagattattatgctggtggatggcaccaccacgataaagacggtcggcctctctacgtcctgcggctaggccaaatggatactaagggcctcgtacgggcactaggggaagaggcactcttgaggtacgtactgtcaattaatgaggaggggctgaggcgctgtgaggagaataccaaggttttcgggagaccaataagtagttggacttgtctcgtcgatctcgagggccttaatatgaggcacctgtggagacccggagtcaaagcccttcttagaataatcgaagtagtcgaggctaattatcccgagactctgggtcgcctgctaattttgagagcacccagggtcttcccagtgttgtggaccttggtcagtccatttatagatgataatacccgacgaaagtttctgatttatgctggcaatgattaccagggccctggcggactgttagattacatagacaaggagattatccctgatttcctgtccggcgaatgtatgtgcgaggtgcctgaaggtggattggtgcctaaatctctctacagaacagcagaggagctagagaacgaagacttgaaactttggacagaaactatctatcaatccgccagcgtgtttaaaggggcaccacacgagatccttattcagatagtcgatgcttccagcgtgatcacttgggatttcgacgtgtgtaagggtgatatcgtgtttaatatctatcacagcaagagatcaccacagcctcccaagaaggactctctcggcgcacattccattacctcaccagggggaaataacgtccagttgatcgataaagtgtggcaactcggcagggactacagcatggtggagtctccgttaatttgcaaagagggagaaagtgtccaggggtcccacgtcactcggtggccaggtttctacatcctacagtggaaattccatagcatgccggcatgtgccgcatctagccttcctcgggtggacgatgtcttagcaagtctccaggtgtcaagccacaagtgcaaggtgatgtactacacagaggtcataggctcagaggacttccgaggctctatgacgagtcttgagagttcccactcaggattcagccagctttcagccgctacgacgtccagctcccagagccactcttcctccatgattagcagatggaggttctgctag

SEQ ID NO: 81429 - DNA, 2957 bp, Artificial Sequence
  derived and/or modified sequence
actcgcagtccgcaggatgactcagggcagccctgaccacagttccgccgccatcggccctagcctgcggaattgggctcgccccgggacgataacagagctctgccgggggctggaggcactgaccgggtgaccagagacccagagaccagaccccctccacggcgcccgggatttcggggacggcttctcccatcgcaagtttcaacagaaaatgagaaatatcccccgacgattggctgaaaacatgcagcaaccactattttcttcctgcccctcgttgatgagagcattcgaagtgacctcagcagggcatccaggtcagtttctggaagacttgtgtgtgtgatgaatgaatatctggttttgtctctgctgggcctgtgtgcctggaaaggaattgttttggcctaggatcatccagctagacttcgggctccttgaggatattcagttttgtatgtttgaatatcctctcaccatgttcagcataaagtaccattcttaatgattatcctcaacaagacaggtgtgagagggttgctgttgtattgcaatcatggtgcagaaataccagtccccagtgagggtgtacaaatacccctttgaattaattatggctgcctatgaaaggaggttccctacatgtcctttgattccgatgttcgtgggcagtgacactgtgaatgaattcaagagcgaagatggggctattcatgtcattgaaaggcgctgcaagctggatgtagatgcacccagactgctgaagaagattgcaggagttgattatgtttattttgtccagaaaaactcactgaattctcgggaacgtactttgcacattgaggcttataatgaaacgttttccaatcgggtcatcattaatgagcattgctgctacaccgttcaccctgaaaatgaagattggacctgttttgaacagtctgcaagtttagatattaaatctttctttggttttgaaagtacagtggaaaaaattgcaatgaaacaatataccagcaacattaaaaaaggaaaggaaatcatcgaatactaccttcgccaattagaagaagaaggcataacctttgtgccccgttggagtccgccttccatcacgacctcttcagagacatcttcatcatcctccaagaaacaagcagcgtccatggccgtcgtcatcccagaagctgccctcaaggaggggctgagtggtgatgccctcagcagccccagcgcacctgagcccgtggtgggcacccctgacgacaaactagatgccgactacatcaagagatacctgggcgatttgactccgctgcaggagagctgcctcattagacttcgccagtggctccaggagacccacaagggcaaaattccaaaagatgagcatattcttcggttcctccgtgcacgggattttaatattgacaaagccagagagatcatgtgtcagtctttgacgtggagaaagcagcatcaggtagactacattcttgaaacctggacccctcctcaggtccttcaggattactacgcgggaggctggcatcatcacgacaaagatgggcggcccctctacgtgctcaggctggggcagatggacaccaaaggcttggtgagagcgctcggggaggaagccctgctgagatacgttctctccataaatgaagaagggctaaggcgatgcgaagagaatacaaaagtctttggtcggcctatcagctcatggacctgcctggtggacttggaagggctgaacatgcgccacttgtggagacctggtgtgaaagcgctgctgcggatcatcgaggtggtggaggccaactaccctgagacactgggccgccttctcatcctgcgggcgcccagggtatttcctgtgctctggacgctggttagtccgttcattgatgacaacaccagaaggaagttcctcatttatgcaggaaatgactaccagggtcctggaggcctgctggattacatcgacaaagagattattccagatttcctgagtggggagtgcatgtgcgaagtgccagagggtggactggtccccaaatctctgtaccggactgcagaggagctggagaacgaagacctgaagctctggactgagaccatctaccagtctgcaagcgtcttcaaaggagccccacatgagattctcattcagattgtggatgcctcgtcagtcatcacttgggatttcgacgtgtgcaaaggggacattgtgtttaacatctatcactccaagaggtcgccacaaccacccaaaaaggactccctgggagcccacagcatcacctctccgggtgggaacaatgtgcagctcatagacaaagtctggcagctgggccgcgactacagcatggtggagtcgcctctgatctgcaaagaaggagaaagcgtgcagggttcccatgtgaccaggtggccgggcttctacatcctgcagtggaaattccacagcatgcctgcgtgcgccgccagcagccttccccgggtggacgacgtgcttgcgtccctgcaggtctcttcgcacaagtgtaaagtgatgtactacaccgaggtgatcggctcggaggatttcagaggttccatgacgagcctggagtccagccacagcggcttctcccagctgagtgccgccaccacctcctccagccagtcccactccagctccatgatctccagatggcgattttgctgacagctgccaagaaaatgcttcactcaacagtcctcatgtgcccagagatgtttatagaactgtttgaattgcagccatcccctgccccctcccaggctgaagatctgttctttttaagttgattcgggagtggcattcttttatacccaaagactgtagtgcatcttgaagagctcaaagcacatgaccgcacaaatgcttacagggtttcctcccgagtaatccaatctcactcccc

SEQ ID NO: 81430 - DNA, 3009 bp, Artificial Sequence
  derived and/or modified sequence
gtcacccgtaacaaccacaagtgccgtcgccgcgccccttccccctcccgcctccccggccccctccccggaaccggcggtcgagctacggtcgcggagcagtggaaccgagactgccccgcggagccgccggtatgagcgcccctcgccaccccgtgtcccaggcccggcctttctgacaagagctagacttcgggctccttgaggatattcagttttgtatgtttgaatatcctctcaccatgttcagcataaagtaccattcttaatgattatcctcaacaagacaggtgtgagagggttgctgttgtattgcaatcatggtgcagaaataccagtccccagtgagggtgtacaaatacccctttgaattaattatggctgcctatgaaaggaggttccctacatgtcctttgattccgatgttcgtgggcagtgacactgtgaatgaattcaagagcgaagatggggctattcatgtcattgaaaggcgctgcaagctggatgtagatgcacccagactgctgaagaagattgcaggagttgattatgtttattttgtccagaaaaactcactgaattctcgggaacgtactttgcacattgaggcttataatgaaacgttttccaatcgggtcatcattaatgagcattgctgctacaccgttcaccctgaaaatgaagattggacctgttttgaacagtctgcaagtttagatattaaatctttctttggttttgaaagtacagtggaaaaaattgcaatgaaacaatataccagcaacattaaaaaaggaaaggaaatcatcgaatactaccttcgccaattagaagaagaaggcataacctttgtgccccgttggagtccgccttccatcacgacctcttcagagacatcttcatcatcctccaagaaacaagcagcgtccatggccgtcgtcatcccagaagctgccctcaaggaggggctgagtggtgatgccctcagcagccccagcgcacctgagcccgtggtgggcacccctgacgacaaactagatgccgactacatcaagagatacctgggcgatttgactccgctgcaggagagctgcctcattagacttcgccagtggctccaggagacccacaagggcaaaattccaaaagatgagcatattcttcggttcctccgtgcacgggattttaatattgacaaagccagagagatcatgtgtcagtctttgacgtggagaaagcagcatcaggtagactacattcttgaaacctggacccctcctcaggtccttcaggattactacgcgggaggctggcatcatcacgacaaagatgggcggcccctctacgtgctcaggctggggcagatggacaccaaaggcttggtgagagcgctcggggaggaagccctgctgagatacgttctctccataaatgaagaagggctaaggcgatgcgaagagaatacaaaagtctttggtcggcctatcagctcatggacctgcctggtggacttggaagggctgaacatgcgccacttgtggagacctggtgtgaaagcgctgctgcggatcatcgaggtggtggaggccaactaccctgagacactgggccgccttctcatcctgcgggcgcccagggtatttcctgtgctctggacgctggttagtccgttcattgatgacaacaccagaaggaagttcctcatttatgcaggaaatgactaccagggtcctggaggcctgctggattacatcgacaaagagattattccagatttcctgagtggggagtgcatgtgcgaagtgccagagggtggactggtccccaaatctctgtaccggactgcagaggagctggagaacgaagacctgaagctctggactgagaccatctaccagtctgcaagcgtcttcaaaggagccccacatgagattctcattcagattgtggatgcctcgtcagtcatcacttgggatttcgacgtgtgcaaaggggacattgtgtttaacatctatcactccaagaggtcgccacaaccacccaaaaaggactccctgggagcccacagcatcacctctccgggtgggaacaatgtgcagctcatagacaaagtctggcagctgggccgcgactacagcatggtggagtcgcctctgatctgcaaagaaggagaaagcgtgcagggttcccatgtgaccaggtggccgggcttctacatcctgcagtggaaattccacagcatgcctgcgtgcgccgccagcagccttccccgggtggacgacgtgcttgcgtccctgcaggtctcttcgcacaagtgtaaagtgatgtactacaccgaggtgatcggctcggaggatttcagaggttccatgacgagcctggagtccagccacagcggcttctcccagctgagtgccgccaccacctcctccagccagtcccactccagctccatgatctccagatggcgattttgctgacagctgccaagaaaatgcttcactcaacagtcctcatgtgcccagagatgtttatagaactgtttgaattgcagccatcccctgccccctcccaggctgaagatctgttctttttaagttgattcgggagtggcattcttttatacccaaagactgtagtgcatcttgaagagctcaaagcacatgaccgcacaaatgcttacagggtttcctcccgagtaatccaatctcactccccttgtaagggaattctggggcagctatggtttgagtatgcagtttgcatcgtgtttctacctttagtaccttgccactcttttaaaacgctgctgtcatttcccatttcttagtactaatgattctttgattctccctctattatgtcttaattcactttccttcctaaatttgttatttgcatatcaaattctgtaaatgttttgtaaacatattacctcacttggtaatacaatactgatagtctttaaaagatttttttattgttatcaataataaatgtgaactattt

SEQ ID NO: 81431 - protein, 477 aa, Artificial Sequence
  derived and/or modified sequence
MAQGSGDQRAVGVADPEESSPNMIVYCKIEDIITKMQDDKTGGVPIRTVKSFLSKIPSVVTGTDIVQWLMKNLSIEDPVEAIHLGSLIAAQGYIFPISDHVLTMKDDGTFYRFQAPYFWPSNCWEPENTDYAIYLCKRTMQNKARLELADYEAENLARLQRAFARKWEFIFMQAEAQVKIDRKKDKTERKILDSQERAFWDVHRPVPGCVNTTEMDIRKCRRLKNPQKVKKSVYGVTEESQAQSPVHVLSQPIRKTTKEDIRKQITFLNAQIDRHCLKMSKVAESLIAYTEQYVEYDPLITPAEPSNPWISDDVALWDIEMSKEPSQQRVKRWGFSFDEILKDQVGRDQFLRFLESEFSSENLRFWLAVQDLKKQPLQDVAKRVEEIWQEFLAPGAPSAINLDSHSYEITSQNVKDGGRYTFEDAQEHIYKLMKSDSYARFLRSNAYQDLLLAKKKPESEQGRRTSLEKFTRSVLLF

SEQ ID NO: 81432 - protein, 346 aa, Artificial Sequence
  derived and/or modified sequence
MQNKARLELADYEAENLARLQRAFARKWEFIFMQAEAQVKIDRKKDKTERKILDSQERAFWDVHRPVPGCVNTTEMDIRKCRRLKNPQKVKKSVYGVTEESQAQSPVHVLSQPIRKTTKEDIRKQITFLNAQIDRHCLKMSKVAESLIAYTEQYVEYDPLITPAEPSNPWISDDVALWDIEMSKEPSQQRVKRWGFSFDEILKDQVGRDQFLRFLESEFSSENLRFWLAVQDLKKQPLQDVAKRVEEIWQEFLAPGAPSAINLDSHSYEITSQNVKDGGRYTFEDAQEHIYKLMKSDSYARFLRSNAYQDLLLAKKKPESEQGRRTSLEKFTRSVLWLLFPLGKRP

SEQ ID NO: 81433 - protein, 346 aa, Artificial Sequence
  derived and/or modified sequence
MQNKARLELADYEAENLARLQRAFARKWEFIFMQAEAQVKIDRKKDKTERKILDSQERAFWDVHRPVPGCVNTTEMDIRKCRRLKNPQKVKKSVYGVTEESQAQSPVHVLSQPIRKTTKEDIRKQITFLNAQIDRHCLKMSKVAESLIAYTEQYVEYDPLITPAEPSNPWISDDVALWDIEMSKEPSQQRVKRWGFSFDEILKDQVGRDQFLRFLESEFSSENLRFWLAVQDLKKQPLQDVAKRVEEIWQEFLAPGAPSAINLDSHSYEITSQNVKDGGRYTFEDAQEHIYKLMKSDSYARFLRSNAYQDLLLAKKKPESEQGRRTSLEKFTRSVLYSNTPLAKRP

SEQ ID NO: 81434 - DNA, 1434 bp, Artificial Sequence
  derived and/or modified sequence
atggcccagggtagtggagaccagagggcagtgggtgtggctgatccggaagagagtagcccaaatatgatcgtatattgcaagattgaggacatcattactaaaatgcaagatgataaaaccggaggagtcccaatcaggacggtcaagtcattcctgagtaagataccgagtgtcgtcacgggcacagatatcgtgcagtggttaatgaagaatctgtccatagaggatcctgtcgaggctatccacttggggtcactgattgccgcgcaggggtacatttttcctatcagtgaccacgttcttaccatgaaagatgacggcaccttttataggttccaagccccatacttctggcctagcaactgctgggagccggaaaatactgattacgctatttatctatgcaaacgcaccatgcaaaataaagcgagacttgagctcgctgattacgaagcagaaaacctcgcccgtttgcagcgtgccttcgctcgtaaatgggaattcatctttatgcaggcagaggctcaggtgaaaatcgaccggaaaaaggataagactgaacgtaagatactagactcccaggaacgagctttttgggatgtccataggcctgtgcctgggtgcgtgaatacgaccgaaatggacatccgtaagtgtagacgactgaagaacccacagaaagtgaaaaagtcggtgtacggagtaactgaagaaagtcaggcccagagccctgtccatgtgctctcacagcctattaggaagactaccaaggaagacattcgcaagcagattactttcctaaacgcccagatcgaccgccactgtctcaagatgtctaaggtcgctgaaagccttatcgcttataccgaacagtacgtggagtatgacccactcatcacccctgctgaaccatctaatccgtggatttccgatgacgtcgccttatgggacattgagatgagcaaggaaccaagccagcagcgcgtaaagcgttggggattctccttcgatgagatcctgaaagatcaggtaggaagggaccaatttctgaggtttctcgagtcggaatttagttctgaaaatctgcgcttctggttggccgtgcaggacctgaagaaacagcctctgcaggatgtggcaaaacgcgttgaggagatttggcaagagttcctggctccaggggccccttctgctattaacctggacagccattcatacgaaatcaccagtcagaacgttaaggatgggggccggtacaccttcgaagatgcacaagagcatatttataaacttatgaagagtgacagttacgctaggtttctgcgaagcaatgcgtatcaggatctccttctggctaagaagaaacctgaaagcgaacagggccgacggacgtcactcgaaaagtttacgaggtccgtcctgctgttttag

SEQ ID NO: 81435 - DNA, 1041 bp, Artificial Sequence
  derived and/or modified sequence
atgcagaacaaggcccgcctggagttggccgactatgaagcagagaacctggccagactgcagagagccttcgctcgcaagtgggagtttatattcatgcaagccgaggctcaggtgaagattgaccggaagaaagacaaaactgaacggaaaatactggacagtcaggaacgcgccttttgggatgtgcatcgtcctgttcccgggtgcgttaatactacagagatggatatacggaagtgccgcaggctgaaaaatccacaaaaggtgaagaagagcgtatacggagtgactgaagaaagccaggcgcagtctcccgtccacgtgctgagccaacccatcaggaagactacgaaagaggacattcggaagcagatcacctttcttaatgctcaaattgataggcattgccttaaaatgagcaaggttgctgagtcattgatcgcatatactgaacagtacgtggaatacgaccctttaattaccccagccgagccaagtaacccatggatttcagatgatgtcgcactttgggatattgagatgagtaaggagccatcccagcaaagggtgaagcgctggggctttagcttcgacgagatcctgaaggatcaagtcgggcgtgatcaatttctgcgctttctagagtcagaattctcgtcagagaatttacgtttctggctggccgtccaggacctgaaaaaacagccgcttcaagatgtagccaagcgcgtggaggagatctggcaagaatttttagcccctggcgcaccctctgccatcaacctggacagccattcatacgagatcactagccagaacgtgaaagacgggggcaggtacactttcgaagatgcacaggagcacatttataagttgatgaagtcagatagttacgcacggtttctgcgatctaacgcctatcaagatctcctgcttgccaaaaagaagcctgagtctgaacaaggcaggcggacctccctggaaaagttcactagaagcgtgctatggctgctgttccccctgggaaagagaccatag

SEQ ID NO: 81436 - DNA, 1041 bp, Artificial Sequence
  derived and/or modified sequence
atgcagaacaaagctagactggaattggctgattacgaggcagaaaatttggcccgcctacaaagagctttcgctcgaaaatgggagttcatcttcatgcaagctgaggcccaagttaagattgaccgtaagaaagacaaaactgaaagaaaaatcttggactcccaggaacgcgcattttgggatgtccataggccagtccccggttgcgtgaacactaccgagatggatatcaggaagtgccgaaggctcaagaatccccagaaagtcaagaagtcagtttacggagtgacagaggagtcacaggcacagtcccccgtccacgtgctcagtcagcctatccggaagacaaccaaggaagatatacgtaagcagataaccttcctgaatgcccagatcgaccggcactgtttgaagatgagcaaggtcgctgagtctttgattgcctacactgaacagtacgtagagtacgatcccttaattacccctgccgagccttcgaatccttggattagtgacgatgttgctctttgggacatcgagatgagcaaagagccttctcagcagcgagtcaagaggtggggcttctcattcgacgagattctgaaagaccaggtcggaagggaccagtttctgagattcttggagagcgagttttcttccgaaaatctgaggttttggctcgccgtccaggacctgaagaaacaacccctccaggacgtcgctaaacgcgtggaggagatatggcaggagttcctggcgcctggtgctccctctgccatcaatctcgactctcattcatatgaaataacatcacagaacgtgaaggatgggggccggtatacattcgaggacgcccaagaacacatttacaagctgatgaaatccgacagttacgcacgcttcctccgctcaaatgcctaccaggatttgctgctcgctaagaagaaaccagagtctgagcagggacggagaacaagtctagagaaatttactcgctccgtcctctactccaacacccctctcgcaaaaagaccttag

SEQ ID NO: 81437 - DNA, 1434 bp, Artificial Sequence
  derived and/or modified sequence
atggcccagggcagcggggaccagagagctgtgggcgtggccgaccctgaggagagcagccccaacatgattgtgtactgcaagattgaggacatcatcaccaagatgcaggatgacaagacaggaggagtgcccatcagaacagtgaagagcttcctgagcaagatccccagcgtggtgactggaacagacatcgtgcagtggctgatgaagaacctgagcattgaggaccctgtggaggccatccacctgggcagcctgattgctgcccagggctacatcttccccatcagtgaccacgtgctgaccatgaaggatgatggcaccttctaccgcttccaggccccctacttctggcccagcaactgctgggagccagaaaatacagattatgccatctacctgtgcaagaggaccatgcagaacaaggcccggctggagctggccgactatgaagctgagaacctggcccggctgcagagggcctttgccaggaagtgggagttcatcttcatgcaggccgaggcccaggtgaagattgacaggaagaaggacaagacagagaggaagatcctggacagccaggagcgggccttctgggatgtgcacaggcctgtgcccggctgtgtgaacaccacagagatggacatcagaaaatgtagaaggctgaagaacccccagaaggtgaagaagtctgtgtatggagtgacagaggagagccaggcccagagccctgtgcacgtgctgagccagcccatcaggaagaccaccaaggaggacatcaggaagcagatcaccttcctgaatgcccagattgacagacactgcctgaagatgagcaaggtggccgagagcctgattgcctacacagagcagtatgtggagtatgaccccctcatcaccccagctgagcccagcaacccctggatcagtgatgatgtggccctgtgggacatcgagatgagcaaggagcccagccagcagagggtgaagcgctggggcttctcctttgatgagatcctgaaggaccaggtgggccgggaccagttcctgcgcttcctggagagcgagttcagcagcgagaacctgcgcttctggctggccgtgcaggacctgaagaagcagcccctgcaggatgtggccaagagggtggaggagatctggcaggagttcctggcccctggggcccccagcgccatcaacctggacagccacagctatgagatcaccagccagaatgtgaaggatggcggccgctacacctttgaagatgcccaggagcacatctacaagctgatgaagagtgacagctatgcccgcttcctgcggagcaatgcctaccaggacctgctgctggccaagaagaagccagagagcgagcagggccgccgcaccagcctggagaagttcaccaggtctgtgctgctcttctag

SEQ ID NO: 81438 - DNA, 1041 bp, Artificial Sequence
  derived and/or modified sequence
atgcagaacaaggcccggctggagctggccgactatgaagctgagaacctggcccggctgcagagggcctttgccaggaagtgggagttcatcttcatgcaggccgaggcccaggtgaagattgacaggaagaaggacaagacagagaggaagatcctggacagccaggagcgggccttctgggatgtgcacaggcctgtgcccggctgtgtgaacaccacagagatggacatcaggaagtgccggcggctgaagaacccccagaaggtgaagaagtctgtgtatggagtgacagaggagagccaggcccagagccctgtgcacgtgctgagccagcccatcaggaagaccaccaaggaggacatcaggaagcagatcaccttcctgaatgcccagattgacagacactgcctgaagatgagcaaggtggccgagagcctcatcgcctacacagagcagtatgtggagtatgaccccctcatcaccccagctgagcccagcaacccctggatcagtgatgatgtggccctgtgggacatcgagatgagcaaggagcccagccagcagagggtgaagcgctggggcttctcctttgatgagatcctgaaggaccaggtgggccgggaccagttcctgcgcttcctggagagcgagttcagcagcgagaacctgcgcttctggctggccgtgcaggacctgaagaagcagcccctgcaggatgtggccaagagggtggaggagatctggcaggagttcctggcccctggggcccccagcgccatcaacctggacagccacagctatgagatcaccagccagaatgtgaaggatggcggccgctacacctttgaagatgcccaggagcacatctacaagctgatgaagagtgacagctatgcccgcttcctgcggagcaatgcctaccaggacctgctgctggccaagaagaagccagagagcgagcagggccgccgcaccagcctggagaagttcaccaggtctgtgctgtggctgctcttccccctgggcaagaggccctag

SEQ ID NO: 81439 - DNA, 1041 bp, Artificial Sequence
  derived and/or modified sequence
atgcagaacaaggcccggctggagctggccgactatgaagctgagaacctggcccggctgcagagggcctttgccaggaagtgggagttcatcttcatgcaggccgaggcccaggtgaagattgacaggaagaaggacaagacagagaggaagatcctggacagccaggagcgggccttctgggatgtgcacaggcctgtgcccggctgtgtgaacaccacagagatggacatcaggaagtgccggcggctgaagaacccccagaaggtgaagaagtctgtgtatggagtgacagaggagagccaggcccagagccctgtgcacgtgctgagccagcccatcaggaagaccaccaaggaggacatcaggaagcagatcaccttcctgaatgcccagattgacagacactgcctgaagatgagcaaggtggccgagagcctcatcgcctacacagagcagtatgtggagtatgaccccctcatcaccccagctgagcccagcaacccctggatcagtgatgatgtggccctgtgggacatcgagatgagcaaggagcccagccagcagagggtgaagcgctggggcttctcctttgatgagatcctgaaggaccaggtgggccgggaccagttcctgcgcttcctggagagcgagttcagcagcgagaacctgcgcttctggctggccgtgcaggacctgaagaagcagcccctgcaggatgtggccaagagggtggaggagatctggcaggagttcctggcccctggggcccccagcgccatcaacctggacagccacagctatgagatcaccagccagaatgtgaaggatggcggccgctacacctttgaagatgcccaggagcacatctacaagctgatgaagagtgacagctatgcccgcttcctgcggagcaatgcctaccaggacctgctgctggccaagaagaagccagagagcgagcagggccgccgcaccagcctggagaagttcaccaggtctgtgctgtacagcaacacccccctggccaagaggccctag

SEQ ID NO: 81440 - DNA, 1434 bp, Artificial Sequence
  derived and/or modified sequence
atggcccagggcagcggcgaccagcgggccgtgggcgtggccgaccctgaggagagttctccgaacatgattgtgtattgcaagatcgaggatatcattaccaagatgcaggatgacaagactggtggtgtgccaatccggacagtaaagtccttcttaagtaagatcccatccgtcgtcaccgggactgacattgtccagtggctgatgaagaatctgagcatcgaggaccctgtcgaagccatccacctagggtccttgattgctgcccaaggatacatctttcccattagcgatcacgttttaacgatgaaggacgacggaaccttttacagattccaagctccgtacttctggccctccaactgctgggagccagagaacactgactatgctatttacctatgcaaacgaaccatgcaaaacaaagctagactggagttagccgattatgaagcggagaacctggcaaggctccagagagcatttgctcggaaatgggaatttatctttatgcaggccgaggcgcaagtgaagatcgatcggaaaaaggacaaaacagagaggaaaatacttgacagccaggagagagccttttgggatgtccaccgcccagtcccggggtgcgtcaatacaacagaaatggacattcgaaagtgcagacggttgaaaaatcctcagaaggttaaaaagagcgtgtacggtgtcactgaggaatcccaggctcagtcccccgtgcatgtgttaagtcagcctatcaggaaaacaacaaaggaggacattagaaagcaaatcacattccttaatgctcaaattgatcgccactgtttaaagatgagtaaggtcgctgagtcccttatcgcctacactgaacaatacgtggagtacgacccacttattactcctgccgaaccaagtaacccctggatcagcgatgacgtcgcattatgggatattgagatgtctaaagaacctagtcaacagcgcgtgaaacgatggggattttcttttgacgaaatcttgaaggatcaggtgggaagagaccagttcttgagattcttagaatctgaattcagctccgaaaacctgagattctggctggcggttcaggatttgaagaagcaaccactgcaggacgtcgctaagcgcgtcgaagagatatggcaggagttcttagccccgggggccccaagtgcaatcaatctggacagtcacagctatgagatcacttcacagaacgtcaaggacggaggacggtacacttttgaagacgcgcaggagcacatttataagctcatgaagtccgactcttacgctaggttcttgcgtagtaacgcatatcaagatctgcttttggcaaaaaagaagcctgaaagcgagcagggtcgacgtacttctctcgagaagtttacaaggagcgtccttttgttctag

SEQ ID NO: 81441 - DNA, 1041 bp, Artificial Sequence
  derived and/or modified sequence
atgcagaacaaggcccggctggagctggccgactacgaggccgagaacctcgcccgcctgcagcgcgctttcgctcgcaagtgggagttcatcttcatgcaggccgaggctcaggttaaaatcgataggaaaaaagataaaactgaacgaaaaatcttggactcgcaagaacgagccttttgggacgtgcataggcctgtccctgggtgcgtgaatacaacagaaatggatattcgaaagtgtcgccggctgaagaaccctcagaaagtgaaaaagagcgtatacggggtcacagaggaatcccaagcacaatcccccgtgcacgtgctgtctcagcctattcgcaaaaccacaaaagaagacatccggaagcaaatcaccttcttgaatgcacaaatcgacaggcactgtctgaagatgtcgaaagtggccgagtccctcatcgcgtacacggagcagtacgttgaatacgatccactaatcacaccagctgaacctagcaatccttggatttctgatgatgtagctttatgggatatagagatgtcaaaagagccaagccaacagagagtaaaaagatggggttttagcttcgacgaaattctaaaggatcaagtgggcagagaccaatttcttcgctttctggagagcgaattcagttctgagaatctgaggttttggctcgcggtacaagatttaaaaaagcagcccctgcaggacgtggctaagcgagttgaagagatctggcaggagttcctggcgcctggagcacccagcgccattaacctcgacagccattcctatgaaatcacatcacaaaacgtgaaagacggaggccgatatacttttgaggatgcccaagagcatatctataaactgatgaagagcgatagctatgcccgtttcctccgctccaatgcctaccaagacctgctgcttgccaagaaaaaacccgagtctgaacagggccgccgcacctctcttgagaagttcacgcggtccgtcctctggctgctattcccactgggaaaacgaccatag

SEQ ID NO: 81442 - DNA, 1041 bp, Artificial Sequence
  derived and/or modified sequence
atgcagaacaaggcccggctggagctggccgactacgaggccgagaacctcgcccgactgcagagagcttttgcgcggaaatgggagttcatctttatgcaagccgaggcgcaggttaaaattgacaggaagaaggacaagaccgagagaaagatcctggactctcaagaaagagcgttttgggatgtgcataggccagtccctggatgcgtgaatacaactgaaatggacataagaaagtgcaggcgactgaaaaacccccagaaggttaaaaaatctgtgtacggcgttactgaggagagccaagctcaatccccagtgcatgtcttatcccagccaatccggaagaccaccaaggaagacatcaggaaacagatcaccttcctaaatgcccaaattgatcgccattgcttgaaaatgagcaaggtggctgagagtttgatcgcctacactgaacaatatgtggagtatgatccattgatcaccccagccgagcccagtaacccatggatatcagatgacgtcgccctatgggatattgaaatgtctaaagaaccctcacaacagcgagtgaagcgttggggcttctcattcgatgaaatcctcaaagatcaggtcggacgggaccaattcttgaggttcctggaatctgagtttagctcagaaaacctgcgcttctggctggctgtgcaggatctaaagaagcagcctctacaggacgtcgctaaacgggtagaggagatctggcaggagtttctggcccccggcgcccccagcgccatcaatctggactcacattcttacgagattacctctcaaaatgtcaaggatggaggtcgctacacttttgaggatgcgcaggaacacatttacaagctgatgaagtctgactcctatgcgcggtttttgagatcaaacgcttatcaggaccttctccttgctaagaaaaaacccgagtcagagcaagggagacgtacttctttagagaaatttactcggtcagtgctgtactcaaatacgccgctggccaagcggccatag

SEQ ID NO: 81443 - DNA, 1434 bp, Artificial Sequence
  derived and/or modified sequence
atggcccagggaagcggggaccagagagccgtgggcgtggccgaccccgaggaatcgtcacctaatatgattgtgtattgtaaaatagaggacattatcactaagatgcaggatgacaaaacgggcggagttccaatcagaactgtcaaaagcttcctttccaaaatccctagtgtggtgacgggcactgatatcgtgcagtggctcatgaagaacctttccatcgaagaccctgtcgaggccatccatctggggagtcttattgccgcacaggggtatatttttccgatttctgaccacgtacttacaatgaaggacgatggcacgttttataggttccaggcgccatacttctggccgagcaactgttgggaacccgaaaacactgattacgccatctatctgtgtaaaagaactatgcagaataaagcgagacttgaactagctgattatgaggcagaaaatctcgcgaggcttcagagggcctttgcccgtaagtgggagttcatctttatgcaggctgaggcacaggttaagattgatcgtaagaaggacaaaacagagcgcaagattctcgatagccaggagcgcgctttctgggacgtgcatcgtcccgttcccggatgcgtaaacacaacagagatggacattcgcaagtgccgccgattaaaaaacccccagaaggttaaaaaatctgtgtacggcgtcacagaagagtcccaggcccagtccccagttcatgtgttgtcacagccaataaggaagaccaccaaagaggacattcgcaagcaaattacttttttgaatgcacagattgacagacattgtttaaaaatgtcaaaggtcgcggaaagcctaatagcgtataccgaacagtatgtcgagtatgatccattgataacccccgcagagccatctaatccttggattagcgacgacgtcgcactgtgggatattgaaatgagcaaagagcccagtcaacagagagtaaagcgctggggattttcttttgatgagattctcaaggatcaggtcggaagggaccagtttctgaggtttctggagtcagagttctcgtcagagaatttgaggttctggctggccgtccaagacttaaaaaagcagccactgcaggacgtagctaagcgagtcgaagagatttggcaggagtttctggcgcctggggctccatctgcaattaacctggacagtcactcatacgaaatcacaagtcagaacgtgaaggacgggggacggtatacatttgaggatgcccaagagcacatctataaactgatgaagtctgactcctacgccaggttcctgcggagtaacgcttaccaagacctgcttctggcgaagaaaaagcccgaaagcgaacagggtcgcaggacctctctggagaaatttactagaagcgtcctgttgttctag

SEQ ID NO: 81444 - DNA, 1041 bp, Artificial Sequence
  derived and/or modified sequence
atgcagaataaggctcggctcgagctcgctgattacgaggccgagaatcttgcccgactacagcgggctttcgccaggaagtgggagttcattttcatgcaggccgaagctcaggtgaaaatcgacaggaagaaggacaagactgagagaaagatccttgactcacaagaacgggctttttgggatgtgcacaggccagtccctggctgcgtcaatacgaccgaaatggacatccggaagtgcaggaggttaaagaacccacagaaagttaaaaaaagcgtttatggggtcacggaggaaagtcaggctcagtctcccgtgcatgttctttcgcagccaattcggaaaactacaaaagaagatattcgcaagcagattacattcctgaatgcacagatcgacaggcactgcctcaagatgagcaaggtggccgagtccctgatcgcttacacagaacagtacgtcgagtacgatcctctgatcacgcctgctgagcctagtaacccttggatctccgacgacgtggcactttgggatatcgagatgtcaaaggagccctcacagcagagagtcaaaagatggggattctctttcgacgaaatcctgaaagaccaggtggggagagatcagttcctaaggttcctggagagtgaatttagttctgagaatctgaggttctggttggccgtgcaggatctcaagaagcagccgttgcaggatgtagcaaagcgagttgaagagatctggcaggagttcctggcccctggtgccccttctgcaataaacctcgactcccattcgtacgagatcacatcccagaatgtcaaggatggtggcagatacaccttcgaggacgcacaagaacacatctacaaactcatgaagtccgacagctacgccagatttctgcgctctaacgcctaccaggacttgctgctggcaaagaagaaacccgagtctgaacagggcaggcggacttctctcgaaaaatttactcgatctgtgctgtggctgttatttcctcttgggaagaggccttag

SEQ ID NO: 81445 - DNA, 1041 bp, Artificial Sequence
  derived and/or modified sequence
atgcaaaataaagcccgactggaactggccgattatgaagcagagaatttagctcgactgcagcgagcttttgcaagaaagtgggaattcatttttatgcaggctgaggcacaggtcaagattgatcgaaagaaagataaaaccgaacgtaagatactagactctcaggaacgggctttttgggatgtgcatagacccgtcccaggatgcgttaacaccaccgagatggacattagaaagtgcagacgcctcaaaaatccacagaaagtgaagaagtccgtgtatggagttactgaagaatcccaggcccaaagtccagtccacgtgcttagtcagccaatccgtaagaccacaaaggaggacattaggaagcagattacgtttctcaacgcccaaatcgatagacattgtttgaagatgtctaaagtagcagagagcctcatcgcatatactgaacagtacgtagaatacgatcccctcatcaccccagcagagcccagcaacccatggatctcagatgacgtggcgctatgggatatagaaatgtcaaaagaaccttcccagcaacgagtaaagagatggggtttctctttcgatgaaatactgaaagaccaagtcggacgcgaccagtttctaagattcctggaatctgagttcagttctgaaaacttacggttctggctggcagtgcaggatctgaagaagcaaccactgcaagatgtcgcaaagagagttgaagagatttggcaggagtttctggcaccaggcgctccctccgccataaacctcgatagtcattcgtacgaaattacgagtcagaatgtgaaggacggcggtagatacacgtttgaggacgcccaagaacacatctataagctgatgaaaagcgattcctacgcccgattcctgcgatctaacgcatatcaggaccttttactcgcaaagaaaaagccggagtccgagcaaggcaggcgcactagtttggagaagtttacaagatctgtgctctactctaacactcctctcgcaaagcgaccctag

SEQ ID NO: 81446 - DNA, 1497 bp, Artificial Sequence
  derived and/or modified sequence
atggctcaaggatccggggatcaaagagcagtgggggttgctgacccagaggagagttctccaaacatgatcgtttactgcaaaattgaagacatcattacaaagatgcaagatgacaagacagggggtgtgcccatcagaacagtcaagagctttctctccaaaatccccagtgtcgtcacaggtactgacattgtgcagtggcttatgaagaacctttccattgaggacccagttgaagcaatacacttggggagccttatcgctgcccagggctacatctttccaatctcagaccatgttctcaccatgaaggatgatggcaccttttatcgtttccaggctccgtacttctggccttcgaactgctgggaacctgaaaacactgactatgccatctatctctgtaagaggacaatgcaaaataaagcaaggctggaactggcagattatgaagcagaaaacttagcaagactccagagggcctttgcgaggaagtgggaattcatctttatgcaagcagaagcacaagtaaagattgaccggaaaaaagacaagacagaaaggaaaattttggatagtcaagaacgagccttttgggatgtccacaggcctgtgccaggctgtgtgaacacaacagaaatggatatccgaaaatgtcgacgtttgaagaatccacaaaaggttaaaaagtccgtgtatggcgtgactgaagagtcccaggcacagagcccggtgcatgtactcagccaaccaatcaggaaaacaacaaaagaggacatccggaaacagataacatttttgaacgcacagatcgacagacattgtttgaaaatgtccaaagtggctgaaagtttaattgcctacacggaacaatatgtggaatatgaccctttgataacaccagctgagccatccaacccttggatcagcgatgacgttgctttgtgggacatagagatgagcaaagagcccagccaacagcgagtaaaaagatggggcttctctttcgatgagatattgaaggaccaggtggggcgggaccagtttctacgattcctggagtccgaattcagttcagaaaacctcaggttctggctggctgtccaagatcttaagaaacaacccctacaggatgtggccaagagggtagaagaaatctggcaagagtttctggctccaggggctccaagtgcaatcaacctggattctcacagctatgagataaccagtcaaaatgtcaaagatggagggagatatacatttgaagacgcccaggagcacatctacaagctgatgaagagtgacagctatgcccgcttcctccggtcaaatgcttaccaggatttgctgctggccaagaagaagccagaaagtgagcaaggtcgtagaacttccctagaaaagttcactcgcagtgtgcttctcttctagggatgaaaatgcaaaaaagagcaagcggctccctctgcagaaggtgcacccttgatcgcccag

SEQ ID NO: 81447 - DNA, 1103 bp, Artificial Sequence
  derived and/or modified sequence
aaaacactgactatgaaggaggaagacattgaagaaggaaagccatctatctctgtaagaggacaatgcaaaataaagcaaggctggaactggcagattatgaagcagaaaacttagcaagactccagagggcctttgcgaggaagtgggaattcatctttatgcaagcagaagcacaagtaaagattgaccggaaaaaagacaagacagaaaggaaaattttggatagtcaagaacgagccttttgggatgtccacaggcctgtgccaggctgtgtgaacacaacagaaatggatatccgaaaatgtcgacgtttgaagaatccacaaaaggttaaaaagtccgtgtatggcgtgactgaagagtcccaggcacagagcccggtgcatgtactcagccaaccaatcaggaaaacaacaaaagaggacatccggaaacagataacatttttgaacgcacagatcgacagacattgtttgaaaatgtccaaagtggctgaaagtttaattgcctacacggaacaatatgtggaatatgaccctttgataacaccagctgagccatccaacccttggatcagcgatgacgttgctttgtgggacatagagatgagcaaagagcccagccaacagcgagtaaaaagatggggcttctctttcgatgagatattgaaggaccaggtggggcgggaccagtttctacgattcctggagtccgaattcagttcagaaaacctcaggttctggctggctgtccaagatcttaagaaacaacccctacaggatgtggccaagagggtagaagaaatctggcaagagtttctggctccaggggctccaagtgcaatcaacctggattctcacagctatgagataaccagtcaaaatgtcaaagatggagggagatatacatttgaagacgcccaggagcacatctacaagctgatgaagagtgacagctatgcccgcttcctccggtcaaatgcttaccaggatttgctgctggccaagaagaagccagaaagtgagcaaggtcgtagaacttccctagaaaagttcactcgcagtgtgctttggttgttgtttcctttgggaaagcggccg

SEQ ID NO: 81448 - DNA, 1110 bp, Artificial Sequence
  derived and/or modified sequence
aaaacactgactatgaaggaggaagacattgaagaaggaaagccatctatctctgtaagaggacaatgcaaaataaagcaaggctggaactggcagattatgaagcagaaaacttagcaagactccagagggcctttgcgaggaagtgggaattcatctttatgcaagcagaagcacaagtaaagattgaccggaaaaaagacaagacagaaaggaaaattttggatagtcaagaacgagccttttgggatgtccacaggcctgtgccaggctgtgtgaacacaacagaaatggatatccgaaaatgtcgacgtttgaagaatccacaaaaggttaaaaagtccgtgtatggcgtgactgaagagtcccaggcacagagcccggtgcatgtactcagccaaccaatcaggaaaacaacaaaagaggacatccggaaacagataacatttttgaacgcacagatcgacagacattgtttgaaaatgtccaaagtggctgaaagtttaattgcctacacggaacaatatgtggaatatgaccctttgataacaccagctgagccatccaacccttggatcagcgatgacgttgctttgtgggacatagagatgagcaaagagcccagccaacagcgagtaaaaagatggggcttctctttcgatgagatattgaaggaccaggtggggcgggaccagtttctacgattcctggagtccgaattcagttcagaaaacctcaggttctggctggctgtccaagatcttaagaaacaacccctacaggatgtggccaagagggtagaagaaatctggcaagagtttctggctccaggggctccaagtgcaatcaacctggattctcacagctatgagataaccagtcaaaatgtcaaagatggagggagatatacatttgaagacgcccaggagcacatctacaagctgatgaagagtgacagctatgcccgcttcctccggtcaaatgcttaccaggatttgctgctggccaagaagaagccagaaagtgagcaaggtcgtagaacttccctagaaaagttcactcgcagtgtgttgtattccaacactccactcgctaagaggccctgatccc

SEQ ID NO: 81449 - DNA, 1434 bp, Artificial Sequence
  derived and/or modified sequence
atggcccagggcagcggcgaccagagagccgtgggcgtggccgaccccgaggagagcagccccaacatgatcgtgtactgcaagatcgaggacatcatcaccaagatgcaggacgacaagaccggcggcgtgcccatcagaaccgtgaagagcttcctgagcaagatccccagcgtggtgaccggcaccgacatcgtgcagtggctgatgaagaacctgagcatcgaggaccccgtggaggccatccacctgggcagcctgatcgccgcccagggctacatcttccccatcagcgaccacgtgctgaccatgaaggacgacggcaccttctacagattccaggccccctacttctggcccagcaactgctgggagcccgagaacaccgactacgccatctacctgtgcaagagaaccatgcagaacaaggccagactggagctggccgactacgaggccgagaacctggccagactgcagagagccttcgccagaaagtgggagttcatcttcatgcaggccgaggcccaggtgaagatcgacagaaagaaggacaagaccgagagaaagatcctggacagccaggagagagccttctgggacgtgcacagacccgtgcccggctgcgtgaacaccaccgagatggacatcagaaagtgcagaagactgaagaacccccagaaggtgaagaagagcgtgtacggcgtgaccgaggagagccaggcccagagccccgtgcacgtgctgagccagcccatcagaaagaccaccaaggaggacatcagaaagcagatcaccttcctgaacgcccagatcgacagacactgcctgaagatgagcaaggtggccgagagcctgatcgcctacaccgagcagtacgtggagtacgaccccctgatcacccccgccgagcccagcaacccctggatcagcgacgacgtggccctgtgggacatcgagatgagcaaggagcccagccagcagagagtgaagagatggggcttcagcttcgacgagatcctgaaggaccaggtgggcagagaccagttcctgagattcctggagagcgagttcagcagcgagaacctgagattctggctggccgtgcaggacctgaagaagcagcccctgcaggacgtggccaagagagtggaggagatctggcaggagttcctggcccccggcgcccccagcgccatcaacctggacagccacagctacgagatcaccagccagaacgtgaaggacggcggcagatacaccttcgaggacgcccaggagcacatctacaagctgatgaagagcgacagctacgccagattcctgagaagcaacgcctaccaggacctgctgctggccaagaagaagcccgagagcgagcagggcagaagaaccagcctggagaagttcaccagaagcgtgctgctgttctag

SEQ ID NO: 81450 - DNA, 1041 bp, Artificial Sequence
  derived and/or modified sequence
atgcagaacaaggccagactggagctggccgactacgaggccgagaacctggccagactgcagagagccttcgccagaaagtgggagttcatcttcatgcaggccgaggcccaggtgaagatcgacagaaagaaggacaagaccgagagaaagatcctggacagccaggagagagccttctgggacgtgcacagacccgtgcccggctgcgtgaacaccaccgagatggacatcagaaagtgcagaagactgaagaacccccagaaggtgaagaagagcgtgtacggcgtgaccgaggagagccaggcccagagccccgtgcacgtgctgagccagcccatcagaaagaccaccaaggaggacatcagaaagcagatcaccttcctgaacgcccagatcgacagacactgcctgaagatgagcaaggtggccgagagcctgatcgcctacaccgagcagtacgtggagtacgaccccctgatcacccccgccgagcccagcaacccctggatcagcgacgacgtggccctgtgggacatcgagatgagcaaggagcccagccagcagagagtgaagagatggggcttcagcttcgacgagatcctgaaggaccaggtgggcagagaccagttcctgagattcctggagagcgagttcagcagcgagaacctgagattctggctggccgtgcaggacctgaagaagcagcccctgcaggacgtggccaagagagtggaggagatctggcaggagttcctggcccccggcgcccccagcgccatcaacctggacagccacagctacgagatcaccagccagaacgtgaaggacggcggcagatacaccttcgaggacgcccaggagcacatctacaagctgatgaagagcgacagctacgccagattcctgagaagcaacgcctaccaggacctgctgctggccaagaagaagcccgagagcgagcagggcagaagaaccagcctggagaagttcaccagaagcgtgctgtggctgctgttccccctgggcaagagaccctag

SEQ ID NO: 81451 - DNA, 1041 bp, Artificial Sequence
  derived and/or modified sequence
atgcagaacaaggccagactggagctggccgactacgaggccgagaacctggccagactgcagagagccttcgccagaaagtgggagttcatcttcatgcaggccgaggcccaggtgaagatcgacagaaagaaggacaagaccgagagaaagatcctggacagccaggagagagccttctgggacgtgcacagacccgtgcccggctgcgtgaacaccaccgagatggacatcagaaagtgcagaagactgaagaacccccagaaggtgaagaagagcgtgtacggcgtgaccgaggagagccaggcccagagccccgtgcacgtgctgagccagcccatcagaaagaccaccaaggaggacatcagaaagcagatcaccttcctgaacgcccagatcgacagacactgcctgaagatgagcaaggtggccgagagcctgatcgcctacaccgagcagtacgtggagtacgaccccctgatcacccccgccgagcccagcaacccctggatcagcgacgacgtggccctgtgggacatcgagatgagcaaggagcccagccagcagagagtgaagagatggggcttcagcttcgacgagatcctgaaggaccaggtgggcagagaccagttcctgagattcctggagagcgagttcagcagcgagaacctgagattctggctggccgtgcaggacctgaagaagcagcccctgcaggacgtggccaagagagtggaggagatctggcaggagttcctggcccccggcgcccccagcgccatcaacctggacagccacagctacgagatcaccagccagaacgtgaaggacggcggcagatacaccttcgaggacgcccaggagcacatctacaagctgatgaagagcgacagctacgccagattcctgagaagcaacgcctaccaggacctgctgctggccaagaagaagcccgagagcgagcagggcagaagaaccagcctggagaagttcaccagaagcgtgctgtacagcaacacccccctggccaagagaccctag

SEQ ID NO: 81452 - protein, 453 aa, Artificial Sequence
  derived and/or modified sequence
MAQGSGDQRAVGVADPEESSPNMIVYCKIEDIITKMQDDKTGGVPIRTVKSFLSKIPSVVTGTDIVQWLMKNLSIEDPVEAIHLGSLIAAQGYIFPISDHVLTMKDDGTFYRFQAPYFWPSNCWEPENTDYAIYLCKRTMQNKARLELADYEAENLARLQRAFARKWEFIFMQAEAQVKIDRKKDKTERKILDSQERAFWDVHRPVPGCVNTTEMDIRKCRRLKNPQKVKKSVYGVTEESQAQSPVHVLSQPIRKTTKEDIRKQITFLNAQIDRHCLKMSKVAESKEPSQQRVKRWGFSFDEILKDQVGRDQFLRFLESEFSSENLRFWLAVQDLKKQPLQDVAKRVEEIWQEFLAPGAPSAINLDSHSYEITSQNVKDGGRYTFEDAQEHIYKLMKSDSYARFLRSNAYQDLLLAKKKPESEQGRRTSLEKFTRSVGKSLAGKRLTGLMQSS

SEQ ID NO: 81453 - DNA, 1362 bp, Artificial Sequence
  derived and/or modified sequence
atggctcaggggagtggagaccagagagctgtgggcgtggcggatccagaagaaagctccccaaatatgattgtctactgcaagatcgaggatataattactaagatgcaagacgataaaacggggggcgtgccaattagaaccgtaaaatccttcttgtcaaaaattccttctgtggttaccggtaccgatatcgtgcaatggctcatgaaaaacctttctatcgaagaccccgttgaagccattcatctcggctctcttattgcggcccaaggatatatttttcctataagcgaccacgttctgaccatgaaggacgacgggaccttttatcgcttccaggctccgtacttctggccatctaactgttgggagccagaaaatacagattatgctatctacttgtgtaagcgaactatgcagaacaaagcccggctggaactcgctgactacgaggccgagaatctcgcaagactacaacgagccttcgcccgtaaatgggagttcatatttatgcaggccgaggcccaggtcaagatcgaccggaaaaaggataaaacagagcggaaaattttggacagccaggaacgtgcattttgggatgtccatagacctgtgcccggatgcgtaaatacaactgagatggacatcaggaaatgtcgcagactgaaaaatccacaaaaggtgaagaaatccgtgtacggagttacagaagagagccaggctcagtcccccgtgcatgttttgagtcagccaatccggaaaactaccaaagaggacatcaggaaacagattacatttttaaacgcccagatcgaccgacattgcctgaagatgtcaaaagtcgccgagagcaaagaaccctctcagcagcgggttaagcgctggggattcagctttgatgagatcctcaaagatcaggtcggacgggaccagtttctacgattcctcgaaagcgaattctcctcagaaaacctccggttctggcttgccgttcaggatctgaagaagcagcccctgcaggacgtggccaaaagggtggaggaaatatggcaggagtttctcgcacccggggccccatccgccattaacttggatagtcactcctacgaaataaccagccagaatgtcaaagatgggggccgctacacgttcgaagacgctcaggagcatatctataagttgatgaagtccgacagttacgcaagatttctgagatctaacgcctaccaggatctgctgcttgccaagaaaaagcccgaatcggagcagggtaggcgaacaagcctggaaaaattcacacgaagcgtgggtaagtcacttgcaggaaagcgtctgacaggtttgatgcagagtagctag

SEQ ID NO: 81454 - DNA, 1362 bp, Artificial Sequence
  derived and/or modified sequence
atggcccagggcagcggggaccagagagctgtgggcgtggccgaccctgaggagagcagccccaacatgattgtgtactgcaagattgaggacatcatcaccaagatgcaggatgacaagacaggaggagtgcccatcagaacagtgaagagcttcctgagcaagatccccagcgtggtgactggaacagacatcgtgcagtggctgatgaagaacctgagcattgaggaccctgtggaggccatccacctgggcagcctgattgctgcccagggctacatcttccccatcagtgaccacgtgctgaccatgaaggatgatggcaccttctaccgcttccaggccccctacttctggcccagcaactgctgggagccagaaaatacagattatgccatctacctgtgcaagaggaccatgcagaacaaggcccggctggagctggccgactatgaagctgagaacctggcccggctgcagagggcctttgccaggaagtgggagttcatcttcatgcaggccgaggcccaggtgaagattgacaggaagaaggacaagacagagaggaagatcctggacagccaggagcgggccttctgggatgtgcacaggcctgtgcccggctgtgtgaacaccacagagatggacatcagaaaatgtagaaggctgaagaacccccagaaggtgaagaagtctgtgtatggagtgacagaggagagccaggcccagagccctgtgcacgtgctgagccagcccatcaggaagaccaccaaggaggacatcaggaagcagatcaccttcctgaatgcccagattgacagacactgcctgaagatgagcaaggtggccgagagcaaggagcccagccagcagagggtgaagcgctggggcttctcctttgatgagatcctgaaggaccaggtgggccgggaccagttcctgcgcttcctggagagcgagttcagcagcgagaacctgcgcttctggctggccgtgcaggacctgaagaagcagcccctgcaggatgtggccaagagggtggaggagatctggcaggagttcctggcccctggggcccccagcgccatcaacctggacagccacagctatgagatcaccagccagaatgtgaaggatggcggccgctacacctttgaagatgcccaggagcacatctacaagctgatgaagagtgacagctatgcccgcttcctgcggagcaatgcctaccaggacctgctgctggccaagaagaagccagagagcgagcagggccgccgcaccagcctggagaagttcaccaggtctgtgggcaagagcctggccggcaagaggctgaccggcctgatgcagagcagctag

SEQ ID NO: 81455 - DNA, 1362 bp, Artificial Sequence
  derived and/or modified sequence
atggcccagggcagcggcgaccagcgggccgtgggcgtggccgaccctgaggagtcaagtccaaacatgatcgtgtactgtaaaattgaagatatcatcactaaaatgcaggatgacaagacgggaggcgtaccaattcgtactgtaaaatcattcttaagcaagatcccttcagtagtaactggtacagatattgtgcaatggctgatgaagaacctttccatcgaagatccagtagaggcaatacacctgggtagcctcatcgcagcacagggatatatattcccaatttcagaccacgtcctgacaatgaaagatgacgggacattttatcgctttcaggccccttatttttggccttctaactgttgggaacccgagaacaccgactacgccatctacttgtgtaagcgtaccatgcaaaataaggcaaggttagagctagcggattacgaagccgaaaatcttgccagactgcagcgggcattcgctcgaaagtgggagttcatattcatgcaggccgaagcgcaggtcaaaatcgacagaaagaaggacaaaacagaaaggaaaattctggactcccaggaacgggcattttgggatgtacatcggccggtccctgggtgcgtaaataccaccgaaatggacattagaaaatgcaggcgactcaagaaccctcagaaagtgaagaaatcagtctacggagtgactgaggaaagccaggcccagagccctgtccatgtgctatcacagccaattagaaagaccacgaaagaggatatccgcaagcagattaccttcctgaatgctcagatcgacagacactgcctgaaaatgtcaaaggttgctgaatctaaagagccttcacagcaacgagtcaaaaggtggggatttagtttcgatgaaatactcaaggatcaggtcgggagggaccaatttcttagatttttggagagtgaattttcctcagaaaacctcaggttctggttggccgttcaggatctcaagaaacagccactgcaggacgtcgccaaacgggtggaagagatctggcaggagtttcttgcccccggggcacccagtgcaattaaccttgactctcactcatacgagatcacttcacagaacgtgaaggatggggggagatatacattcgaggatgcccaggagcatatatacaaactgatgaagtctgattcctatgcccgcttccttaggtcgaatgcttaccaggatctactgttagctaaaaagaaaccagagtcagaacaaggaaggcgcacaagtttggaaaagtttacacgcagcgtggggaaaagcttggccggaaaaaggttgaccggcctgatgcagtcaagctag

SEQ ID NO: 81456 - DNA, 1362 bp, Artificial Sequence
  derived and/or modified sequence
atggcccagggtagcggggaccagagggcagtgggggtagcagaccctgaggagagctcccccaatatgattgtttattgcaagattgaggacattataaccaagatgcaggacgacaagacaggcggagtacccatcagaacagtcaagagctttcttagtaaaatcccaagcgtggttaccggtacagacatcgtacaatggctcatgaagaacctctcaatcgaggatccagttgaggctattcatctcgggtccctcattgcggctcagggatacatctttccgattagcgatcatgttttaactatgaaggatgatgggactttctaccgattccaggcaccctacttttggccaagcaactgctgggaacctgaaaatacggactacgccatttatctttgtaaacgcaccatgcagaataaagccagacttgaactggccgactacgaagccgaaaacttggcaaggttacaaagagcgtttgcccgaaaatgggaatttatattcatgcaggcagaagcccaggttaagattgatcggaagaaggacaagactgagcgcaaaatcctcgatagccaagaacgggctttttgggatgtgcaccggcctgtcccaggttgcgtcaacacgaccgaaatggacattcgcaaatgcagacgactgaagaacccacaaaaggttaagaagagcgtctacggagtaacagaagaatcccaagcgcagtctcccgtgcatgtactttcccaaccaattagaaagactactaaggaggatatccggaagcaaatcacattccttaatgcacaaattgatcggcattgtctgaagatgtcaaaagtggctgagtcaaaggagcccagccagcagcgcgtgaagcgttggggattctcctttgatgagattctgaaggatcaagtgggaagagaccagttcctgcgattcctggaaagcgaatttagctcagagaacctgcggttctggctggctgtgcaggaccttaaaaagcagcccttacaggatgttgccaagcgcgtggaggaaatttggcaggagtttttggctcctggcgctcccagcgcaattaatctagattctcactcttacgagatcaccagccagaatgtgaaagatggaggcaggtacactttcgaggacgcccaggagcatatctacaagctcatgaaatccgattcctacgccagatttctgcgcagtaacgcttatcaggatctgctgctcgcaaaaaagaagcctgagtccgaacagggcaggagaacaagcctggagaaattcacccgctctgtcggcaaatcactagctggaaaacgactcacaggtttgatgcagagttcctag

SEQ ID NO: 81457 - DNA, 1362 bp, Artificial Sequence
  derived and/or modified sequence
atggctcaaggatccggggatcaaagagcagtgggggttgctgacccagaggagagttctccaaacatgatcgtttactgcaaaattgaagacatcattacaaagatgcaagatgacaagacagggggtgtgcccatcagaacagtcaagagctttctctccaaaatccccagtgtcgtcacaggtactgacattgtgcagtggcttatgaagaacctttccattgaggacccagttgaagcaatacacttggggagccttatcgctgcccagggctacatctttccaatctcagaccatgttctcaccatgaaggatgatggcaccttttatcgtttccaggctccgtacttctggccttcgaactgctgggaacctgaaaacactgactatgccatctatctctgtaagaggacaatgcaaaataaagcaaggctggaactggcagattatgaagcagaaaacttagcaagactccagagggcctttgcgaggaagtgggaattcatctttatgcaagcagaagcacaagtaaagattgaccggaaaaaagacaagacagaaaggaaaattttggatagtcaagaacgagccttttgggatgtccacaggcctgtgccaggctgtgtgaacacaacagaaatggatatccgaaaatgtcgacgtttgaagaatccacaaaaggttaaaaagtccgtgtatggcgtgactgaagagtcccaggcacagagcccggtgcatgtactcagccaaccaatcaggaaaacaacaaaagaggacatccggaaacagataacatttttgaacgcacagatcgacagacattgtttgaaaatgtccaaagtggctgaaagcaaagagcccagccaacagcgagtaaaaagatggggcttctctttcgatgagatattgaaggaccaggtggggcgggaccagtttctacgattcctggagtccgaattcagttcagaaaacctcaggttctggctggctgtccaagatcttaagaaacaacccctacaggatgtggccaagagggtagaagaaatctggcaagagtttctggctccaggggctccaagtgcaatcaacctggattctcacagctatgagataaccagtcaaaatgtcaaagatggagggagatatacatttgaagacgcccaggagcacatctacaagctgatgaagagtgacagctatgcccgcttcctccggtcaaatgcttaccaggatttgctgctggccaagaagaagccagaaagtgagcaaggtcgtagaacttccctagaaaagttcactcgcagtgtgggaaagtcgctggcgggcaagcgcctcacgggcctgatgcagtcctcctga

SEQ ID NO: 81458 - DNA, 1362 bp, Artificial Sequence
  derived and/or modified sequence
atggcccagggcagcggcgaccagagagccgtgggcgtggccgaccccgaggagagcagccccaacatgatcgtgtactgcaagatcgaggacatcatcaccaagatgcaggacgacaagaccggcggcgtgcccatcagaaccgtgaagagcttcctgagcaagatccccagcgtggtgaccggcaccgacatcgtgcagtggctgatgaagaacctgagcatcgaggaccccgtggaggccatccacctgggcagcctgatcgccgcccagggctacatcttccccatcagcgaccacgtgctgaccatgaaggacgacggcaccttctacagattccaggccccctacttctggcccagcaactgctgggagcccgagaacaccgactacgccatctacctgtgcaagagaaccatgcagaacaaggccagactggagctggccgactacgaggccgagaacctggccagactgcagagagccttcgccagaaagtgggagttcatcttcatgcaggccgaggcccaggtgaagatcgacagaaagaaggacaagaccgagagaaagatcctggacagccaggagagagccttctgggacgtgcacagacccgtgcccggctgcgtgaacaccaccgagatggacatcagaaagtgcagaagactgaagaacccccagaaggtgaagaagagcgtgtacggcgtgaccgaggagagccaggcccagagccccgtgcacgtgctgagccagcccatcagaaagaccaccaaggaggacatcagaaagcagatcaccttcctgaacgcccagatcgacagacactgcctgaagatgagcaaggtggccgagagcaaggagcccagccagcagagagtgaagagatggggcttcagcttcgacgagatcctgaaggaccaggtgggcagagaccagttcctgagattcctggagagcgagttcagcagcgagaacctgagattctggctggccgtgcaggacctgaagaagcagcccctgcaggacgtggccaagagagtggaggagatctggcaggagttcctggcccccggcgcccccagcgccatcaacctggacagccacagctacgagatcaccagccagaacgtgaaggacggcggcagatacaccttcgaggacgcccaggagcacatctacaagctgatgaagagcgacagctacgccagattcctgagaagcaacgcctaccaggacctgctgctggccaagaagaagcccgagagcgagcagggcagaagaaccagcctggagaagttcaccagaagcgtgggcaagagcctggccggcaagagactgaccggcctgatgcagagcagctag

SEQ ID NO: 81459 - protein, 475 aa, Artificial Sequence
  derived and/or modified sequence
MAQGSGDQRAVGVADPEESSPNMIVYCKIEDIITKMQDDKTGGVPIRTVKSFLSKIPSVVTGTDIVQWLMKNLSIEDPVEAIHLGSLIAAQGYIFPISDHVLTMKDDGTFYRFQAPYFWPSNCWEPENTDYAIYLCKRTMQNKARLELADYEAENLARLQRAFARKWEFIFMQAEAQVKIDRKKDKTERKILDSQERAFWDVHRPVPGCVNTTEMDIRKCRRLKNPQKVKKSVYGVTEESQAQSPVHVLSQPIRKTTKEDIRKQITFLNAQIDRHCLKMSKVAESLIAYTEQYVEYDPLITPAEPSNPWISDDVALWDIEMSKEPSQQRVKRWGFSFDEILKDQVGRDQFLRFLESEFSSENLRFWLAVQDLKKQPLQDVAKRVEEIWQEFLAPGAPSAINLDSHSYEITSQNVKDGGRYTFEDAQEHIYKLMKSDSYARFLRSNAYQDLLLAKKKPESEQGRRTSLEKFTRSVG

SEQ ID NO: 81460 - protein, 490 aa, Artificial Sequence
  derived and/or modified sequence
MAQGSGDQRAVGVADPEESSPNMIVYCKIEDIITKMQDDKTGGVPIRTVKSFLSKIPSVVTGTDIVQWLMKNLSIEDPVEAIHLGSLIAAQGYIFPISDHVLTMKDDGTFYRFQAPYFWPSNCWEPENTDYAIYLCKRTMQNKARLELADYEAENLARLQRAFARKWEFIFMQAEAQVKIDRKKDKTERKILDSQERAFWDVHRPVPGCVNTTEMDIRKCRRLKNPQKVKKSVYGVTEESQAQSPVHVLSQPIRKTTKEDIRKQITFLNAQIDRHCLKMSKVAESLIAYTEQYVEYDPLITPAEPSNPWISDDVALWDIEMSKEPSQQRVKRWGFSFDEILKDQVGRDQFLRFLESEFSSENLRFWLAVQDLKKQPLQDVAKRVEEIWQEFLAPGAPSAINLDSHSYEITSQNVKDGGRYTFEDAQEHIYKLMKSDSYARFLRSNAYQDLLLAKKKPESEQGRRTSLEKFTRSVGKSLAGKRLTGLMQSS

SEQ ID NO: 81461 - protein, 465 aa, Artificial Sequence
  derived and/or modified sequence
MAQGSGDQRAVGVADPEESSPNMIVYCKIEDIITKMQDDKTGGVPIRTVKSFLSKIPSVVTGTDIVQWLMKNLSIEDPVEAIHLGSLIAAQGYIFPISDHVLTMKDDGTFYRFQAPYFWPSNCWEPENTDYAIYLCKRTMQNKARLELADYEAENLARLQRAFARKWEFIFMQAEAQVKIDRKKDKTERKILDSQERAFWDVHRPVPGCVNTTEMDIRKCRRLKNPQKVKKSVYGVTEESQAQSPVHVLSQPIRKTTKEDIRKQITFLNAQIDRHCLKMSKVAESLIAYTEQYVEYDPLITPAEPSNPWISDDVALWDIEMSKEPSQQRVKRWGFSFDEILKDQVGRDQFLRFLESEFSSENLRFWLAVQDLKKQPLQDVAKRVEEIWQEFLAPGAPSAINLDSHSYEITSQNVKDGGRYTFEDAQEHIYKLMKSDSYARFLRSNAYQDLLLAKKKKVSKVVELP

SEQ ID NO: 81462 - DNA, 1473 bp, Artificial Sequence
  derived and/or modified sequence
atggcgcagggttccggtgatcagagagctgtaggcgtcgccgatcctgaggagagcagtccaaacatgatcgtctattgtaaaatcgaagatattatcactaagatgcaggatgacaagactgggggagtaccaatcagaaccgttaaatcatttctgtccaaaattccatcggtagtgacaggcacagatatcgtgcagtggcttatgaagaacctgagcattgaagatccagtggaagccatccatttaggctctctcattgccgcccaaggatacatatttccaatttccgatcatgtattgaccatgaaagacgacggcaccttttaccggttccaagctccttatttttggcctagcaactgctgggagcctgaaaacacggactacgcaatttacctctgcaagcggactatgcagaataaggcaaggctggaactggccgactacgaggcggaaaatctggcacgcctccagcgtgcgtttgcccgaaaatgggagtttattttcatgcaggccgaggcacaggtaaaaatcgaccgcaaaaaggacaagactgagcgtaagatcctagatagccaggagcgggctttctgggacgtccaccgcccagtccctggttgtgtaaacaccactgagatggacatccgcaagtgtcgaaggctgaagaaccctcaaaaagttaagaagtctgtatatggggtcaccgaggaaagccaagctcagtctccagtccatgtccttagccaacctatcagaaagactactaaggaggatatacggaaacagattacatttctgaacgctcagattgaccgtcattgtctgaagatgagcaaggtggccgaatcgctgattgcgtacactgagcagtacgttgagtacgaccctctcatcacacccgccgagccatccaacccatggatctctgacgacgttgcactgtgggacattgaaatgtccaaggaaccatctcagcagagggttaagcgatgggggttcagcttcgatgaaattttaaaggaccaggtgggaagggatcagttccttcgattcctggaaagcgaattcagctccgaaaatctgaggttctggcttgccgtgcaggacctgaaaaagcagccactgcaggatgtggcgaagcgtgtcgaagagatctggcaggagttcctcgcccctggggccccgtccgctatcaacctcgattcgcatagctacgaaatcaccagccaaaacgtcaaggacggcggtcgctatacctttgaggacgcccaagaacacatctacaaattgatgaaatcagactcttacgcccggttcctcagatctaacgcctatcaggacctgctgctggctaaaaaaaagcctgagtcggagcagggaagacgtacgtcattggaaaaattcacaaggtcggttggaaaatctcttgcagggaagcggctaactggcttaatgcagtcgagctag

SEQ ID NO: 81463 - DNA, 1473 bp, Artificial Sequence
  derived and/or modified sequence
atggcccagggctcgggagaccagcgcgccgtcggagtggctgatccagaagagagtagccctaacatgatcgtttattgtaagatcgaggacatcattacaaagatgcaggatgacaagaccgggggtgtgcccattcgcaccgtgaagtcttttcttagcaaaataccctcggtggtgactggaacggacatcgtacagtggctgatgaagaacttatctatcgaggaccctgtggaagccatacatctgggctccttgatagcagcacagggatacatcttcccaatctcagatcatgtgctcaccatgaaagacgacggcaccttttatcggttccaggccccttacttttggcccagcaactgttgggagccagagaatactgattatgccatttacttgtgcaaacgcacaatgcaaaacaaggctcgcctggagctggccgactatgaggctgagaatctggcccgcctgcaaagagcctttgcccgtaagtgggaattcattttcatgcaggcagaggcgcaagtcaagattgaccgaaagaaagacaagaccgaaagaaagatcctggatagccaagagagggccttctgggacgtgcacaggcccgtccctgggtgtgtgaacactactgagatggacatccggaaatgcaggcgactcaagaacccccagaaggtgaagaagtctgtttatggcgtgacagaagagtcccaggcacagagtcctgtgcacgtgttgtcacagcccattcgcaagacaaccaaagaagacattaggaagcagatcacatttctgaacgcccagattgacaggcactgtcttaaaatgtcgaaagttgcagagtcgctcattgcctatactgagcagtatgtcgaatatgatcctctcatcacacctgctgaaccctctaacccttggatttctgatgatgtggctctttgggacattgaaatgtcaaaggagcctagccagcagcgagtaaaaaggtggggcttctcctttgacgagatcctcaaagaccaggtgggcagggatcagttcctccggttcctcgagtcggaattctcctcggagaacctgcgcttctggctggcggtacaggatctgaaaaagcagcccctgcaggatgttgccaagcgcgtggaagagatctggcaagagttcctcgcaccaggtgccccatccgctattaatctcgactctcactcctatgaaatcacaagccagaacgtgaaagacgggggccgctatacttttgaggatgcacaggagcacatttacaagctcatgaagtccgattcgtacgcgagattcttgcgctctaacgcttaccaggacctgttgctcgcgaagaagaaacctgaatcagaacagggaaggagaactagcctcgagaagttcacgcgatccgtgggtaaatcactcgccggaaaacgtctgaccggattgatgcagtctagttag

SEQ ID NO: 81464 - DNA, 1473 bp, Artificial Sequence
  derived and/or modified sequence
atggcccagggcagcggggaccagagagctgtgggcgtggccgaccctgaggagagcagccccaacatgattgtgtactgcaagattgaggacatcatcaccaagatgcaggatgacaagacaggaggagtgcccatcagaacagtgaagagcttcctgagcaagatccccagcgtggtgactggaacagacatcgtgcagtggctgatgaagaacctgagcattgaggaccctgtggaggccatccacctgggcagcctgattgctgcccagggctacatcttccccatcagtgaccacgtgctgaccatgaaggatgatggcaccttctaccgcttccaggccccctacttctggcccagcaactgctgggagccagaaaatacagattatgccatctacctgtgcaagaggaccatgcagaacaaggcccggctggagctggccgactatgaagctgagaacctggcccggctgcagagggcctttgccaggaagtgggagttcatcttcatgcaggccgaggcccaggtgaagattgacaggaagaaggacaagacagagaggaagatcctggacagccaggagcgggccttctgggatgtgcacaggcctgtgcccggctgtgtgaacaccacagagatggacatcagaaaatgtagaaggctgaagaacccccagaaggtgaagaagtctgtgtatggagtgacagaggagagccaggcccagagccctgtgcacgtgctgagccagcccatcaggaagaccaccaaggaggacatcaggaagcagatcaccttcctgaatgcccagattgacagacactgcctgaagatgagcaaggtggccgagagcctgattgcctacacagagcagtatgtggagtatgaccccctcatcaccccagctgagcccagcaacccctggatcagtgatgatgtggccctgtgggacatcgagatgagcaaggagcccagccagcagagggtgaagcgctggggcttctcctttgatgagatcctgaaggaccaggtgggccgggaccagttcctgcgcttcctggagagcgagttcagcagcgagaacctgcgcttctggctggccgtgcaggacctgaagaagcagcccctgcaggatgtggccaagagggtggaggagatctggcaggagttcctggcccctggggcccccagcgccatcaacctggacagccacagctatgagatcaccagccagaatgtgaaggatggcggccgctacacctttgaagatgcccaggagcacatctacaagctgatgaagagtgacagctatgcccgcttcctgcggagcaatgcctaccaggacctgctgctggccaagaagaagccagagagcgagcagggccgccgcaccagcctggagaagttcaccaggtctgtgggcaagagcctggccggcaagaggctgaccggcctgatgcagagcagctag

SEQ ID NO: 81465 - DNA, 1473 bp, Artificial Sequence
  derived and/or modified sequence
atggcccagggcagcggcgaccagcgggccgtgggcgtggccgaccccgaggaatctagcccgaacatgatagtgtattgcaagatcgaggacataatcaccaagatgcaggacgataaaaccggaggtgtgccgattcgcacagtaaagtcctttctaagcaagataccaagcgtggtgacaggcacagacattgtccaatggctgatgaaaaatctgtccattgaagaccccgtggaggcgatccatctggggagcctcatcgccgcccaggggtacattttccccatttccgaccacgtgcttacaatgaaggatgacggtactttctaccgctttcaggccccatacttctggccatctaattgttgggaaccggagaataccgactatgctatctatctgtgtaagaggacaatgcagaataaggcacggctcgagctggctgactacgaggctgagaatctggcccgtctccagagggcctttgcaagaaaatgggagttcatcttcatgcaggccgaggcccaggtcaagattgatcggaagaaggacaaaacagagcggaagattctcgatagtcaggagcgggccttttgggatgtgcatagaccggtccctggctgtgttaatacaaccgagatggacattcgtaagtgccgtagactgaagaatccccagaaagtgaagaaaagtgtgtatggggtgactgaggagagtcaggcgcagtcaccagtgcatgtcctttcccaaccaattcgcaaaacgactaaggaagatatacgcaagcagattactttcctgaacgctcagatcgacagacattgcctcaagatgagtaaggtggcggaaagtctgatcgcttacaccgagcagtatgtcgagtacgatccgcttatcaccccggccgagccatcaaacccctggatttccgacgatgtagctttatgggacatcgagatgtctaaagaaccgtcccagcagcgagttaagagatggggattctcgtttgacgaaatcttgaaggatcaggtggggcgggatcagtttctccgattcctggaaagcgagtttagttctgaaaatctgaggttctggctcgctgtgcaagacttgaagaagcagccactgcaggatgtcgcaaaaagagttgaggagatatggcaggagtttctggcgccgggcgccccgtcagccatcaatctggacagtcattcttatgaaataacctcacagaacgtaaaagatggggggcgctatacttttgaagacgcccaggaacacatatataaacttatgaagtcagacagctacgctcggtttctgagatctaacgcctaccaagacctgctgctagccaaaaaaaagccggaatctgagcagggaagacgcacgagccttgaaaagtttacacggagtgtgggaaaatctctggcgggcaaacggctgacaggactcatgcagagctcatag

SEQ ID NO: 81466 - DNA, 1473 bp, Artificial Sequence
  derived and/or modified sequence
atggcccagggcagcggcgaccagcgggccgtgggcgtggccgaccccgaggagtcttctcccaatatgattgtttactgcaagatcgaggacatcattactaagatgcaagacgacaagacggggggagtccctattcgtactgtgaagtcttttctgtccaagattccatcggtcgtcacggggacggacatcgtccagtggctgatgaagaatttgagcatcgaagaccccgtggaggccatccacctgggctccctgatcgccgcccaggggtatatatttccgatctccgatcatgttcttacaatgaaggacgatggaacattttaccggttccaagctccttacttctggcctagcaattgttgggagccagagaacaccgactatgcaatctacctgtgtaaaaggactatgcagaacaaggcacgactggagctagctgattatgaggccgaaaacttagcccggttacagagggctttcgcgaggaagtgggagttcatttttatgcaggccgaggcccaggtaaagatcgatagaaaaaaggataagactgaacggaagatcctggattcacaggaacgggcattttgggatgtgcacaggccagtgccagggtgcgtcaataccactgagatggacatccggaagtgcaggaggctaaaaaacccacagaaagttaagaaaagcgtgtatggagtcacagaagaaagccaagcccagtccccggtgcacgtgctctcccaaccaatcaggaagacaacaaaggaagacatcagaaagcagattacgttccttaatgctcagatagatagacattgtttgaaaatgagtaaggtagctgaaagtctgatcgcatacacagagcagtacgttgaatatgacccactgatcacccccgccgaaccgtctaatccttggatctcggacgacgttgcgctctgggacattgagatgtctaaggagccaagccagcagagagtgaagagatggggattctctttcgatgaaatcctcaaggaccaagttggacgtgatcagtttctgaggttcctggaaagcgaattcagcagtgagaatctcaggttctggctggccgttcaagacctgaagaaacaaccactgcaggacgttgccaagcgtgtggaagagatctggcaagagttcttggcccccggcgccccgtctgccatcaaccttgatagccatagctacgagattacctctcaaaatgtgaaagacggagggcggtacacattcgaagatgcccaagagcatatctataaactcatgaagtccgacagttatgcgcggttcctgaggtccaacgcgtaccaggatctcctgctagccaagaaaaaaccagagtcagaacagggccgacgcacttcattggagaagttcactcgcagcgttggaaaatcactcgccggaaaaaggcttactggcctcatgcagtcttcgtag

SEQ ID NO: 81467 - DNA, 1473 bp, Artificial Sequence
  derived and/or modified sequence
atggctcagggctccggtgaccagcgtgcagttggcgtagcagatccggaagagtcttccccaaacatgatagtgtattgcaagattgaggacatcattacaaaaatgcaggatgataagacgggtggcgtgccaatccgaactgttaagtcttttctgagcaagatcccctccgtcgttaccggcacagacatcgttcagtggttaatgaagaatctgtctattgaagaccccgtggaggcgatccatctgggctcactgatagcagcccagggttacattttcccaatctccgatcacgtactgacaatgaaggatgacggaacattttacagattccaagctccatacttctggccgagtaattgttgggaaccggaaaataccgactatgctatctatctgtgcaagcggacaatgcagaacaaggccagactagaactggctgattacgaggccgagaacctcgcaaggttgcagagagccttcgctcgcaaatgggaatttattttcatgcaggccgaagcccaggtcaagattgaccgcaagaaagacaaaacagagagaaagatcttagattctcaggagcgtgctttctgggacgtgcacagaccggtcccgggatgtgtcaacacaaccgaaatggatatcaggaaatgccgcagactgaaaaaccctcagaaagtcaaaaagtccgtctacggcgttactgaggaaagccaagcccagtcacccgtgcatgttctcagtcagccaataaggaagactacaaaagaagatattcgtaagcagatcaccttcctgaatgcgcagatcgataggcactgcctgaagatgtctaaagttgccgagtcactcatagcatacactgagcagtacgtggaatacgatcctctcattacacctgccgagcccagcaatccctggatctctgatgatgtggccttatgggacatagagatgagcaaggaaccatctcagcagagggttaagaggtgggggttttcatttgatgaaatcctcaaggatcaggtcggccgagatcaatttctccggttcctagagagcgaatttagtagtgagaaccttcgcttttggctagctgtccaagatctgaagaaacagccactgcaagacgtggcaaaacgggtggaagaaatttggcaagagtttctggctccgggtgccccatccgctattaacctagactcacactcgtatgagataacaagtcagaatgtgaaggatggaggcagatacacatttgaagacgctcaggagcatatctacaagttgatgaaatccgactcatatgccaggtttctgcgatccaatgcttaccaggatctgctcctcgccaaaaagaagcctgagagtgaacaaggacgtaggacaagcttggaaaagttcaccaggagtgtcggtaaatccctggctgggaaaagactcacaggcctcatgcaaagctcttag

SEQ ID NO: 81468 - DNA, 1473 bp, Artificial Sequence
  derived and/or modified sequence
atggcccaaggaagtggcgaccagcgagcagttggcgtcgccgatcccgaagagagtagcccaaatatgatcgtctactgtaaaattgaggatattataacaaagatgcaggatgataagacaggtggagtgcccatcagaactgtcaagagtttcctatctaagattcctagcgtggtaactggaacggacattgtccagtggctcatgaagaacctctcaatcgaggacccggtggaggcgatacacctgggctcactcattgcagctcaggggtacattttccccatctccgaccacgtattgacaatgaaggacgatggaactttctatcggtttcaagccccatatttctggccgtccaactgctgggagcctgaaaatacagactatgctatatacctgtgcaaacgaaccatgcagaacaaggctagactggagttagctgactatgaagccgagaatctcgcaagactgcagcgggcattcgccagaaaatgggaattcatattcatgcaggctgaagcgcaggtgaaaatcgacaggaagaaagacaaaacagaacggaaaattctggactcacaggaacgggctttctgggacgtgcatagaccagtgcctggttgtgtgaacactaccgagatggacatcaggaaatgccgtagactgaagaaccctcaaaaagtgaaaaagtccgtttatggcgtcacagaggaatctcaggctcagagcccagttcacgtcctgagtcagcccatacgtaaaacaactaaagaagatatccgaaaacagatcactttccttaatgctcagattgacaggcactgcctaaagatgagtaaggtggcagagagtctgattgcgtatacagaacaatacgttgagtacgaccccctgatcacacctgcagagccatctaacccatggatctctgacgatgttgcactgtgggatatagaaatgagtaaggagccatcccagcaaagggtcaagaggtggggattctcttttgacgagatactcaaggaccaagtcggccgagaccaattccttcgcttcctagagtctgaattttccagtgaaaacttgcgcttttggcttgcagtgcaagaccttaaaaagcagcctctccaagacgttgcgaagagagtagaagagatatggcaggaattcctggccccaggcgctccaagtgcaattaacttggatagccactcttacgagatcacaagtcagaacgttaaggatgggggacggtatacattcgaggacgcacaggagcacatctataagctcatgaaaagtgactcgtatgctcgtttcctcagatccaacgcctaccaggatttactgttagcaaaaaagaaaccagagtcagaacagggacgcagaacaagcctagagaagtttacacgttccgtcggtaagagcctggccggtaagcgcctgacggggctcatgcagtcctcgtag

SEQ ID NO: 81469 - DNA, 2005 bp, Artificial Sequence
  derived and/or modified sequence
gcgagttggggcagctcctcgcgctcggccctgctcggcggcgagagctccgcctgggcgccgcgttcctacagccgccggagccgccaggcgccgagggaacggacagacctccgcgcacccttgccgaccggggcgggcagaggcgggcaagcggcgaacgcctgggagcgcggagagccaggccagcccggagcgcgccggggacaccctgtgcgccccgagtcccggcaccatgcgacccgccgcgcgtcctcgcgggcccggggcttcgctcttcgctcgctgagcccctgcgctcgccaccacggaaactcggaaagaggaggcgaggctgtggggagcggcgcggagacggactagacttcccctccgcccccaagaggctgccggtccccggttccctgggcttctccagctttatcatgaacctggcgcaaggttggctttaggaaaaattctggagccagagggagagtcaaggcaattctttggttgctaagtgtgagtgaagacactcaggatggctcaaggatccggggatcaaagagcagtgggggttgctgacccagaggagagttctccaaacatgatcgtttactgcaaaattgaagacatcattacaaagatgcaagatgacaagacagggggtgtgcccatcagaacagtcaagagctttctctccaaaatccccagtgtcgtcacaggtactgacattgtgcagtggcttatgaagaacctttccattgaggacccagttgaagcaatacacttggggagccttatcgctgcccagggctacatctttccaatctcagaccatgttctcaccatgaaggatgatggcaccttttatcgtttccaggctccgtacttctggccttcgaactgctgggaacctgaaaacactgactatgccatctatctctgtaagaggacaatgcaaaataaagcaaggctggaactggcagattatgaagcagaaaacttagcaagactccagagggcctttgcgaggaagtgggaattcatctttatgcaagcagaagcacaagtaaagattgaccggaaaaaagacaagacagaaaggaaaattttggatagtcaagaacgagccttttgggatgtccacaggcctgtgccaggctgtgtgaacacaacagaaatggatatccgaaaatgtcgacgtttgaagaatccacaaaaggttaaaaagtccgtgtatggcgtgactgaagagtcccaggcacagagcccggtgcatgtactcagccaaccaatcaggaaaacaacaaaagaggacatccggaaacagataacatttttgaacgcacagatcgacagacattgtttgaaaatgtccaaagtggctgaaagtttaattgcctacacggaacaatatgtggaatatgaccctttgataacaccagctgagccatccaacccttggatcagcgatgacgttgctttgtgggacatagagatgagcaaagagcccagccaacagcgagtaaaaagatggggcttctctttcgatgagatattgaaggaccaggtggggcgggaccagtttctacgattcctggagtccgaattcagttcagaaaacctcaggttctggctggctgtccaagatcttaagaaacaacccctacaggatgtggccaagagggtagaagaaatctggcaagagtttctggctccaggggctccaagtgcaatcaacctggattctcacagctatgagataaccagtcaaaatgtcaaagatggagggagatatacatttgaagacgcccaggagcacatctacaagctgatgaagagtgacagctatgcccgcttcctccggtcaaatgcttaccaggatttgctgctggccaagaagaagccagaaagtgagcaaggtcgtagaacttccctagaaaagttcactcgcagtgtgggaaagtcgctggcgggcaagcgcctcacgggcctgatgcagtcctcctgaccgttccta

SEQ ID NO: 81470 - DNA, 1689 bp, Artificial Sequence
  derived and/or modified sequence
caccgacggggacgagagcgcagaggatggcgcttttagatacttccagtcttccgatgttgtgatcgcagtgtgagtgaagacactcaggatggctcaaggatccggggatcaaagagcagtgggggttgctgacccagaggagagttctccaaacatgatcgtttactgcaaaattgaagacatcattacaaagatgcaagatgacaagacagggggtgtgcccatcagaacagtcaagagctttctctccaaaatccccagtgtcgtcacaggtactgacattgtgcagtggcttatgaagaacctttccattgaggacccagttgaagcaatacacttggggagccttatcgctgcccagggctacatctttccaatctcagaccatgttctcaccatgaaggatgatggcaccttttatcgtttccaggctccgtacttctggccttcgaactgctgggaacctgaaaacactgactatgccatctatctctgtaagaggacaatgcaaaataaagcaaggctggaactggcagattatgaagcagaaaacttagcaagactccagagggcctttgcgaggaagtgggaattcatctttatgcaagcagaagcacaagtaaagattgaccggaaaaaagacaagacagaaaggaaaattttggatagtcaagaacgagccttttgggatgtccacaggcctgtgccaggctgtgtgaacacaacagaaatggatatccgaaaatgtcgacgtttgaagaatccacaaaaggttaaaaagtccgtgtatggcgtgactgaagagtcccaggcacagagcccggtgcatgtactcagccaaccaatcaggaaaacaacaaaagaggacatccggaaacagataacatttttgaacgcacagatcgacagacattgtttgaaaatgtccaaagtggctgaaagtttaattgcctacacggaacaatatgtggaatatgaccctttgataacaccagctgagccatccaacccttggatcagcgatgacgttgctttgtgggacatagagatgagcaaagagcccagccaacagcgagtaaaaagatggggcttctctttcgatgagatattgaaggaccaggtggggcgggaccagtttctacgattcctggagtccgaattcagttcagaaaacctcaggttctggctggctgtccaagatcttaagaaacaacccctacaggatgtggccaagagggtagaagaaatctggcaagagtttctggctccaggggctccaagtgcaatcaacctggattctcacagctatgagataaccagtcaaaatgtcaaagatggagggagatatacatttgaagacgcccaggagcacatctacaagctgatgaagagtgacagctatgcccgcttcctccggtcaaatgcttaccaggatttgctgctggccaagaagaagccagaaagtgagcaaggtcgtagaacttccctagaaaagttcactcgcagtgtgggaaagtcgctggcgggcaagcgcctcacgggcctgatgcagtcctcctgaccgttcctaccgcaggtccagggcctgggcccgcggaccccacaggcaggcggcggcgctccacatctgcggacagagtttccttacgaggagacttggtcactgtgaaggagaaagagtgaggg

SEQ ID NO: 81471 - DNA, 2111 bp, Artificial Sequence
  derived and/or modified sequence
gttaggcaagctggcgtgtggacttgtgtgggatgggtgcaggtctgcatataaatcatgttcctgggtttctgggtgtgaagcgcacaccgacggggacgagagcgcagaggatggcgcttttagatacttccagtcttccgatgttgtgatcgcagtgtgagtgaagacactcaggatggctcaaggatccggggatcaaagagcagtgggggttgctgacccagaggagagttctccaaacatgatcgtttactgcaaaattgaagacatcattacaaagatgcaagatgacaagacagggggtgtgcccatcagaacagtcaagagctttctctccaaaatccccagtgtcgtcacaggtactgacattgtgcagtggcttatgaagaacctttccattgaggacccagttgaagcaatacacttggggagccttatcgctgcccagggctacatctttccaatctcagaccatgttctcaccatgaaggatgatggcaccttttatcgtttccaggctccgtacttctggccttcgaactgctgggaacctgaaaacactgactatgccatctatctctgtaagaggacaatgcaaaataaagcaaggctggaactggcagattatgaagcagaaaacttagcaagactccagagggcctttgcgaggaagtgggaattcatctttatgcaagcagaagcacaagtaaagattgaccggaaaaaagacaagacagaaaggaaaattttggatagtcaagaacgagccttttgggatgtccacaggcctgtgccaggctgtgtgaacacaacagaaatggatatccgaaaatgtcgacgtttgaagaatccacaaaaggttaaaaagtccgtgtatggcgtgactgaagagtcccaggcacagagcccggtgcatgtactcagccaaccaatcaggaaaacaacaaaagaggacatccggaaacagataacatttttgaacgcacagatcgacagacattgtttgaaaatgtccaaagtggctgaaagtttaattgcctacacggaacaatatgtggaatatgaccctttgataacaccagctgagccatccaacccttggatcagcgatgacgttgctttgtgggacatagagatgagcaaagagcccagccaacagcgagtaaaaagatggggcttctctttcgatgagatattgaaggaccaggtggggcgggaccagtttctacgattcctggagtccgaattcagttcagaaaacctcaggttctggctggctgtccaagatcttaagaaacaacccctacaggatgtggccaagagggtagaagaaatctggcaagagtttctggctccaggggctccaagtgcaatcaacctggattctcacagctatgagataaccagtcaaaatgtcaaagatggagggagatatacatttgaagacgcccaggagcacatctacaagctgatgaagagtgacagctatgcccgcttcctccggtcaaatgcttaccaggatttgctgctggccaagaagaagaaagtgagcaaggtcgtagaacttccctagaaaagttcactcgcagtgtgtgctgctggcgcagagtcagaatggccgctgcatttcacccccgaggtggcttccttccagcagtggggaaagtcgctggcgggcaagcgcctcacgggcctgatgcagtcctcctgaccgttcctaccgcaggtccagggcctgggcccgcggaccccacaggcaggcggcggcgctccacatctgcggacagagtttccttacgaggagacttggtcactgtgaaggagaaagagtgagggcaatgaagggcgatggtggggagactcggtgggtgaatggggagaccagaaagaaagagtccacagagcctgggctgggcccggtggaggctcctgtttacagccctctcttctttgtacagttgtattccaacactccactcgctaagaggccctgatcccagctcattcaggggagaacacgtcgtggggttcctgtcacgactatcacttgagattatattattatcctcactccctcgctgtctggagacggtcacaccttctggcaa

SEQ ID NO: 81472 - DNA, 1473 bp, Artificial Sequence
  derived and/or modified sequence
atggcccagggcagcggcgaccagagagccgtgggcgtggccgaccccgaggagagcagccccaacatgatcgtgtactgcaagatcgaggacatcatcaccaagatgcaggacgacaagaccggcggcgtgcccatcagaaccgtgaagagcttcctgagcaagatccccagcgtggtgaccggcaccgacatcgtgcagtggctgatgaagaacctgagcatcgaggaccccgtggaggccatccacctgggcagcctgatcgccgcccagggctacatcttccccatcagcgaccacgtgctgaccatgaaggacgacggcaccttctacagattccaggccccctacttctggcccagcaactgctgggagcccgagaacaccgactacgccatctacctgtgcaagagaaccatgcagaacaaggccagactggagctggccgactacgaggccgagaacctggccagactgcagagagccttcgccagaaagtgggagttcatcttcatgcaggccgaggcccaggtgaagatcgacagaaagaaggacaagaccgagagaaagatcctggacagccaggagagagccttctgggacgtgcacagacccgtgcccggctgcgtgaacaccaccgagatggacatcagaaagtgcagaagactgaagaacccccagaaggtgaagaagagcgtgtacggcgtgaccgaggagagccaggcccagagccccgtgcacgtgctgagccagcccatcagaaagaccaccaaggaggacatcagaaagcagatcaccttcctgaacgcccagatcgacagacactgcctgaagatgagcaaggtggccgagagcctgatcgcctacaccgagcagtacgtggagtacgaccccctgatcacccccgccgagcccagcaacccctggatcagcgacgacgtggccctgtgggacatcgagatgagcaaggagcccagccagcagagagtgaagagatggggcttcagcttcgacgagatcctgaaggaccaggtgggcagagaccagttcctgagattcctggagagcgagttcagcagcgagaacctgagattctggctggccgtgcaggacctgaagaagcagcccctgcaggacgtggccaagagagtggaggagatctggcaggagttcctggcccccggcgcccccagcgccatcaacctggacagccacagctacgagatcaccagccagaacgtgaaggacggcggcagatacaccttcgaggacgcccaggagcacatctacaagctgatgaagagcgacagctacgccagattcctgagaagcaacgcctaccaggacctgctgctggccaagaagaagcccgagagcgagcagggcagaagaaccagcctggagaagttcaccagaagcgtgggcaagagcctggccggcaagagactgaccggcctgatgcagagcagctag

SEQ ID NO: 81473 - protein, 613 aa, Artificial Sequence
  derived and/or modified sequence
MLLASAPRRRRFLQRAKCCDCSASLSHQYYEKDGQLFCKKDYWARYGESCHGCSEQITKGLVMVAGELKYHPECFICLTCGTFIGDGDTYTLVEHSKLYCGHCYYQTVVTPVIEQILPDSPGSHLPHTVTLVSIPASSHGKRGLSVSIDPPHGPPGCGTEHSHTVRVQGVDPGCMSPDVKNSIHVGDRILEINGTPIRNVPLDEIDLLIQETSRLLQLTLEHDPHDTLGHGLGPETSPLSSPAYTPSGEAGSSARQKPVLRSCSIDRSPGAGSLGSPASQRKDLGRSESLRVVCRPHRIFRPSDLIHGEVLGKGCFGQAIKVTHRETGEVMVMKELIRFDEETQRTFLKEVKVMRCLEHPNVLKFIGVLYKDKRLNFITEYIKGGTLRGIIKSMDSQYPWSQRVSFAKDIASGMAYLHSMNIIHRDLNSHNCLVRENKNVVVADFGLARLMVDEKTQPEGLRSLKKPDRKKRYTVVGNPYWMAPEMINGRSYDEKVDVFSFGIVLCEIIGRVNADPDYLPRTMDFGLNVRGFLDRYCPPNCPPSFFPITVRCCDLDPEKRPSFVKLEHWLETLRMHLAGHLPLGPQLEQLDRGFWETYRRGESGLPAHPEVPD

SEQ ID NO: 81474 - DNA, 1842 bp, Artificial Sequence
  derived and/or modified sequence
atgctgctggccagcgcccccagaagaagaagattcctgcagagagccaagtgctgcgactgcagcgccagcctgagccaccagtactacgagaaggacggccagctgttctgcaagaaggactactgggccagatacggcgagagctgccacggctgcagcgagcagatcaccaagggcctggtgatggtggccggcgagctgaagtaccaccccgagtgcttcatctgcctgacctgcggcaccttcatcggcgacggcgacacctacaccctggtggagcacagcaagctgtactgcggccactgctactaccagaccgtggtgacccccgtgatcgagcagatcctgcccgacagccccggcagccacctgccccacaccgtgaccctggtgagcatccccgccagcagccacggcaagagaggcctgagcgtgagcatcgaccccccccacggcccccccggctgcggcaccgagcacagccacaccgtgagagtgcagggcgtggaccccggctgcatgagccccgacgtgaagaacagcatccacgtgggcgacagaatcctggagatcaacggcacccccatcagaaacgtgcccctggacgagatcgacctgctgatccaggagaccagcagactgctgcagctgaccctggagcacgacccccacgacaccctgggccacggcctgggccccgagaccagccccctgagcagccccgcctacacccccagcggcgaggccggcagcagcgccagacagaagcccgtgctgagaagctgcagcatcgacagaagccccggcgccggcagcctgggcagccccgccagccagagaaaggacctgggcagaagcgagagcctgagagtggtgtgcagaccccacagaatcttcagacccagcgacctgatccacggcgaggtgctgggcaagggctgcttcggccaggccatcaaggtgacccacagagagaccggcgaggtgatggtgatgaaggagctgatcagattcgacgaggagacccagagaaccttcctgaaggaggtgaaggtgatgagatgcctggagcaccccaacgtgctgaagttcatcggcgtgctgtacaaggacaagagactgaacttcatcaccgagtacatcaagggcggcaccctgagaggcatcatcaagagcatggacagccagtacccctggagccagagagtgagcttcgccaaggacatcgccagcggcatggcctacctgcacagcatgaacatcatccacagagacctgaacagccacaactgcctggtgagagagaacaagaacgtggtggtggccgacttcggcctggccagactgatggtggacgagaagacccagcccgagggcctgagaagcctgaagaagcccgacagaaagaagagatacaccgtggtgggcaacccctactggatggcccccgagatgatcaacggcagaagctacgacgagaaggtggacgtgttcagcttcggcatcgtgctgtgcgagatcatcggcagagtgaacgccgaccccgactacctgcccagaaccatggacttcggcctgaacgtgagaggcttcctggacagatactgcccccccaactgcccccccagcttcttccccatcaccgtgagatgctgcgacctggaccccgagaagagacccagcttcgtgaagctggagcactggctggagaccctgagaatgcacctggccggccacctgcccctgggcccccagctggagcagctggacagaggcttctgggagacctacagaagaggcgagagcggcctgcccgcccaccccgaggtgcccgactag

SEQ ID NO: 81475 - DNA, 1842 bp, Artificial Sequence
  derived and/or modified sequence
atgctcctggcatcggctcctcggcgaagaaggtttctacaacgagctaagtgctgcgattgctctgcctctttgagccatcagtactatgagaaggatgggcagctgttctgcaagaaggactattgggccaggtatggcgagtcctgtcatggttgtagtgaacagataaccaaagggctagtgatggtggcaggggagctaaagtaccacccagagtgttttatctgtctcacatgtggcactttcattggggacggggatacttacacactggtggagcattcaaagctgtattgtggccattgctattaccagacagtcgttacccctgttatcgagcaaattctgccggacagccctggcagccacctcccccacaccgttaccctggtgagcatcccagcatctagtcatggtaaacggggtctgtccgtttcaattgatcctccccacggccctccaggatgcggtacggaacacagtcatactgtaagggtgcaaggcgtcgatcctggatgtatgtccccagacgtcaaaaacagtatccacgtgggagaccgtattctggagataaacggaactcccatccgtaatgtcccccttgatgaaatcgatctgctcatacaagaaacctctcgcctgcttcagctgacgcttgagcatgatcctcatgacactctcgggcatggattggggccggagaccagcccccttagctcgccagcctataccccctctggcgaggctggcagttctgcaaggcagaagcccgtgctgcgaagctgctcaatcgaccgcagtcctggggcgggcagcctaggaagccccgctagccagagaaaggaccttgggcggagcgagtctctgcgtgtagtgtgtcgccctcatagaatctttcgaccttcagacttgattcacggggaggtcctgggaaagggttgctttggacaggccattaaagtgacacatcgggagaccggagaggtaatggtgatgaaagaactgatccgtttcgacgaggagacacagaggacattcctgaaagaggtcaaagtcatgcggtgtctggagcatcctaatgtactaaagtttattggcgtcctgtataaggataagaggctgaattttatcactgaatacattaagggagggacactgcggggcattattaagagtatggacagccagtacccttggtcccagcgcgttagttttgccaaggacatcgcaagcggaatggcctatctgcactcaatgaacatcatccatcgggatctgaatagccacaattgcctggtccgcgagaataaaaacgtcgtggtagcagactttgggcttgctcgtctcatggtcgatgaaaagacacagccagagggactgcgcagtctgaaaaaaccagataggaagaaacgttataccgtggtgggcaatccatactggatggcccccgaaatgatcaacggccggtcatacgatgagaaagtagacgtgtttagttttggcatcgtgctgtgtgagatcatcggacgggtgaacgcagacccagattacctcccaagaaccatggacttcggcttgaatgtgagaggattcctggatcgctactgcccccctaactgcccccccagcttcttcccgattactgtcaggtgctgtgatttagatcctgagaaacggcccagttttgtgaagctagagcactggctggagaccctgagaatgcacttggcaggtcacctgccactaggaccccagctggaacaattggataggggattttgggaaacctaccgccggggggaatccggcctgccggcccatcccgaagtgcctgattag

SEQ ID NO: 81476 - DNA, 1842 bp, Artificial Sequence
  derived and/or modified sequence
atgctgctggccagcgcccccaggagaagacgcttcctgcagagggccaagtgctgtgactgcagcgccagcctgagccaccagtactatgagaaggatggccagctgttctgcaagaaggactactgggcccgctacggggagagctgccacggctgcagcgagcagatcaccaagggcctggtgatggtggccggggagctgaagtaccaccctgagtgcttcatctgcctgacctgtggcaccttcatcggagatggagacacctacaccctggtggagcacagcaagctgtactgcggccactgctactaccagacagtggtgacccctgtgattgagcagatcctgcctgacagccctggcagccacctgccccacacagtgaccctggtgtccatcccagccagcagccacggcaagaggggcctgtctgtgtccattgaccccccccacggccccccaggctgcggcacagagcacagccacacagtgcgggtgcagggcgtggaccccggctgcatgagcccagatgtgaagaacagcatccacgtgggggaccgcatcctggagatcaatggcacccccatcagaaatgtgcccctggatgaaattgacctgctgatccaggagaccagccggctgctgcagctgaccctggagcatgacccccatgacaccctgggccacggcctgggccctgagaccagccccctgagcagccctgcctacaccccatctggagaggccggcagcagcgcccggcagaagcctgtgctgcggagctgcagcattgacaggagccctggagctggcagcctgggcagccctgccagccagaggaaggacctgggccgctctgagagcctgcgggtggtgtgccggccccaccgcatcttccggcccagcgacctgattcatggagaggtgctgggcaagggctgcttcggccaggccatcaaggtgacccaccgggagactggagaggtgatggtgatgaaggagctgatccgctttgatgaggagacccagaggaccttcctgaaggaggtgaaggtgatgcgctgcctggagcaccccaacgtgctgaagttcatcggcgtgctgtacaaggacaagaggctgaacttcatcacagagtacatcaagggcggcaccctgcggggcatcatcaagtccatggacagccagtacccctggagccagagggtgtcctttgccaaggacatcgccagcggcatggcctacctgcacagcatgaacatcatccaccgggacctgaacagccacaactgcctggtgcgggagaacaagaatgtggtggtggccgactttggcctggcccggctgatggtggatgagaagacccagcctgagggcctgcggagcctgaagaagccagacaggaagaagcgctacacagtggtgggcaacccctactggatggcccctgagatgatcaatggccgctcctatgatgagaaggtggatgtgttctcctttggaattgtgctgtgtgagatcatcggccgggtgaatgctgaccctgactacctgcccaggaccatggactttggcctgaatgtgcggggcttcctggaccgctactgcccccccaactgcccccccagcttcttccccatcaccgtgcgctgctgtgacctggaccctgagaagaggcccagctttgtgaagctggagcactggctggagaccctgaggatgcacctggccggccacctgcccctgggcccccagctggagcagctggaccggggcttctgggagacctacagaagaggagagagcggcctgcctgcccaccctgaggtgcctgactag

SEQ ID NO: 81477 - DNA, 2032 bp, Artificial Sequence
  derived and/or modified sequence
agacctccagagcccccagtgtagccacagaggatgctgttggcttcagccccaagaagacgccgcttcctccagagggctaagtgttgtgactgcagtgcctccctgtcgcaccagtactatgagaaggatgggcagctcttctgcaagaaggactactgggcccgctatggcgagtcctgccatgggtgctctgagcaaatcaccaagggactggttatggtggctggggagctgaagtaccaccccgagtgtttcatctgcctcacgtgtgggacctttatcggtgacggggacacctacacgctggtggagcactccaagctgtactgcgggcactgctactaccagactgtggtgacccccgtcatcgagcagatcctgcctgactcccctggctcccacctgccccacaccgtcaccctggtgtccatcccagcctcatctcatggcaagcgtggactttcagtctccattgaccccccgcacggcccaccgggctgtggcaccgagcactcacacaccgtccgcgtccagggagtggatccgggctgcatgagcccagatgtgaagaattccatccacgtcggagaccggatcttggaaatcaatggcacgcccatccgaaatgtgcccctggacgagattgacctgctgattcaggaaaccagccgcctgctccagctgaccctcgagcatgaccctcacgatacactgggccacgggctggggcctgagaccagccccctgagctctccggcttatactcccagcggggaggcgggcagctctgcccggcagaaacctgtcttgaggagctgcagcatcgacaggtctccgggcgctggctcactgggctccccggcctcccagcgcaaggacctgggtcgctctgagtccctccgcgtagtctgccggccacaccgcatcttccggccgtcggacctcatccacggggaggtgctgggcaagggctgcttcggccaggctatcaaggtgacacaccgtgagacaggtgaggtgatggtgatgaaggagctgatccggttcgacgaggagacccagaggacgttcctcaaggaggtgaaggtcatgcgatgcctggaacaccccaacgtgctcaagttcatcggggtgctctacaaggacaagaggctcaacttcatcactgagtacatcaagggcggcacgctccggggcatcatcaagagcatggacagccagtacccatggagccagagagtgagctttgccaaggacatcgcatcagggatggcctacctccactccatgaacatcatccaccgagacctcaactcccacaactgcctggtccgcgagaacaagaatgtggtggtggctgacttcgggctggcgcgtctcatggtggacgagaagactcagcctgagggcctgcggagcctcaagaagccagaccgcaagaagcgctacaccgtggtgggcaacccctactggatggcacctgagatgatcaacggccgcagctatgatgagaaggtggatgtgttctcctttgggatcgtcctgtgcgagatcatcgggcgggtgaacgcagaccctgactacctgccccgcaccatggactttggcctcaacgtgcgaggattcctggaccgctactgccccccaaactgccccccgagcttcttccccatcaccgtgcgctgttgcgatctggaccccgagaagaggccatcctttgtgaagctggaacactggctggagaccctccgcatgcacctggccggccacctgccactgggcccacagctggagcagctggacagaggtttctgggagacctaccggcgcggcgagagcggactgcctgcccaccctgaggtccccgactgagccagggccactcagctgcccctgtccccacctctggagaatccacccccaccagattcctccgcgggaggtggccctcagctgggacagtggggacccaggcttctcctcagagccaggccctgacttgccttctcccaccccgtggaccgcttcc

SEQ ID NO: 81478 - DNA, 1842 bp, Artificial Sequence
  derived and/or modified sequence
atgctgctggccagcgccccccggcggcggcggttcctgcagcgggccaagtgctgtgattgctccgccagcttatcacaccagtactatgagaaagatggacaattgttttgcaagaaagattactgggccagatatggcgagagttgccatggttgctcagagcaaattacgaagggcctagtcatggtggccggcgagctcaagtatcatcccgagtgctttatttgtctgacatgtgggacctttatcggggacggtgatacttacacgctagtcgaacactcaaagctctactgtgggcactgctattaccagaccgtggtgacccctgtcattgagcagattctcccagatagccccggatcgcacttgccccatacagtgacgctggtgtctatcccggcgtcctcacacggcaagaggggactgtcagtttccattgaccccccccacggcccccccggatgtggaactgagcactctcatactgtgcgtgtccagggtgttgaccctggctgtatgtcgccggacgtaaagaactccatacatgttggagacaggattcttgaaattaacggtactccaattcggaacgtgcccctcgacgagatcgacttgttgatacaagaaacttcgaggctgctgcagctcacactggagcacgaccctcacgacacgcttggccacgggctgggacccgagacttctcctctgtcctcacccgcctacacccccagcggtgaggcggggtcctccgccaggcaaaaaccagtcttgcgttcttgtagcatcgatcggtcaccaggagctggatcactgggatctcccgcctcacagcgcaaggacctgggtcggtccgaatcgcttcgcgtcgtgtgcaggccacatagaatcttcaggccttcggatcttattcacggagaagtcctcggcaaaggatgcttcggtcaggctattaaggtgactcatcgcgagacaggggaggtgatggtgatgaaggagcttataagattcgacgaagagacacagcgtacttttctcaaagaggtcaaggtgatgagatgccttgaacacccgaacgtgctgaagttcataggtgtgctgtacaaagataagaggttgaatttcattacagaatatattaaaggggggaccttgcgcggcattatcaaatctatggactctcaatacccttggtcccagagagtcagctttgctaaagacatagctagcggaatggcttatctgcactcgatgaacataatccacagagacctcaacagccacaattgcctggttcgcgagaataaaaacgtggtggtggctgattttggattggcacgtctaatggtagatgaaaaaacccagcctgagggtctgagatccctaaagaaacccgatagaaagaagcggtataccgttgtggggaacccgtactggatggctccggagatgataaatggtagatcatacgacgaaaaagtggacgtctttagcttcggcatcgtactttgcgagatcattgggagggtcaacgccgaccccgattatttacctagaactatggacttcggactaaacgtgagaggcttcttggatcggtattgtccaccaaattgtcccccgagttttttccctatcacagtccggtgctgtgaccttgaccctgagaagagaccatctttcgtgaaactggagcactggctggagactctgcgtatgcatttagccggtcacctgccactcggcccccagctggagcagctggatagaggcttctgggaaacgtaccgcaggggggagtccggcctgccagctcacccagaggtaccggattag

SEQ ID NO: 81479 - DNA, 1842 bp, Artificial Sequence
  derived and/or modified sequence
atgctgctggcttcggcccctaggagacgccgtttcttgcagagagccaagtgttgtgattgttcggcttccttgtctcaccagtactatgaaaaagacggccagctcttctgtaagaaagactactgggcgcgatatggggagtcctgccatggctgctccgagcaaataacgaaaggtttagtgatggtggccggagaattaaagtatcaccccgaatgtttcatatgcctcacttgtggcacatttatcggtgatggggacacttataccctagtggagcacagtaagctttattgtggccactgctactaccagacagtcgtcactcccgtaatcgagcagatcctgccagactcgccaggttcccaccttccccataccgtgactctagtgtccatcccggcttcatcacacggtaaaaggggacttagtgtgtccatcgatcctccacacggccctcctgggtgtgggaccgagcactcccatacggtgcgggtgcagggtgtagaccccggatgtatgtcacccgatgtgaaaaattccatacacgtgggagaccgcatactggagatcaatgggaccccaatcagaaacgtgcctctggacgaaatcgatcttctgatacaagaaacctctagattactgcaactgacactggagcacgaccctcatgatactttggggcatggccttggcccagaaacaagcccattgtcctctccagcttacacgccatctggcgaagcaggttcctccgccagacaaaagcccgtgctgcgctcctgttcaatcgaccgcagtccgggtgctggatctctcgggtccccagcgagccagcgtaaggaccttggaagatccgagtcactgagggtcgtttgcagacctcaccgaatcttccgccctagtgatttaatccatggagaggtgctgggcaagggctgtttcggacaggctatcaaagttactcaccgagagacgggagaggtgatggtgatgaaagagctgatacgcttcgacgaagaaacacagcgcactttcctgaaggaggtgaaggtgatgaggtgtctcgagcaccctaatgtcctgaagttcatcggtgtgctgtataaggacaaacgcctgaacttcataaccgaatatataaaagggggtaccctccgcggaatcataaagagtatggatagtcagtatccttggagccaacgggtctctttcgcgaaggacattgcatccggaatggcttatctgcatagcatgaacataattcaccgcgacctgaatagtcacaattgcttggtacgcgaaaacaaaaatgttgtagtggcagatttcggtctcgcgagactgatggtcgatgagaagactcagcctgagggtctgcggagcctgaagaagcctgacagaaaaaagcggtacacagtggtgggcaatccctattggatggccccagagatgatcaacggccgtagctacgatgagaaagtggacgtcttctcttttggaattgtgctgtgcgagatcattggtcgcgttaacgctgaccctgattacctgcccagaactatggacttcggactgaacgtacggggatttctggatcggtattgccccccaaattgccccccttccttcttcccaattaccgtccgctgttgcgacctggaccccgagaaaagaccatcttttgtcaagctcgagcactggctggagaccctcaggatgcacctggctggccatctgccattgggccctcagttggagcaacttgaccgaggcttttgggagacttatcgtcgtggagaaagcggcctccctgcccatcccgaggtgcctgattag

SEQ ID NO: 81480 - DNA, 393 bp, Artificial Sequence
  derived and/or modified sequence
atgccagactatctgggtgcagaccagagaaaaacgaaagaagatgagaaagatgacaaaccaatccgagctcttgatgagggggacatcgcactgctaaagacttacggtcagtctacatactctagacagatcaagcaagtcgaagacgacattcagcagcttctaaagaaaatcaacgaactcacaggcattaaagagtccgacacagggctggcacccccggcactgtgggacttggccgccgacaaacagactttgcaaagcgagcagcctctccaggttgcaaggtgtacaaaaatcatcaatgcagatagcgaagatcctaagtacattatcaatgtaaagcagttcgcaaaattcgtggtagatttgagcgaccaggtggcttag

SEQ ID NO: 81481 - DNA, 393 bp, Artificial Sequence
  derived and/or modified sequence
atgcctgactacctgggggccgaccaaagaaaaacgaaagaggacgaaaaggacgacaaacccattcgggccctcgacgagggggatatagcccttctgaagacctatggccagtccacatattctagacagattaaacaggttgaggacgacatccagcaacttcttaaaaagattaacgaactgacaggcatcaaagagtcggacactggccttgcaccaccagctctgtgggatctggcggcagacaagcaaacactgcagtctgagcagccactccaagtggcccggtgtactaagattattaacgcagattcagaggacccaaaatacatcatcaacgtcaaacagttcgctaaattcgttgtagacctgagcgaccaggtggcatag

SEQ ID NO: 81482 - DNA, 393 bp, Artificial Sequence
  derived and/or modified sequence
atgccagactacctgggcgctgaccagaggaagaccaaggaggatgagaaggatgacaagcccatccgggccctggatgaaggagacatcgccctgctgaagacctacggccagagcacctacagccggcagatcaagcaggtggaggatgacatccagcagctgctgaagaagatcaatgagctgaccggcatcaaggagagtgacaccggcctggcccccccagccctgtgggacctggccgctgacaagcagaccctgcagagcgagcagcccctgcaggtggcccgctgcaccaagatcatcaatgctgacagcgaggaccccaagtacatcatcaacgtgaagcagtttgccaagtttgtggtggacctgagtgaccaggtggcctag

SEQ ID NO: 81483 - DNA, 393 bp, Artificial Sequence
  derived and/or modified sequence
atgcccgactacctgggcgccgaccagcggaagaccaaggaggacgaaaaggatgacaaaccaataagagccttggatgagggggatatagctctcctgaagacctatggacagagcacttacagccggcagatcaagcaggtggaggatgatattcaacagctgttgaagaagattaacgagttaacagggatcaaagaatccgataccggtctcgccccacctgccctctgggacctggcagcagataaacaaacactccagagtgaacagcctctgcaagtggccagatgcacaaaaatcatcaacgccgacagcgaggaccctaagtatatcattaatgtaaagcagttcgccaaattcgtcgttgacctgtctgaccaggtcgcatag

SEQ ID NO: 81484 - DNA, 393 bp, Artificial Sequence
  derived and/or modified sequence
atgcccgactacctgggcgccgaccagcggaagaccaaggaggacgaaaaggacgacaagcccataagagcattagacgaaggggatattgctctgcttaaaacgtatggtcagtccacttacagcagacagattaaacaagtggaggacgatatccagcagctgctgaaaaagataaatgaactcactggcattaaagaaagcgacacgggtctagcaccccctgccctgtgggatctggccgcagataaacagaccctgcagagcgaacaacccctgcaggttgctcgatgcacaaaaattatcaacgctgacagcgaggatcccaagtacattattaatgtcaagcagttcgccaagttcgtggtcgatctctctgatcaggtggcatag

SEQ ID NO: 81485 - DNA, 393 bp, Artificial Sequence
  derived and/or modified sequence
atgcctgattacctgggggctgatcagaggaaaactaaggaggacgagaaagatgataaacctatccgcgctctagacgagggcgatattgcgttactcaagacttatggccagtcaacctacagtcggcagattaagcaggttgaagatgacatccagcagcttctcaagaagattaacgaactgactggaataaaagagtccgacacagggcttgcccctcctgccttgtgggacctggccgctgacaaacagacattgcaaagtgagcagccacttcaggtcgccagatgcacgaaaatcatcaatgccgatagtgaggatccaaagtacataatcaacgtgaagcagtttgccaaattcgtagtggaccttagcgatcaggtagcatag

SEQ ID NO: 81486 - DNA, 393 bp, Artificial Sequence
  derived and/or modified sequence
atgcctgactacttgggggcagatcagcgcaagacaaaagaagacgagaaagacgacaagccaataagggccctagacgaaggggatatcgcgctgctgaagacatacggacaatccacatactccaggcaaatcaaacaagtggaggatgacatacagcagctgctaaaaaagatcaatgaattaacagggatcaaggagtcagacacagggctagccccacctgcactttgggacttggctgccgacaaacagacacttcagtccgagcagccacttcaggtcgcccgatgtacaaagataatcaatgcagactctgaagaccccaagtatatcatcaacgtcaagcaattcgcaaagttcgtcgtggacctttctgatcaggtggcatag

SEQ ID NO: 81487 - DNA, 656 bp, Artificial Sequence
  derived and/or modified sequence
ctggggtgctggggggttccgtcccgaaatgctcagcccaatccatgagtcagcagcggcgagaggaggaagcaacggtaatcagtccaaaaaccagcgtgccaaagcgtttccccagggctctgtccggactctgaagcactgcataaaggggtctgtctgagcccaatttacttccggtggggaagggaaagggaagacaccaccggaagcaaggaaggtgctgtgtaatcattaaggagcggaggcttttggagctgctaaaatgccggattacctcggtgccgatcagcggaagaccaaagaggatgagaaggacgacaagcccatccgagctctggatgagggggatattgccttgttgaaaacttatggtcagagcacttactctaggcagatcaagcaagttgaagatgacattcagcaacttctcaagaaaattaatgagctcactggtattaaagaatctgacactggcctggccccaccagcactctgggatttggctgcagataagcagacactccagagtgaacagcctttacaggttgccaggtgtacaaagataatcaatgctgattcggaggacccaaaatacattatcaacgtaaagcagtttgccaagtttgtggtggaccttagtgatcaggtggcac

SEQ ID NO: 81488 - DNA, 682 bp, Artificial Sequence
  derived and/or modified sequence
atgagaacctttctggggtgctggggggttccgtcccgaaatgctcagcccaatccatgagtcagcagcggcgagaggaggaagcaacgtttccttctcacaggtaatcagtccaaaaaccagcgtgccaaagcgtttccccagggctctgtccggactctgaagcactgcataaaggggtctgtctgagcccaatttacttccggtggggaagggaaagggaagacaccaccggaagcaaggaaggtgctgtgtaatcattaaggagcggaggcttttggagctgctaaaatgccggattacctcggtgccgatcagcggaagaccaaagaggatgagaaggacgacaagcccatccgagctctggatgagggggatattgccttgttgaaaacttatggtcagagcacttactctaggcagatcaagcaagttgaagatgacattcagcaacttctcaagaaaattaatgagctcactggtattaaagaatctgacactggcctggccccaccagcactctgggatttggctgcagataagcagacactccagagtgaacagcctttacaggttgccaggtgtacaaagataatcaatgctgattcggaggacccaaaatacattatcaacgtaaagcagtttgccaagtttgtggtggaccttagtgatcaggtggcac

SEQ ID NO: 81489 - DNA, 393 bp, Artificial Sequence
  derived and/or modified sequence
atgcccgactacctgggcgccgaccagagaaagaccaaggaggacgagaaggacgacaagcccatcagagccctggacgagggcgacatcgccctgctgaagacctacggccagagcacctacagcagacagatcaagcaggtggaggacgacatccagcagctgctgaagaagatcaacgagctgaccggcatcaaggagagcgacaccggcctggccccccccgccctgtgggacctggccgccgacaagcagaccctgcagagcgagcagcccctgcaggtggccagatgcaccaagatcatcaacgccgacagcgaggaccccaagtacatcatcaacgtgaagcagttcgccaagttcgtggtggacctgagcgaccaggtggcctag

SEQ ID NO: 81490 - protein, 285 aa, Artificial Sequence
  derived and/or modified sequence
MECVPCGDPPPPYEPHCASKVNLVKIASTASSPRDTALAAVICSALATVLLALLILCVIYCKRQFMEKKPSWSLRSQDIQYNGSELSCFDRPQLHEYAHRACCQCRRDSVQTCGPVRLLPSMCCEEACSPNPATLGCGVHSAASLQARNAGPAGEMVPTFFGSLTQSICGEFSDAWPLMQNPMGGDNISFCDSYPELTGEDIHSLNPELESSTSLDSNSSQDLVGGAVPVQSHSENFTAATDLSRYNNTLVESASTQDALTMRSQLDQESGAVIHPATQTSLQEA

SEQ ID NO: 81491 - DNA, 858 bp, Artificial Sequence
  derived and/or modified sequence
atggagtgcgtgccctgcggcgaccccccccccccctacgagccccactgcgccagcaaggtgaacctggtgaagatcgccagcaccgccagcagccccagagacaccgccctggccgccgtgatctgcagcgccctggccaccgtgctgctggccctgctgatcctgtgcgtgatctactgcaagagacagttcatggagaagaagcccagctggagcctgagaagccaggacatccagtacaacggcagcgagctgagctgcttcgacagaccccagctgcacgagtacgcccacagagcctgctgccagtgcagaagagacagcgtgcagacctgcggccccgtgagactgctgcccagcatgtgctgcgaggaggcctgcagccccaaccccgccaccctgggctgcggcgtgcacagcgccgccagcctgcaggccagaaacgccggccccgccggcgagatggtgcccaccttcttcggcagcctgacccagagcatctgcggcgagttcagcgacgcctggcccctgatgcagaaccccatgggcggcgacaacatcagcttctgcgacagctaccccgagctgaccggcgaggacatccacagcctgaaccccgagctggagagcagcaccagcctggacagcaacagcagccaggacctggtgggcggcgccgtgcccgtgcagagccacagcgagaacttcaccgccgccaccgacctgagcagatacaacaacaccctggtggagagcgccagcacccaggacgccctgaccatgagaagccagctggaccaggagagcggcgccgtgatccaccccgccacccagaccagcctgcaggaggcctag

SEQ ID NO: 81492 - DNA, 858 bp, Artificial Sequence
  derived and/or modified sequence
atggagtgtgtgccgtgcggcgatcctccacctccatacgaaccccattgtgcttcaaaggtcaacttggtgaaaattgcgtctacggcttcgtctccacgggatacagccctggctgccgtgatctgtagcgctctggcgaccgtcctgttagctctgttgatcctatgcgttatctattgcaagcgtcagtttatggagaagaaacccagctggtcactgagatcccaggacatccagtataacggatctgaattatcctgcttcgatagaccgcagctgcacgagtatgcccacagggcatgctgccagtgtcgccgcgactctgtccagacgtgtggccctgtgagactgctccccagcatgtgttgcgaggaggcttgctctcctaaccccgcaacactgggatgcggtgtgcattccgcagcttctctgcaggcacgcaacgcagggcctgctggggagatggtccctacgttcttcggatcattgacccagtctatatgtggagaattctctgacgcatggccccttatgcagaatcccatgggcggagacaacatcagcttctgcgattcttaccctgagctgaccggagaggatatccactctctgaaccccgaacttgagtccagcacatcactggattctaattcgtctcaggatctcgtgggaggtgcagtccccgtccagtctcacagcgaaaatttcactgctgcaaccgatctgagcaggtacaacaacaccttggtagagtcggctagtacccaggacgccctcacaatgaggtcgcaacttgaccaggagagcggggcagtgatacatccagctactcaaacctcgctacaggaagcctag

SEQ ID NO: 81493 - DNA, 858 bp, Artificial Sequence
  derived and/or modified sequence
atggagtgtgtgccctgtggggaccccccaccaccctatgagccccactgtgccagcaaggtgaacctggtgaagatcgccagcacagccagcagcccccgggacacagccctggccgccgtcatctgcagcgccctggccaccgtgctgctggccctgctgatcctgtgtgtgatctactgcaagaggcagttcatggagaagaagcccagctggagcctgcggagccaggacatccagtacaacggcagcgagctgagctgctttgaccggccccagctgcatgaatatgcccaccgggcctgctgccagtgccggcgggacagcgtgcagacctgtggccctgtgcggctgctgcccagcatgtgctgtgaggaggcctgcagccccaacccagccaccctgggctgcggcgtgcacagcgctgccagcctgcaggccagaaatgccggccctgctggggagatggtgcccaccttcttcggcagcctgacccagagcatctgtggggagttcagtgatgcctggcccctgatgcagaaccccatgggcggggacaacatctccttctgtgacagctacccagagctgaccggggaggacatccacagcctgaaccctgagctggagagcagcaccagcctggacagcaacagcagccaggacctggtgggcggcgctgtgcctgtgcagagccacagcgagaacttcaccgctgccacagacctgagccgctacaacaacaccctggtggagagcgccagcacccaggatgccctgaccatgaggagccagctggaccaggagagcggggccgtcatccacccagccacccagaccagcctgcaggaggcctag

SEQ ID NO: 81494 - DNA, 858 bp, Artificial Sequence
  derived and/or modified sequence
atggagtgcgtgccctgcggcgaccccccccccccctacgagccccactgtgctagcaaggtaaacttggtgaagatcgcttcaaccgcaagtagtccaagagacaccgcattggcggcagttatctgtagtgcccttgcaacagttctcctggcccttctgatactatgtgtgatctactgtaaaaggcaattcatggagaagaagccttcgtggtcgctgcgctcccaagatattcagtataatggcagtgagctcagctgcttcgatcgacctcagctccatgaatatgcacatcgcgcctgctgtcaatgccgcagagacagcgttcagacctgtggacccgttaggctgctgcccagtatgtgttgcgaggaggcttgttcacctaaccctgccacactgggatgtggagtgcatagtgccgcttctcttcaggcccgcaatgctggacctgctggcgagatggtgccaaccttctttggatctctgacccagtccatttgtggtgaattctccgacgcctggcctcttatgcagaacccaatgggaggggataacatcagcttttgcgatagttatcccgaactgacgggtgaggatatacattcccttaatccagaactggaatcatcgacatcactcgatagtaacagtagccaggacctagttggaggcgctgtacctgtgcagtcacactctgagaacttcacagctgctaccgacctgtcaaggtataataacactctggttgagtccgctagcacacaagacgctctgaccatgcggtcccagttggatcaggagtccggggctgtgatccaccctgccactcaaacatccttgcaggaggcctag

SEQ ID NO: 81495 - DNA, 858 bp, Artificial Sequence
  derived and/or modified sequence
atggagtgtgtgccatgcggggatccccctccaccttacgaaccgcattgcgcctccaaagtaaatttggttaaaatcgcgagtactgccagttctcccagagacacagctttggccgctgtgatatgctccgccctggccacagttctgcttgcacttctgatcctttgcgtgatttactgcaaaaggcagtttatggaaaaaaagcccagctggtcacttcgctcccaggatatccagtacaatggatctgagctgagctgcttcgaccgtccccagctgcatgaatatgcacaccgggcatgctgccaatgtaggagagatagcgttcagacttgtgggcctgtccgtctcctccccagcatgtgttgtgaagaggcgtgttctcctaatccggcaacactaggctgcggtgtccacagcgctgcctcacttcaggcccgaaacgctggtccagcaggtgaaatggtgccaaccttcttcggttcacttactcagagcatatgcggcgaattcagtgatgcttggcctctgatgcagaatcctatgggaggggacaacattagcttctgcgacagttacccagaactgactggagaagatatccattctctgaatccagagttagaatctagcactagcttagattctaactcttctcaggacctcgtggggggtgcagttccagtgcagtctcattcagagaattttacagctgccacagacctgtctcggtacaacaataccctcgtcgagtccgctagtactcaggatgcactcacgatgcgttcacagttagaccaggaatccggcgctgttattcatcctgctacgcagacctctttacaggaggcatag

SEQ ID NO: 81496 - DNA, 3747 bp, Artificial Sequence
  derived and/or modified sequence
gccaaccattttcggccaggctgagaaatttcttattgatgggtctgctcatttcctgcataggaagaaatcggtgacatttgggtggatacagttcccagccaatcgccccgagttccctcgcccactggggaaagaggcagagcttccgctagtctttcatcttcaaaggaaatcaagcttctaaaaagcgggccctgccgaattggctaatagctactccttttctccactaggggagcgttcgcaaggggtgtggggaggtggccagcgcttgccaatcagaggaggccagggctgtcccctagcgggcggtgaccaatcgccggggccggccagagcgcgcttccttagtaggtggatggtggtcggagcgccgactcccttctcgtcgtcgccattttgagctggtgactgtggccggctgggagtaggcggcagtgagtttccctgggagggcagcgcgcttggcgcttctcccctccccccgatctgcctccagtctcggacttggttgttgcgcgctccggctccggctgagctgggagagttggaggaggtggcggcgggcagaggtgatgtctgggagcccttccttgacagcccgggccgagaagagtccctgcaggaagcatcacccaggctggcagatcatggtagcagcagcgggggtggctgggaagtgaaacggagccagcggctgaggaggggccccagcagcccccgaaggccctatcaggacatggagtatgaaagacgtggtggtcgtggtgacaggactggccgctatggagccactgaccgctcgcaggatgatggtggggagaaccgcagccgagaccacgactaccgggacatggactaccgttcatatcctcgcgagtatggcagccaggagggcaagcatgactatgacgactcatctgaggagcagagtgcggaggattcctacgaggcctccccgggctccgagactcagcgtaggcggcggcggcggcacaggcacagccccaccggcccgccaggcttcccccgagacggcgactatcgggaccaggactatcggaccgagcaaggggaggaggaggaggaggaggaggatgaggaggaggaggagaaggccagtaacatcgtcatgctgaggatgctgccacaggcagccactgaggatgacatccgtggccagctgcagtcgcacggcgtgcaagcacgggaggttcggctgatgcggaacaaatcttcaggtcagagccggggcttcgccttcgtcgagtttagtcacttgcaggacgctacacgatggatggaagccaatcagcactccctcaacatcctgggccagaaggtgtcgatgcactacagtgaccccaagcccaagatcaatgaggactggctgtgcaataagtgtggcgtccagaacttcaaacgccgagagaagtgcttcaaatgtggcgtgcccaagtcagaggcagagcagaagctgcccctcggcacgaggctggatcagcagacactgccactgggtggccgggagctgagccagggcctgcttcccctgccgcagccctaccaggcccagggagtcctggcctcccaagccctgtcacagggctcggagccaagctcagagaacgccaatgacaccatcattttgcgcaacctgaacccacacagcaccatggattccatcctgggggccctggcaccctacgcggtgctgtcctcctccaacgtgcgcgtcataaaggacaagcagacccaactgaaccgcggctttgccttcatccagctctccaccatcgtggaggcagcccagctgctgcagatcctgcaggccctgcacccaccactcactatcgacggcaagaccatcaatgttgagtttgccaagggttctaagagggacatggcctccaatgaaggcagtcgcatcagtgctgcctctgtggccagcactgccattgctgcggcccagtgggccatctcacaggcctcccaaggtggggagggtacctgggccacctccgaggagccgccggtcgactacagctactaccaacaggatgagggctatggcaacagccagggcacagagtcttccctctatgcccatggctacctcaagggcaccaagggccctggcatcactggaaccaaaggggatcccactggagcaggtcccgaggcctccctagagcctggggccgactctgtgtcgatgcaggctttctctcgcgcccagcctggtgctgctcctggcatctaccaacaatcagccgaggcgagcagtagccagggcactgctgccaacagccagtcgtataccatcatgtcacccgctgtgctcaaatctgagctccagagccctacccatcctagttctgctctcccaccggctaccagccccactgcccaggaatcctacagccagtaccctgttcccgacgtctctacctaccagtacgatgagacctccggctactactatgacccccagaccggcctctactatgaccccaactcccagtattactacaatgctcagagccagcagtacctgtactgggatggggagaggcggacctatgttcccgccctggagcagtcggccgacggacataaggagacaggggcaccctcgaaggagggcaaagagaagaaggagaagcacaagaccaagacagctcaacagattgccaaggacatggaacgctgggcccgcagtctcaacaaacaaaaagaaaacttcaaaaatagcttccagcctatcagctccctgcgagatgacgagaggcgggagtcagccactgcagatgctggctatgccatcctcgagaagaagggagcactagccgagagacagcacaccagcatggatctcccgaaattggccagtgacgaccgcccaagccctccgcgaggactggtggcagcctacagcggggagagtgacagtgaggaggagcaggagcgtgggggccctgagcgggaggagaagctcaccgactggcagaagctggcctgtctgctctgccgacgccagttccccagcaaagaggcgctcatccggcaccagcagctctcagggctccacaagcaaaaccttgagattcaccggcgagcccacttgtcagaaaacgagctagaagcactagagaagaatgacatggagcaaatgaagtaccgggaccgtgcagctgaacgcagagaaaagtatggcatccccgagccgccagagcccaagaggaggaagtacggcggcatatccacagcctctgtagacttcgagcagcctactcgggacgggctgggcagtgacaacattggcagtcggatgctgcaggccatgggctggaaagagggcagcggcctgggccgcaagaagcagggcattgtaacgcctatcgaggcccaaacacgggtgcggggctccggcctgggtgcacggggcagctcctacggggtcacctcaaccgagtcctacaaggagacactgcacaagacaatggtgacccgcttcaacgaggcccagtgagcagcttcaagagcaacttctccacatgttgggtgtccatcctggggcagggaaggacagagtgttggatggctgggacggggccttgctcttgtcggccagcccactccccagccagagagggcttgaccaaatcaaattgaggtggtgacttttgttggaaaattgggctgggatcacgtcctgttttgtaataaaagctgaaaagtctg

SEQ ID NO: 81497 - protein, 1164 aa, Artificial Sequence
  derived and/or modified sequence
MAGAGGQHHPPGAAGGAAAGAGAAVTSAAASAGPGEDSSDSEAEQEGPQKLIRKVSTSGQIRTKTSIKEGQLLKQTSSFQRWKKRYFKLRGRTLYYAKDSKSLIFDEVDLSDASVAEASTKNANNSFTIITPFRRLMLCAENRKEMEDWISSLKSVQTREPYEVAQFNVEHFSGMHNWYACSHARPTFCNVCRESLSGVTSHGLSCEVCKFKAHKRCAVRATNNCKWTTLASIGKDIIEDEDGVAMPHQWLEGNLPVSAKCAVCDKTCGSVLRLQDWKCLWCKTMVHTACKDLYHPICPLGQCKVSIIPPIALNSTDSDGFCRATFSFCVSPLLVFVNSKSGDNQGVKFLRRFKQLLNPAQVFDLMNGGPHLGLRLFQKFDNFRILVCGGDGSVGWVLSEIDKLNLNKQCQLGVLPLGTGNDLARVLGWGGSYDDDTQLPQILEKLERASTKMLDRWSIMTYELKLPPKASLLPGPPEASEEFYMTIYEDSVATHLTKILNSDEHAVVISSAKTLCETVKDFVAKVEKTYDKTLENAVVADAVASKCSVLNEKLEQLLQALHTDSQAAPVLPGLSPLIVEEDAVESSSEESLGESKEQLGDDVTKPSSQKAVKPREIMLRANSLKKAVRQVIEEAGKVMDDPTVHPCEPANQSSDYDSTETDESKEEAKDDGAKESITVKTAPRSPDARASYGHSQTDSVPGPAVAASKENLPVLNTRIICPGLRAGLAASIAGSSIINKMLLANIDPFGATPFIDPDLDSVDGYSEKCVMNNYFGIGLDAKISLEFNNKREEHPEKCRSRTKNLMWYGVLGTRELLQRSYKNLEQRVQLECDGQYIPLPSLQGIAVLNIPSYAGGTNFWGGTKEDDIFAAPSFDDKILEVVAIFDSMQMAVSRVIKLQHHRIAQCRTVKITIFGDEGVPVQVDGEAWVQPPGIIKIVHKNRAQMLTRDRAFESTLKSWEDKQKCDSGKPVLRTHLYIHHAIDLATEEVSQMQLCSQAAEELITRICDAATIHCLLEQELAHAVNACSHALNKANPRCPESLTRDTATEIAINVKALYNETESLLVGRVPLQLESPHEERVSNALHSVEVELQKLTEIPWLYYILHPNEDEEPPMDCTKRNNRSTVFRIVPKFKKEKVQKQKTSSQPGSGDTESGSCEANSPGN

SEQ ID NO: 81498 - DNA, 3495 bp, Artificial Sequence
  derived and/or modified sequence
atggccggcgccggcggccagcaccacccccccggcgccgccggcggcgccgccgccggcgccggcgccgccgtgaccagcgccgccgccagcgccggccccggcgaggacagcagcgacagcgaggccgagcaggagggcccccagaagctgatcagaaaggtgagcaccagcggccagatcagaaccaagaccagcatcaaggagggccagctgctgaagcagaccagcagcttccagagatggaagaagagatacttcaagctgagaggcagaaccctgtactacgccaaggacagcaagagcctgatcttcgacgaggtggacctgagcgacgccagcgtggccgaggccagcaccaagaacgccaacaacagcttcaccatcatcacccccttcagaagactgatgctgtgcgccgagaacagaaaggagatggaggactggatcagcagcctgaagagcgtgcagaccagagagccctacgaggtggcccagttcaacgtggagcacttcagcggcatgcacaactggtacgcctgcagccacgccagacccaccttctgcaacgtgtgcagagagagcctgagcggcgtgaccagccacggcctgagctgcgaggtgtgcaagttcaaggcccacaagagatgcgccgtgagagccaccaacaactgcaagtggaccaccctggccagcatcggcaaggacatcatcgaggacgaggacggcgtggccatgccccaccagtggctggagggcaacctgcccgtgagcgccaagtgcgccgtgtgcgacaagacctgcggcagcgtgctgagactgcaggactggaagtgcctgtggtgcaagaccatggtgcacaccgcctgcaaggacctgtaccaccccatctgccccctgggccagtgcaaggtgagcatcatcccccccatcgccctgaacagcaccgacagcgacggcttctgcagagccaccttcagcttctgcgtgagccccctgctggtgttcgtgaacagcaagagcggcgacaaccagggcgtgaagttcctgagaagattcaagcagctgctgaaccccgcccaggtgttcgacctgatgaacggcggcccccacctgggcctgagactgttccagaagttcgacaacttcagaatcctggtgtgcggcggcgacggcagcgtgggctgggtgctgagcgagatcgacaagctgaacctgaacaagcagtgccagctgggcgtgctgcccctgggcaccggcaacgacctggccagagtgctgggctggggcggcagctacgacgacgacacccagctgccccagatcctggagaagctggagagagccagcaccaagatgctggacagatggagcatcatgacctacgagctgaagctgccccccaaggccagcctgctgcccggcccccccgaggccagcgaggagttctacatgaccatctacgaggacagcgtggccacccacctgaccaagatcctgaacagcgacgagcacgccgtggtgatcagcagcgccaagaccctgtgcgagaccgtgaaggacttcgtggccaaggtggagaagacctacgacaagaccctggagaacgccgtggtggccgacgccgtggccagcaagtgcagcgtgctgaacgagaagctggagcagctgctgcaggccctgcacaccgacagccaggccgcccccgtgctgcccggcctgagccccctgatcgtggaggaggacgccgtggagagcagcagcgaggagagcctgggcgagagcaaggagcagctgggcgacgacgtgaccaagcccagcagccagaaggccgtgaagcccagagagatcatgctgagagccaacagcctgaagaaggccgtgagacaggtgatcgaggaggccggcaaggtgatggacgaccccaccgtgcacccctgcgagcccgccaaccagagcagcgactacgacagcaccgagaccgacgagagcaaggaggaggccaaggacgacggcgccaaggagagcatcaccgtgaagaccgcccccagaagccccgacgccagagccagctacggccacagccagaccgacagcgtgcccggccccgccgtggccgccagcaaggagaacctgcccgtgctgaacaccagaatcatctgccccggcctgagagccggcctggccgccagcatcgccggcagcagcatcatcaacaagatgctgctggccaacatcgaccccttcggcgccacccccttcatcgaccccgacctggacagcgtggacggctacagcgagaagtgcgtgatgaacaactacttcggcatcggcctggacgccaagatcagcctggagttcaacaacaagagagaggagcaccccgagaagtgcagaagcagaaccaagaacctgatgtggtacggcgtgctgggcaccagagagctgctgcagagaagctacaagaacctggagcagagagtgcagctggagtgcgacggccagtacatccccctgcccagcctgcagggcatcgccgtgctgaacatccccagctacgccggcggcaccaacttctggggcggcaccaaggaggacgacatcttcgccgcccccagcttcgacgacaagatcctggaggtggtggccatcttcgacagcatgcagatggccgtgagcagagtgatcaagctgcagcaccacagaatcgcccagtgcagaaccgtgaagatcaccatcttcggcgacgagggcgtgcccgtgcaggtggacggcgaggcctgggtgcagccccccggcatcatcaagatcgtgcacaagaacagagcccagatgctgaccagagacagagccttcgagagcaccctgaagagctgggaggacaagcagaagtgcgacagcggcaagcccgtgctgagaacccacctgtacatccaccacgccatcgacctggccaccgaggaggtgagccagatgcagctgtgcagccaggccgccgaggagctgatcaccagaatctgcgacgccgccaccatccactgcctgctggagcaggagctggcccacgccgtgaacgcctgcagccacgccctgaacaaggccaaccccagatgccccgagagcctgaccagagacaccgccaccgagatcgccatcaacgtgaaggccctgtacaacgagaccgagagcctgctggtgggcagagtgcccctgcagctggagagcccccacgaggagagagtgagcaacgccctgcacagcgtggaggtggagctgcagaagctgaccgagatcccctggctgtactacatcctgcaccccaacgaggacgaggagccccccatggactgcaccaagagaaacaacagaagcaccgtgttcagaatcgtgcccaagttcaagaaggagaaggtgcagaagcagaagaccagcagccagcccggcagcggcgacaccgagagcggcagctgcgaggccaacagccccggcaactag

SEQ ID NO: 81499 - DNA, 4117 bp, Artificial Sequence
  derived and/or modified sequence
tccccgcaggagtcggagaggatggcaggggccggaggccagcaccaccctccgggcgccgctggaggagcggccgccggagccggcgccgcggtcacctccgccgctgcctcggcggggccgggagaggattcgtctgacagcgaagcggagcaagagggaccccagaaactgatccgcaaagtgtctacctcggggcagatccggaccaagaccagtattaaagagggacagctattgaagcaaaccagttctttccaaaggtggaaaaagcgatacttcaaacttcgaggccgcaccctttactatgcaaaggactcaaagtctctgatatttgatgaagttgacctctcagatgctagtgtagctgaagcaagcacgaaaaatgctaacaacagcttcacgatcatcactccattcagaaggctaatgctgtgtgctgagaacagaaaggagatggaggattggatcagctcactgaagtctgtacagaccagagaaccctacgaggtggcccagtttaatgtggaacatttctcagggatgcacaactggtacgcctgctcccacgcccgacccaccttctgtaacgtgtgcagagagagtctttctggagtcacctcccatggcctgtcctgcgaagtgtgtaaattcaaggctcacaaaagatgtgcagtgagagcaacaaataactgtaaatggactaccctggcctccatcgggaaggacattatagaagatgaagatggcgtcgcgatgcctcaccagtggcttgagggcaacctgcctgtaagtgccaagtgtgctgtctgcgacaaaacatgtggcagtgttctccgtctacaggattggaaatgcctttggtgtaagacaatggtacacactgcctgcaaagatttataccatccaatatgtccacttggtcaatgtaaagtatctatcatacctccaattgcactaaacagcaccgattccgatggtttctgtagagcaacattttcgttctgtgttagtcctctattggtttttgtcaattctaagagtggagataatcagggagtaaagttcctccgtcgctttaaacagttgctaaatccggctcaggtgtttgatttaatgaatggaggtcctcatttaggtttaagattatttcagaagtttgacaatttccggattcttgtttgtggaggcgatggaagtgtaggttgggttttgtcagaaatcgataagctcaacttgaataaacagtgtcagctgggagtgttgcctttgggtacaggaaatgaccttgcccgagttcttggctggggaggttcatatgacgatgacacccaacttcctcagatcctagagaaactggaacgagccagtaccaaaatgttggacaggtggagtataatgacatatgaactcaaattgccaccaaaagcttccctacttccaggacctccagaagcatctgaagaattttatatgacgatttatgaagactcagttgcaacgcatcttacaaaaatcctcaattctgatgaacatgcagtggtcatatcttctgccaagacgctatgtgaaactgtaaaggacttcgttgccaaagtagaaaagacgtatgacaaaaccttggaaaatgccgttgtagctgatgccgtggccagtaaatgttcagtcctaaacgagaagctcgaacaactgctgcaggctttgcacacagattcccaggctgcgcctgttctccctggcctcagccctctcattgtggaagaagatgctgtggaatcgtccagtgaagagtccctgggtgaaagcaaagagcagcttggggatgacgttacaaaaccttcctcccagaaagccgtcaaaccaagggaaatcatgttgcgggcaaatagtttaaagaaagcagtgaggcaagtcattgaggaagccggaaaagttatggatgacccgacagttcacccctgtgaaccagctaatcagtcctctgattatgacagcacagaaacagatgaatctaaggaggaagctaaagatgatggtgccaaagaatcaataactgttaaaactgcacctcggtctccagatgcccgggcaagttatggccattcccaaactgattctgtccctggtccagctgtggcagccagcaaagaaaacctccctgtgctcaataccagaataatctgcccaggtttaagagcaggactggctgcctcaattgctgggagttcgattatcaacaaaatgttactggcaaacattgatccttttggtgccacgccgtttattgacccggatctagattccgtagatggatattcagaaaaatgtgtcatgaacaattactttgggattggattagatgcaaaaatttcattagaatttaataataaaagagaggagcaccctgaaaaatgcaggagccgaactaaaaacttgatgtggtatggagtccttggaacccgggagttattacagagatcgtacaagaatttagaacaaagggttcaacttgagtgtgatgggcagtatattcctcttcccagcttgcaaggcatagccgtgttgaacattcccagctatgctggaggcactaacttttggggtggaactaaagaggatgatatatttgctgcaccatcctttgatgacaagatcctggaagttgtagcaatatttgatagcatgcaaatggcagtttcaagggtcattaaactgcagcatcatcgaatagcccagtgccgtacagtgaaaatcactatatttggtgacgaaggagtcccagtgcaagtggatggtgaagcgtgggttcagcctccagggattatcaaaattgtgcacaaaaacagagcacaaatgctaacaagggacagagcctttgagagcactctgaaatcttgggaagataagcagaagtgtgattctggtaaaccagttctccgaacccatttgtacatccatcacgccattgacttggcaacagaagaggtgtcgcagatgcagctatgctcccaggctgcagaggagctcattactaggatatgtgacgcagccacaattcactgtcttttggagcaagaactggcccatgctgtgaatgcctgctcccatgccctgaataaagccaacccaaggtgcccggagagtcttacaagagacactgccactgaaatagccatcaatgtgaaggcgctgtataatgaaacagaatctttgctagttggcagggttcctttgcagctggaatcgccacatgaagagcgagtatccaatgccttacactctgtggaggtggaattacagaaactgacagagattccttggctttattatatcttacacccaaatgaggatgaggaacctcctatggattgcaccaaaaggaacaacagaagcaccgtatttcgaatagtgccaaagtttaaaaaggaaaaggttcagaagcagaagacaagttcacagcctggatctggggataccgaaagtgggtcatgtgaagcgaattctccagggaattaaagagcttggaaggagcactccacagtcggaggtgtaatcatattggtgctatttcttggaagagaagttattgccacttaatacaaagtccttggaagcaagtggctgttcttgtagttttctgcatagataagtaagcaccactgaagcacctctgtggcttgatattttgctgtgggtgaaattttgatttgaggtattagaaaatatttttgtgccgaacaatacattccacaaagccattttctttttgtgcaaacctgacatgttcaaatatattcacaatggtaataaggtaggaggaatctgagacgattgcattgtctaaacagtggaattgcaaaatgtttactttccatagatctggtctgatggaatgttcctactgtgcaactgcataacaatatgtggttaaaacttcctaggtttcattacgggggggcattggccattttcttaaaatcataggttaggagactaaaatataaattaagttgtgatttgaatgtagattggtatcacctccaactcctagtgcttagtggtcaaatatgttgaaaacctttccaatactatgaatgaatgcaaatcttaatgcacg

SEQ ID NO: 81500 - DNA, 3601 bp, Artificial Sequence
  derived and/or modified sequence
gaacgtcacaaggaagaaacggtgcccggcgcagcttgccctggagcgtagctggagtgcggctgagttttcgctccgctgaagccggagtcggagaggatggcaggggccggaggccagcaccaccctccgggcgccgctggaggagcggccgccggagccggcgccgcggtcacctccgccgctgcctcggcggggccgggagaggattcgtctgacagcgaagcggagcaagagggaccccagaaactgatccgcaaagtgtctacctcggggcagatccggaccaagaccagtattaaagagggacagctattgaagcaaaccagttctttccaaaggtggaaaaagcgatacttcaaacttcgaggccgcaccctttactatgcaaaggactcaaagtctctgatatttgatgaagttgacctctcagatgctagtgtagctgaagcaagcacgaaaaatgctaacaacagcttcacgatcatcactccattcagaaggctaatgctgtgtgctgagaacagaaaggagatggaggattggatcagctcactgaagtctgtacagaccagagaaccctacgaggtggcccagtttaatgtggaacatttctcagggatgcacaactggtacgcctgctcccacgcccgacccaccttctgtaacgtgtgcagagagagtctttctggagtcacctcccatggcctgtcctgcgaagtgtgtaaattcaaggctcacaaaagatgtgcagtgagagcaacaaataactgtaaatggactaccctggcctccatcgggaaggacattatagaagatgaagatggcgtcgcgatgcctcaccagtggcttgagggcaacctgcctgtaagtgccaagtgtgctgtctgcgacaaaacatgtggcagtgttctccgtctacaggattggaaatgcctttggtgtaagacaatggtacacactgcctgcaaagatttataccatccaatatgtccacttggtcaatgtaaagtatctatcatacctccaattgcactaaacagcaccgattccgatggtttctgtagagcaacattttcgttctgtgttagtcctctattggtttttgtcaattctaagagtggagataatcagggagtaaagttcctccgtcgctttaaacagttgctaaatccggctcaggtgtttgatttaatgaatggaggtcctcatttaggtttaagattatttcagaagtttgacaatttccggattcttgtttgtggaggcgatggaagtgtaggttgggttttgtcagaaatcgataagctcaacttgaataaacagtgtcagctgggagtgttgcctttgggtacaggaaatgaccttgcccgagttcttggctggggaggttcatatgacgatgacacccaacttcctcagatcctagagaaactggaacgagccagtaccaaaatgttggacaggtggagtataatgacatatgaactcaaattgccaccaaaagcttccctacttccaggacctccagaagcatctgaagaattttatatgacgatttatgaagactcagttgcaacgcatcttacaaaaatcctcaattctgatgaacatgcagtggtcatatcttctgccaagacgctatgtgaaactgtaaaggacttcgttgccaaagtagaaaagacgtatgacaaaaccttggaaaatgccgttgtagctgatgccgtggccagtaaatgttcagtcctaaacgagaagctcgaacaactgctgcaggctttgcacacagattcccaggctgcgcctgttctccctggcctcagccctctcattgtggaagaagatgctgtggaatcgtccagtgaagagtccctgggtgaaagcaaagagcagcttggggatgacgttacaaaaccttcctcccagaaagccgtcaaaccaagggaaatcatgttgcgggcaaatagtttaaagaaagcagtgaggcaagtcattgaggaagccggaaaagttatggatgacccgacagttcacccctgtgaaccagctaatcagtcctctgattatgacagcacagaaacagatgaatctaaggaggaagctaaagatgatggtgccaaagaatcaataactgttaaaactgcacctcggtctccagatgcccgggcaagttatggccattcccaaactgattctgtccctggtccagctgtggcagccagcaaagaaaacctccctgtgctcaataccagaataatctgcccaggtttaagagcaggactggctgcctcaattgctgggagttcgattatcaacaaaatgttactggcaaacattgatccttttggtgccacgccgtttattgacccggatctagattccgtagatggatattcagaaaaatgtgtcatgaacaattactttgggattggattagatgcaaaaatttcattagaatttaataataaaagagaggagcaccctgaaaaatgcaggagccgaactaaaaacttgatgtggtatggagtccttggaacccgggagttattacagagatcgtacaagaatttagaacaaagggttcaacttgagtgtgatgggcagtatattcctcttcccagcttgcaaggcatagccgtgttgaacattcccagctatgctggaggcactaacttttggggtggaactaaagaggatgatatatttgctgcaccatcctttgatgacaagatcctggaagttgtagcaatatttgatagcatgcaaatggcagtttcaagggtcattaaactgcagcatcatcgaatagcccagtgccgtacagtgaaaatcactatatttggtgacgaaggagtcccagtgcaagtggatggtgaagcgtgggttcagcctccagggattatcaaaattgtgcacaaaaacagagcacaaatgctaacaagggacagagcctttgagagcactctgaaatcttgggaagataagcagaagtgtgattctggtaaaccagttctccgaacccatttgtacatccatcacgccattgacttggcaacagaagaggtgtcgcagatgcagctatgctcccaggctgcagaggagctcattactaggatatgtgacgcagccacaattcactgtcttttggagcaagaactggcccatgctgtgaatgcctgctcccatgccctgaataaagccaacccaaggtgcccggagagtcttacaagagacactgccactgaaatagccatcaatgtgaaggcgctgtataatgaaacagaatctttgctagttggcagggttcctttgcagctggaatcgccacatgaagagcgagtatccaatgccttacactctgtggaggtggaattacagaaactgacagagattccttggctttattatatcttacacccaaatgaggatgaggaacctcctatggattgcaccaaaaggaacaacagaagcaccgtatttcgaatagtgccaaagtttaaaaaggaaaaggttcagaagcagaagacaagttcacagcctggatctggggataccgaaagtgggtcatgtgaagcgaattctccagggaattaaagagctt

SEQ ID NO: 81501 - DNA, 3495 bp, Artificial Sequence
  derived and/or modified sequence
atggcaggcgctggcggacagcaccaccccccgggtgcagcgggaggcgccgccgcaggagcaggagccgccgtgacctcagccgcagcttccgcaggacccggcgaagattcttctgactcagaggcagagcaggaaggacctcagaagttgatcagaaaagtctccacatccgggcagatcagaaccaagaccagtatcaaggaagggcagctgttgaagcagacaagttctttccaacgctggaagaaacggtactttaaactcaggggaagaactttgtactacgccaaagattccaagtcgctcatctttgacgaggtggatctgagcgatgcaagcgtcgcggaggcctcaacaaaaaatgccaataattcttttactattattactccctttaggaggctgatgttatgcgcggagaaccgcaaggaaatggaggattggatatcttcactcaagtctgtgcaaactagggaaccatacgaggtggcccagtttaatgtggagcattttagcggaatgcacaactggtatgcctgtagtcatgctcggccaacattctgcaatgtgtgtagagaaagccttagtggagtgacatctcacggcctgagttgtgaagtgtgcaagttcaaagcccacaagcgatgtgctgtgcgtgccaccaacaactgcaagtggaccacactcgccagcattggaaaggacattatagaggacgaagacggcgtcgcgatgccccaccaatggcttgagggcaatttgcccgttagcgccaagtgtgccgtctgcgacaaaacatgtggctcggtactccggctccaggattggaaatgtctgtggtgtaaaaccatggtgcacacagcctgcaaggatttgtatcaccccatctgtcctctggggcagtgtaaagtcagcatcattcccccaatagccttaaattcgactgatagcgacggattctgcagggcaaccttttcattttgtgtgagcccactcctggtgttcgtgaactccaagtctggtgataaccagggggtcaaattcctcagaaggttcaaacaactcctgaatccggcacaggtttttgatctgatgaatgggggccctcatttgggcctgcggctcttccagaagtttgataacttccggatcttagtctgcggaggggatggaagtgtcggttgggtgctctcggagattgacaagctcaacttgaacaaacagtgccagctcggcgtcctgccattaggaactggcaatgatctggccagggttctgggttgggggggaagttacgacgatgacacgcagcttccccaaatccttgaaaagttggagagggcttccacaaaaatgctggaccgatggtcgatcatgacatatgagctgaaacttcctcccaaggctagtctgttacctggaccccccgaagcctcagaagaattttacatgacgatatacgaggactccgttgctactcatcttaccaaaatactgaatagcgacgaacacgcagtggtgatatcgagtgcaaagaccctgtgtgaaaccgtgaaagatttcgtagctaaagtggagaagacctacgataaaactctcgaaaacgcagtagtcgctgacgcagttgccagcaaatgctctgtcctgaatgaaaagttggagcagcttctgcaggccctacacacagactctcaggcagcccccgtgctgcctggcttgtctcctcttatcgtggaagaggacgccgtggaaagctctagcgaagaatccttgggcgaatcaaaggaacaacttggagacgacgtgactaaacccagttcgcagaaagctgtgaagcctagggagatcatgttacgggcaaactcactgaagaaggccgttagacaagttattgaagaagcgggaaaggtgatggatgatcctaccgtccatccatgcgaacccgccaaccagtcaagtgattacgattcaaccgaaaccgatgaatccaaggaggaagcaaaggatgacggcgctaaggagtctatcacagttaaaaccgcgccaagatccccggacgcccgcgcaagctatggtcactcacaaaccgattcagtgccaggccctgcagtagccgctagcaaagagaacctgcctgtccttaacactcgaattatatgcccaggtctcagggcgggcctcgctgcttccattgcaggctcttctattattaacaaaatgctcctggctaatattgaccctttcggcgccactccattcattgacccagacctcgatagtgtggacggctactccgaaaaatgtgtgatgaacaattatttcggcataggtcttgatgccaagatctcactggaattcaataacaagcgggaggagcaccccgaaaaatgtcgaagcaggactaaaaacctgatgtggtacggagtgctcgggaccagagaattacttcagagaagctacaaaaacctggagcagcgtgtgcagctggagtgtgatggccaatacattcctctgccaagcctgcagggcatagccgtactcaatattccctcatacgctggtggcacaaatttttgggggggtactaaagaagatgatattttcgcagcaccctctttcgacgacaaaattttagaggtggttgccatcttcgattcgatgcagatggccgtttctagggtaatcaaactacagcatcaccggatagcccaatgtcgtaccgtcaaaatcacaattttcggtgacgagggcgtcccagtgcaggtggatggcgaagcctgggtgcaacctcccggtattatcaaaatcgtccacaagaaccgagctcagatgttgacccgggatcgtgctttcgagtccacgctgaaaagttgggaagataaacagaagtgcgattctgggaagcccgtgctccgcacccacctttatatccaccacgccatagatttggccactgaggaggtgtcgcagatgcagctctgttcccaggcagctgaagaacttattactagaatatgcgatgcggcgacaattcactgcttgcttgagcaagaactggcccatgcagtgaacgcttgtagtcatgcactgaataaagctaatccaaggtgccccgagtctctgactagggatactgctacagaaattgccattaacgttaaagctctttataacgaaaccgaatccctgctagtagggagagtgcccctgcaactggagtccccccatgaagaacgggtgtcgaatgctctgcactctgtagaggtggaactacagaagctcacggaaatcccctggctgtattatatcttacatcccaacgaggatgaagaacctcctatggactgtactaagaggaacaaccggagcaccgtatttaggatcgtgccgaaattcaagaaggagaaagtgcagaagcagaagaccagcagccagcctggctccggcgacactgaaagtgggtcctgcgaggccaatagcccgggcaactag

SEQ ID NO: 81502 - DNA, 3495 bp, Artificial Sequence
  derived and/or modified sequence
atggcaggggcggggggacaacatcacccaccaggggctgcgggcggagcagcagcaggcgcaggcgccgctgttacgtcggccgctgcctccgctggacctggcgaggattcatccgacagcgaagccgagcaggaaggcccccagaagttaattaggaaggtaagcacttctggccaaattagaacaaagacaagtatcaaagagggccagcttctgaaacagaccagctctttccagcggtggaaaaaacgctattttaaattaagaggtcgcactctgtactatgccaaagatagcaagtccctgatctttgatgaagtggacctcagcgacgcctctgttgccgaagcatctaccaagaatgctaacaactcattcactattataactccattccggagactgatgctttgtgctgaaaataggaaagaaatggaggattggattagcagtctcaaatcagtgcaaacacgagaaccctacgaggtcgcccagttcaatgttgagcacttctcaggaatgcacaattggtatgcatgttcccacgccagaccgacattctgcaacgtgtgcagagagtccctgagcggagtgacaagccacggactgtcgtgcgaagtctgtaaattcaaggcccataagaggtgcgccgtgagggccaccaacaattgcaagtggactacccttgcctccattgggaaagacatcatcgaggacgaagacggggtcgcaatgccccatcaatggctcgagggcaatctcccagtgtcagccaagtgtgctgtgtgtgacaagacctgtggctccgtcctgagactccaagactggaagtgcctgtggtgtaaaacaatggtgcatactgcctgcaaagatctttaccatccaatctgcccgctcgggcagtgcaaggtctcgataatcccccccatcgcgctaaatagcactgatagcgatggtttctgcagagctacctttagcttttgcgtgagtcccctcctggtgttcgtgaacagcaagtctggtgataatcagggcgttaagtttctgaggcggtttaagcagctgctcaacccggcccaggtcttcgatctcatgaacggcggaccccatctgggtctgcgcctgttccagaagttcgataactttaggattctagtctgcggcggagacgggagcgttgggtgggttctgtccgagatcgataagcttaacctaaacaaacagtgtcagctcggcgttttgcccctcggaactggcaatgacctcgcacgggtgctcggctggggcggcagttatgacgatgacacacagctaccacagatcttggaaaaactggagagggcctcgactaaaatgctcgacagatggtctattatgacttacgagctaaagttaccccccaaagcttccctgctgccagggccacccgaagccagcgaggagttttatatgacaatctacgaggacagcgtggccacgcatctgactaagattctcaattccgatgagcatgcggtcgtgataagttcagcaaagacactgtgcgaaaccgtcaaggactttgtcgcaaaggttgaaaagacatatgataagacgctggaaaatgcagtggttgctgacgctgtggcctcaaaatgctctgtgctaaacgaaaaacttgagcagcttcttcaggcgctccatacggactcccaggccgctccagtattacctgggctgagcccacttattgttgaggaagatgctgtcgaatcctcatccgaggagagcctgggcgaaagtaaggagcagttgggcgatgacgtcacaaagccctcaagccaaaaggctgtgaaaccacgcgaaataatgctacgcgctaactctctgaagaaggccgtccgtcaggtcatcgaagaagcgggcaaggtgatggacgacccgactgtgcacccttgcgagcccgcaaaccagtctagtgattacgacagcacagaaaccgatgagtcgaaggaagaagcaaaagacgacggagctaaggaatctatcacagtaaaaaccgcccctagatccccggatgctagagcttcgtacggccactcacagacagacagcgttccaggacccgccgttgctgccagcaaagaaaacctgccggtcctgaacacaaggataatctgtcctggcctgagagccgggctcgctgccagcatagccggaagcagcattataaataaaatgcttttggctaacatagaccccttcggagccacccctttcatcgaccccgatttggattcagtggacggctacagcgaaaagtgtgtgatgaacaactactttggaatcgggctcgacgctaagatctctcttgaattcaataataaacgtgaagagcatcccgaaaaatgcagatcacgaactaagaatctcatgtggtacggagttctgggcacacgggagttgctgcagcggagttataaaaacctggaacagagggtgcagctggaatgtgacggacaatacattcctctgccatctctccagggtattgccgtgttgaacattccaagctatgcaggcggcactaatttctggggcggaacgaaggaggacgatatttttgcagctcccagctttgatgataaaatcctagaggtggtggctatttttgactccatgcagatggcagtgagcagggtgatcaaactacagcatcatcggattgcccagtgcaggacagtgaagattacgatttttggagatgaaggcgtgccagttcaggtcgatggtgaggcttgggtgcagccccccggaataattaagattgtgcataaaaatagggctcagatgctgaccagggaccgggctttcgagagtactcttaaatcatgggaagacaagcaaaagtgcgactcaggcaaacctgtgctgaggacccacctttatatccatcacgccattgatctggccactgaagaagtctctcagatgcaactatgctcgcaggccgcagaagaactgattacccggatctgtgatgccgcgaccatacactgcctccttgagcaggagctggcacatgctgtgaatgcatgctcccacgctctcaataaagccaatcctcgatgtcccgaatccctgacccgggacactgctaccgaaatcgcaatcaacgtaaaggccttatacaatgagactgagagcctgttggttggaagagtcccactgcagctcgagagtccccatgaagaaagagtatctaacgccctccacagtgttgaggtggaactccagaaactcacagaaatcccttggctttactacattttgcatcctaacgaggacgaagaaccccccatggattgcactaaacggaacaaccgtagcacggtgttccggatcgtccctaagtttaaaaaggagaaggttcaaaagcagaaaacttcctcacagcccggaagcggggacaccgagagcgggagttgtgaggccaatagccccgggaactag

SEQ ID NO: 81503 - DNA, 3495 bp, Artificial Sequence
  derived and/or modified sequence
atggccggggccggcggccagcaccaccccccaggagctgctgggggcgctgctgctggagctggagctgctgtgaccagcgctgctgccagcgctggccctggagaggacagcagtgacagcgaggccgagcaggagggcccccagaagctgatcaggaaggtgtccaccagcggccagatccgcaccaagaccagcatcaaggagggccagctgctgaagcagaccagcagcttccagcgctggaagaagcgctacttcaagctgcggggccgcaccctgtactatgccaaggacagcaagagcctcatctttgatgaggtggacctgagtgatgcctctgtggccgaggccagcaccaagaatgccaacaacagcttcaccatcatcacccccttccggcggctgatgctgtgtgctgaaaataggaaggagatggaggactggatcagcagcctgaagtctgtgcagacccgggagccctatgaggtggcccagttcaacgtggagcacttcagcggcatgcacaactggtacgcctgcagccacgcccggcccaccttctgcaatgtgtgccgggagagcctgtctggagtgaccagccacggcctgagctgtgaggtgtgcaagttcaaggcccacaagagatgtgctgtgcgggccaccaacaactgcaagtggaccaccctggccagcatcggcaaggacatcattgaagatgaagatggagtggccatgccccaccagtggctggagggcaacctgcctgtgtctgccaagtgtgctgtgtgtgacaagacctgtggctctgtgctgcggctgcaggactggaagtgcctgtggtgcaagaccatggtgcacacagcctgcaaggacctgtaccaccccatctgccccctgggccagtgcaaggtgtccatcatcccccccatcgccctgaacagcacagacagtgatggcttctgccgggccaccttctccttctgtgtgagccccctgctggtgtttgtgaacagcaagagcggggacaaccagggcgtgaagttcctgcggcgcttcaagcagctgctgaacccagcccaggtgtttgacctgatgaatggaggcccccacctgggcctgcggctcttccagaagtttgacaacttccgcatcctggtgtgtggaggagatggctctgtgggctgggtgctgtctgaaattgacaagctgaacctgaacaagcagtgccagctgggcgtgctgcccctgggcactggaaatgacctggcccgggtgctgggctggggcggcagctatgatgatgacacccagctgccccagatcctggagaagctggagcgggccagcaccaagatgctggaccgctggagcatcatgacctatgagctgaagctgccccccaaggccagcctgctgcccggccccccagaggccagcgaggagttctacatgaccatctatgaagattctgtggccacccacctgaccaagatcctgaacagtgatgaacatgctgtggtgatcagcagcgccaagaccctgtgtgagaccgtgaaggactttgtggccaaggtggagaagacctatgacaagaccctggagaatgctgtggtggctgatgctgtggccagcaagtgcagcgtgctgaatgagaagctggagcagctgctgcaggccctgcacacagacagccaggccgcccctgtgctgcccggcctgagccccctcatcgtggaggaggatgctgtggagagcagcagcgaggagagcctgggggagagcaaggagcagctgggagatgatgtgaccaagcccagcagccagaaggctgtgaagccccgggagatcatgctgcgggccaacagcctgaagaaggctgtgcggcaggtgattgaggaggccggcaaggtgatggatgaccccaccgtgcacccctgtgagcccgccaaccagagcagtgactatgacagcacagaaacagatgagagcaaggaggaggccaaggatgatggagccaaggagagcatcaccgtgaagacagcccccaggagcccagatgcccgggccagctatggccacagccagacagattctgtgcccggccctgctgtggccgccagcaaggagaacctgcctgtgctgaacacccgcatcatctgccccggcctgcgggccggcctggccgccagcattgctggcagcagcatcatcaacaagatgctgctggccaacatcgacccctttggagccacccccttcattgatcctgacctggacagcgtggatggctacagcgagaagtgtgtgatgaacaactactttggaattggcctggatgccaagatcagcctggagttcaacaacaagcgggaggagcaccctgagaagtgccgcagcaggaccaagaacctgatgtggtacggcgtgctgggcacccgggagctgctgcagaggagctacaagaacctggagcagagggtgcagctggagtgtgatggccagtacatccccctgcccagcctgcagggcattgctgtgctgaacatccccagctatgctgggggcaccaacttctggggcggcaccaaggaggatgacatctttgctgcccccagctttgatgacaagatcctggaggtggtggccatctttgacagcatgcagatggctgtgtccagggtcatcaagctgcagcaccacagaattgcccagtgcaggacagtgaagatcaccatctttggagatgagggcgtgcctgtgcaggtggatggagaggcctgggtgcagcccccaggcatcatcaagatcgtgcacaagaacagagcccagatgctgacccgggaccgggcctttgagagcaccctgaagtcctgggaggacaagcagaagtgtgacagcggcaagcctgtgctgcggacccacctgtacatccaccacgccatcgacctggccacagaggaggtgtcccagatgcagctgtgcagccaggccgctgaggagctgatcacccgcatctgtgatgctgccaccatccactgcctgctggagcaggagctggcccatgctgtgaatgcctgcagccacgccctgaacaaggccaacccccgctgcccagagagcctgacccgggacacagccacagagatcgccatcaacgtgaaggccctgtacaatgaaacagagagcctgctggtgggccgggtgcccctgcagctggagagcccccatgaggagcgggtgtccaatgccctgcacagcgtggaggtggagctgcagaagctgacagagatcccctggctgtactacatcctgcaccccaatgaagatgaggagccccccatggactgcaccaagaggaacaacagaagcacagtgttcagaattgtgcccaagttcaagaaggagaaggtgcagaagcagaagaccagcagccagcccggcagcggggacacagagagcggcagctgtgaggccaacagccctggcaactag

SEQ ID NO: 81504 - DNA, 3495 bp, Artificial Sequence
  derived and/or modified sequence
atggccggcgccggcggccagcaccacccccccggcgccgccggcggcgccgctgccggcgccggcgctgccgtcaccagtgcagctgcctcggccggccctggcgaggattcctcagactcagaggcggagcaggagggaccccagaagcttatccggaaggtgtccactagcggccaaatcaggaccaagaccagcatcaaggaaggacagctcttgaagcagacgtctagctttcagaggtggaaaaagcggtacttcaaactgagaggccggacgctgtattacgccaaggactccaaaagtctgatctttgatgaggtcgacttatcggatgcttccgtggccgaagcctctacaaaaaatgctaacaattcttttacaattattactcccttcagacgactaatgttgtgtgccgaaaatcgcaaggagatggaagactggatctcttctctgaagtccgtgcagacacgggaaccgtacgaggtggctcagtttaacgtggagcacttcagcggtatgcacaattggtacgcttgcagccatgctcgccctaccttttgtaacgtgtgcagggagtccctgtcaggcgtgacttctcacgggctttcatgcgaggtgtgtaagtttaaggcccacaagagatgcgctgtgagggctacgaacaattgcaaatggactacgctagcgagcatcgggaaagacatcattgaagacgaagacggagtagctatgcctcatcagtggctcgagggtaacctcccagtgtctgcgaaatgtgcagtgtgtgataagacctgtgggtcagtgctgaggctgcaggactggaagtgcttgtggtgtaagaccatggttcataccgcctgcaaagatctgtatcatcctatctgcccacttgggcaatgtaaggtgagtattatcccccccatcgctctgaattccacggactccgacggcttctgccgcgccaccttcagtttttgtgtatcaccactcctggtgtttgtgaacagcaagagtggtgataatcagggcgtgaagtttctaaggaggttcaaacaactattaaatccagcccaggtgttcgacctcatgaacgggggcccgcatctgggcctgcggctgtttcagaagttcgataactttcgcattctggtctgtggaggggatgggtctgtaggatgggtgctttctgagatcgacaagctgaatctgaacaagcaatgtcagctgggggtactgccactcggcaccgggaacgaccttgcccgggtcttgggctggggaggctcctacgacgatgacactcagctacctcagattttagagaagctggagagagcttctacaaaaatgctcgaccgctggagcataatgacctatgagctgaagctaccacccaaggcaagcctcctgcctggaccgcctgaggcaagtgaggaattctatatgacaatctatgaggattcagtcgccacacatctcaccaagattctcaattccgatgagcacgcagtagtgatttcgagcgccaaaaccttgtgcgagactgtcaaggatttcgtggctaaggtcgagaagacttatgacaagacgttggagaatgccgtcgtcgcagatgctgtggcttccaaatgctctgtactcaatgaaaaactggagcaacttctccaagcccttcacactgactcccaggctgcaccagttctgccggggctcagtccgctcatcgtagaagaggatgccgtggaatccagctcagaagaaagtctcggagaatccaaagagcaactaggcgacgatgtgaccaagccaagttcacagaaggccgttaagccacgcgaaattatgttgcgagcgaacagcctgaaaaaggccgtgcgccaggtcattgaagaggccggcaaggttatggacgacccaacagtgcatccctgtgagcccgcgaatcagtcaagtgactacgatagtaccgaaaccgatgagagtaaagaagaggcaaaggacgacggagctaaggaatctatcaccgtgaagacagcaccacgatctcccgatgccagggccagctacggacattcacagacagattccgtccctggccctgctgtagcggcttccaaggaaaatctcccagtgcttaacaccagaatcatctgtccaggactcagggcagggctcgccgcgtccatagcgggatcctccatcatcaataaaatgctgctggctaatatagatccattcggcgctaccccctttattgatcccgacctcgattctgtcgacggctattctgagaaatgtgtgatgaacaactattttgggattggactggacgccaaaatttccctcgaatttaataacaagcgcgaggagcatccagaaaaatgccgctcaagaacgaagaatctgatgtggtatggagtgctgggaacgcgagaactgcttcagcgtagttacaaaaacctcgaacagcgcgttcagctggagtgtgatgggcagtatatccctctgccaagcttacaaggcattgccgtgttgaacattccatcctacgcggggggcacaaacttttggggaggcacaaaggaagacgatatattcgctgccccgtcgtttgatgataagattctcgaggtggtagcaatattcgactcgatgcaaatggcagtttcccgagttatcaaactacagcaccatcgaatagctcagtgtaggacagtgaagataaccatatttggtgatgagggggtcccagtgcaagttgatggcgaggcctgggtccagccaccaggaattataaagatcgtccacaagaatcgggcccagatgctcactagagaccgggccttcgagtccacgctcaaatcctgggaggacaaacaaaaatgcgactccggtaagcccgtacttaggacacacctctacatccaccacgccatcgatctggccactgaggaggtcagccagatgcaactctgttcacaggccgcagaagagctgatcactaggatctgcgacgccgcgaccattcattgtctcctggagcaggagctggctcatgccgtgaacgcctgctcccatgcactaaataaagcgaatcccaggtgccctgaatcactgactagagacaccgctactgagatagccatcaacgtgaaggctctctacaatgagacagagtccctgctggtgggacgggtgccactgcagttggaatccccacacgaggaacgcgtatcaaacgccctgcatagcgttgaggtagagctccagaagctcaccgagattccgtggctttactacatactgcatcccaacgaggatgaggaaccaccgatggactgcactaagagaaataaccgctccaccgtgttcagaatcgttcctaagttcaaaaaggagaaggttcagaaacagaaaacaagcagccagcccggttccggagacacagaatcagggtcgtgcgaggccaactcaccagggaattag

SEQ ID NO: 81505 - DNA, 3495 bp, Artificial Sequence
  derived and/or modified sequence
atggccggcgccggcggccagcaccacccccccggcgccgccggcggagctgcagccggcgctggtgctgcagttacatctgccgcggcttctgccgggcccggtgaggattcctcagatagtgaagctgaacaggagggaccacaaaagctgattcggaaagtcagcaccagcgggcagattcgaactaaaacaagcataaaagaaggccagctgctgaagcaaacttcaagctttcaacggtggaaaaagcgatactttaaactgagaggtcgcacgctctactatgctaaagactctaagagcctaatattcgatgaggtcgacctgtccgacgcctctgtggctgaggcatctaccaaaaatgcaaataacagctttactatcattacgccgttccgacggttgatgctgtgcgccgagaaccgcaaagagatggaagactggatttcttctctgaagagcgtgcagacacgagagccatatgaagttgctcaatttaacgtggagcatttctccggcatgcacaattggtacgcatgtagtcacgcccgacccacattctgtaacgtgtgccgtgaaagtctgtcaggggtgacctctcacgggctgtcctgcgaggtttgtaagttcaaagctcataagcggtgcgctgtcagggccaccaacaattgtaaatggacgacgctcgcttccattggaaaggacatcatagaagatgaggatggtgttgctatgcctcaccaatggctggaagggaacctgcccgtgagtgccaagtgtgcagtttgtgacaagacctgtggctctgtgcttaggctgcaggattggaaatgtctctggtgcaagaccatggtccacaccgcctgcaaagacctttatcatccgatatgcccactaggacagtgcaaggtgtctatcattccccctattgcacttaatagtacagatagtgatggtttttgtcgggccacattttctttttgtgttagtcctttgctggtatttgtgaacagcaagtctggcgacaatcagggcgttaagttcctccgacgcttcaaacaattgcttaatcctgcccaggttttcgacctaatgaatggcggcccgcatctggggctgagactgttccagaagtttgacaacttcagaatcttggtttgcggcggcgatgggagtgttggatgggttctaagcgagattgataagcttaatttgaacaagcagtgccagttaggtgtgctgccactgggtaccggaaatgatctggcacgggtgttggggtggggtggaagctacgacgacgacacacagctgcctcagatattggaaaagctggagcgcgccagtaccaagatgttggacaggtggagtattatgacttacgaacttaagcttccccctaaagcgtccttacttcccgggccccctgaagcgtctgaggagttttacatgaccatctatgaggactctgtggccacccatctgactaaaatcctcaatagcgatgagcacgccgtggtaatatcttccgccaaaacgctttgtgagactgtgaaagacttcgtagcgaaggtggaaaagacttacgacaaaacattagagaacgccgtcgtggccgacgccgtggcctctaaatgtagtgtgctgaacgagaagctagagcagttgctgcaagcactgcacacggacagtcaagccgcccccgtcctgcctgggctgtcccccctgatcgttgaagaagatgccgtggagagctccagcgaagaatccctgggggaatcgaaggagcaactcggagacgatgtaaccaagcccagctcccaaaaagccgtgaagccccgggaaatcatgttgcgcgctaactccctcaaaaaagccgtgagacaagtcatagaagaagccggaaaagtaatggatgacccaacagtgcacccctgtgaacccgctaatcagagctccgattatgactcaaccgagaccgacgaatccaaagaggaagcgaaggacgacggcgctaaggagtcaattacggtgaaaacagctccaaggagcccagatgctcgggcctcctacggacacagccagactgactccgttccgggccccgcagtcgccgcaagtaaagagaatcttccagtgctgaacactaggattatatgtccgggactgagggctggcctcgccgctagcatcgccggaagcagtatcataaataagatgctccttgctaacatagacccattcggagcaacgccatttattgacccagatctggattcggttgacgggtacagcgagaagtgcgtgatgaataactactttgggatcggcctggacgcgaagataagccttgagtttaataataaacgcgaggagcacccagaaaagtgtcgctccaggacaaaaaatctcatgtggtacggcgttcttggcacgcgtgagctgctacaaagatcctacaaaaacctcgagcagagggtacagctcgaatgcgacggacagtatattccacttccatccctgcaggggatagccgttctgaacatccccagttatgccggcggaaccaatttctggggcggaactaaagaagatgatatatttgccgcaccttcttttgatgataaaatcctcgaggtggtggctattttcgactcaatgcagatggctgtgtccagggtgattaaactgcagcatcatcggatcgcgcagtgccgcactgttaagatcacaatctttggagacgagggcgtgcccgttcaggtggatggcgaggcatgggtgcaacctcccggcattattaagatcgtgcataaaaatagagcccaaatgctgacgagggatagagccttcgagagtaccctgaaatcttgggaggacaagcagaagtgcgacagcggcaagcccgttctcagaacccatctgtacattcatcatgccatcgatctcgcgaccgaggaggtaagtcagatgcagttgtgcagtcaagcagccgaagaattaatcactcggatctgtgacgcggcgacaattcactgcctcctagagcaggagctggcccatgccgttaatgcgtgcagccacgcactgaataaagccaacccgagatgcccagaatccctgacccgtgatacggccacagagatcgccattaacgtcaaggctttgtataacgagaccgagtccctgttggtgggaagagtgcccttgcagctcgaatccccccacgaggagcgcgtgagtaatgccctgcactccgtcgaagtcgagttgcagaaactaactgagatcccctggctttactatatcctccacccaaacgaagatgaggaaccaccgatggattgcaccaaaagaaacaacaggagcaccgtatttcggatcgtccctaagttcaagaaagaaaaagtgcagaaacaaaaaaccagctcccaacccggaagcggtgacacagaatcgggaagttgtgaggcgaacagcccaggaaactag

SEQ ID NO: 81506 - DNA, 3495 bp, Artificial Sequence
  derived and/or modified sequence
atggcgggtgccggtggacagcaccaccccccaggcgcagccggaggtgcggcagctggagctggagccgcagtaacctctgccgcagcgtccgccggacccggagaggatagtagtgattctgaagcggagcaagaaggaccacagaagctgattaggaaggtatctaccagcgggcaaatccgcacaaaaacctccatcaaagaaggacagctactgaaacaaacctcttcctttcagaggtggaaaaagcgctattttaaactccgtgggaggaccctctactacgccaaggattcaaagagtctcatattcgacgaagttgatctttcagatgcatccgtagcggaagcctcgactaaaaatgctaataattcgttcacaattataactccatttagaagactcatgctctgtgctgagaaccggaaggagatggaagactggattagttccctcaagagcgtacagacgagggagccttatgaagtagcccaattcaacgtggaacatttttccggaatgcacaattggtacgcgtgttcacacgcccgaccaaccttctgcaatgtgtgtagagagtccctgagcggagtgacatcccatggcttatcgtgcgaggtgtgcaagtttaaggcccacaagcgctgtgcagtacgcgctacaaacaactgtaagtggacgactctggcaagtattggcaaagacatcatcgaggatgaagatggcgtggctatgccccatcaatggcttgaggggaacttgcccgtctctgctaaatgcgcggtgtgtgacaagacttgtggatcagtgcttcgcctgcaagactggaagtgtctttggtgtaagacaatggtgcacaccgcctgcaaagatctttatcatccaatctgccctctaggccaatgtaaagttagcattatccctccaattgccctaaatagcaccgatagcgacggcttctgtcgggctacattttccttctgtgtgagccccttattggtgttcgtgaattcaaaatctggtgataatcaaggtgttaaatttctcaggaggtttaaacaattactcaacccagcgcaagtattcgacctgatgaacggcggaccccatctaggcctgagactgtttcaaaagtttgataactttcgcattctggtgtgcggaggagacggatccgtgggctgggtgctatccgagattgacaaacttaacctaaataaacagtgccagttaggagttcttcctctggggaccggaaatgacctcgcgcgagtgctggggtggggcggatcatatgatgacgatacccagctaccacagattctggagaaactcgaacgcgcaagcaccaagatgttagaccggtggagcattatgacatacgaactaaagcttccacccaaggcgagtctcctccctggaccccctgaggccagtgaagaattttacatgacaatttatgaggactcagtcgcgacacatctgaccaagatcctgaacagcgacgagcatgcggtagtgatctcctcagccaagacgctctgtgagacagtcaaagactttgtggcaaaagtagaaaagacctatgataaaaccctagagaacgctgtcgtcgccgacgccgtagcctcaaaatgctctgtgttgaatgaaaaactggaacagctgctgcaggccttacacacagactctcaggcggctcccgtgttaccaggactgtcacctctaatcgtcgaggaagacgccgtggagtcatcctctgaggaatcgcttggcgaatccaaggaacaactgggagatgatgtaaccaagccttcatcccagaaagccgtaaaacctagagagatcatgctgagagcaaactccctgaagaaagcggtccggcaggtcatcgaggaggccggaaaggtcatggacgacccgacagtgcacccttgtgaaccagctaaccaatcatccgattacgacagcactgagacagacgagtctaaagaagaggctaaggacgacggagccaaagaatcaataacagtaaaaacagctcctcgatccccggacgcgcgagcctcttatgggcacagccagacagactccgtgcccggtcctgcagtcgccgcaagcaaggagaatctgcctgtcctaaatactcgcatcatttgtccaggactgcgggcaggactggcagcatcaattgcaggtagcagtattattaataagatgttactggcgaacattgaccccttcggggctaccccctttatcgaccctgatctggattccgtggacggttacagtgaaaaatgcgtcatgaacaattacttcgggataggcctcgatgccaaaatctccctggagttcaacaataagcgcgaggagcaccccgagaaatgcagaagtaggaccaagaatctgatgtggtacggggtgcttgggactagggaactccttcagagatcatacaagaatcttgagcaaagagtgcagttggagtgcgatggccaatacattccgttgccctctcttcagggcattgccgttctgaacattccaagctacgctgggggaacaaacttttggggaggtactaaggaagacgacatcttcgccgcacctagtttcgatgataagattctggaagttgtggcaatctttgatagcatgcagatggctgtgagccgggtaatcaaactgcaacaccatcggattgcccagtgccggacggtgaagatcacaattttcggagacgaaggggtgcctgtccaggtggacggcgaggcatgggtgcagccacccggaatcatcaagatcgtccataaaaatagagcccaaatgttaactagagacagggcatttgagtcgaccctgaaaagctgggaggacaaacagaagtgcgactcaggaaagcccgttttaagaacccacctgtatattcaccatgctattgacttagctactgaagaagtttctcaaatgcagctgtgttcacaggctgcggaggaactgatcaccagaatatgtgatgccgctacaatccattgtctgctggagcaggagctggcccatgccgtgaatgcttgcagtcacgctctgaacaaagcgaaccccagatgcccagaatcgttaacgcgggacacagccacagaaatcgcaattaacgtcaaagcactctacaacgagacagagtccctgctcgtaggcagggtgccgttgcaactggagtccccacatgaagagcgggtctctaacgcattgcatagcgttgaggtggaactgcagaagctgactgaaattccgtggctgtattacatcctgcaccccaacgaggatgaggagcccccaatggattgtaccaaaaggaataaccgaagcaccgttttccggatcgtgcctaagtttaagaaagaaaaagtgcaaaaacagaagaccagcagccagccaggttctggagacactgaaagcggatcatgtgaggccaattctccaggcaactag

SEQ ID NO: 81507 - DNA, 3495 bp, Artificial Sequence
  derived and/or modified sequence
atggctggtgcaggcggacagcatcatccgccaggagcagcaggcggtgctgctgccggtgctggagccgctgtaacctctgccgctgctagcgctggccctggagaggattcgagtgatagtgaagcagagcaagaaggacctcagaagctgatccgcaaagtttccacaagtgggcaaattcgcacaaagacatccatcaaagaaggccagctactcaagcaaacgtcatcttttcaacggtggaagaagaggtacttcaagctcagaggccgaacactgtattatgctaaggacagcaagagcttaatctttgacgaggttgaccttagcgacgcaagcgtcgccgaggccagtacaaaaaacgcgaataattcattcaccataattacacccttccgacgcttaatgctttgtgcagagaataggaaagagatggaagactggataagctcgcttaagtccgtccagacacgggagccttatgaggtcgcccagttcaatgtcgagcactttagcggtatgcataattggtacgcatgttcgcacgcacgccctaccttttgcaacgtgtgtcgcgagtccctgtccggtgtgacgagccacggcctgagctgtgaagtgtgtaaatttaaggcacataaaaggtgcgcagtcagagcaacgaacaactgtaagtggaccacactcgcatctatcggaaaggatataatcgaggatgaagacggtgtggcaatgcctcatcagtggcttgagggtaaccttcccgtctctgccaaatgtgccgtctgtgataaaacatgtggctcagtcctgagactgcaggattggaaatgcctatggtgtaagaccatggtgcacaccgcctgcaaggatctctatcaccccatttgtcccctcggacagtgcaaggtctccattattccccctattgctctgaattccaccgattcggacggtttttgtcgcgcaacattcagcttttgcgtatccccacttctggtattcgtaaatagcaagagcggagacaaccagggggtcaaattccttaggaggtttaaacagcttttgaacccagcccaggtgtttgatttaatgaacggcggaccacatttaggtctcaggttgttccaaaagtttgataactttcggatcctagtctgcgggggtgatggctcagttgggtgggtgctctctgagatagacaagctcaatctgaataagcagtgccaactgggcgttctgcccctgggaacaggaaacgatctcgccagagtgctgggatgggggggttcctacgacgacgatacgcagcttccccaaatattggaaaagctggaaagagcatccacaaaaatgctcgatcgctggtcaattatgacatatgagctcaaattgccacctaaagcttcactgctccccggtcctcctgaagcgagcgaagaattctatatgaccatttatgaggacagcgtcgccacccatctgaccaagatactgaattccgatgaacacgcggtggtgataagttccgctaaaactttgtgcgaaaccgtcaaagacttcgtagccaaggtggagaagacatacgacaaaaccctggaaaacgcagtagtcgccgatgctgtggcaagcaagtgctcagtgctcaatgaaaagctggagcagctattacaggctctacatactgactcccaggcagcccctgtgctccccggtctcagcccactgatcgtcgaagaggatgccgtggagagcagcagcgaggagtcactcggagaatctaaggagcagctgggggacgacgtcacaaagccgtcaagtcagaaagctgtcaaaccacgcgagattatgctcagggccaacagcctgaaaaaggcagtgaggcaagtgatcgaggaggctggaaaggtaatggacgatccgacagtacacccctgtgagccggctaaccagtcaagcgactatgacagcacagagacggacgagagcaaggaggaggctaaggacgatggggctaaagagtcaattacagtcaaaaccgcccctagatcccccgatgccagagcaagctatggacatagtcagaccgactctgtacccggacctgccgtcgccgcaagcaaagaaaacttaccggtactcaatacgaggatcatctgtccgggtcttagggcgggtctcgcagcaagtattgcaggcagctctattattaacaagatgctgcttgcaaatattgatcctttcggagctaccccttttatcgaccccgatctggactctgtagacggatattccgagaaatgtgtgatgaacaattacttcggtatcggactggatgcgaaaatctcactggagttcaataacaagcgcgaagaacatccagagaaatgcagaagccgcaccaagaatttgatgtggtacggtgtccttggcacgcgagagttgttacagcgcagttacaagaacctggagcagagggtccagttggagtgcgacgggcagtatattcccctgccgtcattgcagggcatcgccgtccttaacatccctagctacgctggagggacaaacttctgggggggtacgaaggaggatgacatttttgctgcgccatcattcgacgataaaatcctggaggttgtggcgatttttgatagcatgcagatggccgtgagcagggttataaagctgcagcatcacagaattgcacagtgcagaactgtcaagattaccattttcggcgacgagggtgtgccagtccaggtcgatggggaagcctgggtgcagccacctggaattatcaagatcgtgcataagaatcgcgcacagatgcttacgagagatcgcgctttcgagagtactttaaagagctgggaggacaagcagaaatgcgactccggaaaaccggtgctgcgcacccacctgtacatccaccacgcaattgacctcgccaccgaagaagtgtcgcagatgcagctttgtagccaggctgccgaggagcttattaccagaatctgcgatgccgcaaccattcactgtctgcttgagcaggagttagcccacgcagtgaatgcctgttcacacgccttgaacaaggctaatcctagatgcccggagtctctgacacgggacactgccactgaaattgctattaatgtcaaggcgctgtacaacgaaacagagagcctgctggtggggagggtgccactccagttagaatcaccacatgaggagcgtgtaagcaatgcccttcactctgtggaggtggagctccagaagctgaccgagatcccctggctgtactacatactccaccccaatgaggatgaggagccgccaatggactgcactaaacggaacaatcggagcacagtcttcagaatcgttccaaagttcaagaaagaaaaggtccaaaaacagaaaacgtcctcccaacccggaagtggcgatactgaatcaggctcatgtgaagctaactctccaggcaattag

SEQ ID NO: 81508 - protein, 1100 aa, Artificial Sequence
  derived and/or modified sequence
MLCAENRKEMEDWISSLKSVQTREPYEVAQFNVEHFSGMHNWYACSHARPTFCNVCRESLSGVTSHGLSCEVCKFKAHKRCAVRATNNCKWTTLASIGKDIIEDEDGVAMPHQWLEGNLPVSAKCAVCDKTCGSVLRLQDWKCLWCKTMVHTACKDLYHPICPLGQCKVSIIPPIALNSTDSDGFCRATFSFCVSPLLVFVNSKSGDNQGVKFLRRFKQLLNPAQVFDLMNGGPHLGLRLFQKFDNFRILVCGGDGSVGWVLSEIDKLNLNKQCQLGVLPLGTGNDLARVLGWGGSYDDDTQLPQILEKLERASTKMLDRWSIMTYELKLPPKASLLPGPPEASEEFYMTIYEDSVATHLTKILNSDEHAVVISSAKTLCETVKDFVAKVEKTYDKTLENAVVADAVASKCSVLNEKLEQLLQALHTDSQAAPVLPGLSPLIVEEDAVESSSEESLGESKEQLGDDVTKPSSQKAVKPREIMLRANSLKKAVRQVIEEAGKVMDDPTVHPCEPANQSSDYDSTETDESKEEAKDDGAKESITVKTAPRSPDARASYGHSQTDSVPGPAVAASKENLPVLNTRIICPGLRAGLAASIAGSSIINKMLLANIDPFGATPFIDPDLDSVDGYSEKCVMNNYFGIGLDAKISLEFNNKREEHPEKCRSRTKNLMWYGVLGTRELLQRSYKNLEQRVQLECDGQYIPLPSLQGIAVLNIPSYAGGTNFWGGTKEDDIFAAPSFDDKILEVVAIFDSMQMAVSRVIKLQHHRIAQCRTVKITIFGDEGVPVQVDGEAWVQPPGIIKIVHKNRAQMLTRDRAFESTLKSWEDKQKCDSGKPVLRTHLYIHHAIDLATEEVSQMQLCSQAAEELITRICDAATIHCLLEQELAHAVNACSHALNKANPRCPESLTRDTATEIAINVKALYNETESLLVGRVPLQLESPHEERVSNALHSVEVELQKLTEIPWLYYILHPNEDEEPPMDCTKRNNRSTVFRIVPKFKKEKVQKQKTSSQPVQKWGTEEVAAWLDLLNLGEYKDIFIRHDIRGAELLHLERRDLKNTVGEKRDTKENGKHMDLGIPKVGHVKRILQGIKELGRSTPQSEV

SEQ ID NO: 81509 - DNA, 3303 bp, Artificial Sequence
  derived and/or modified sequence
atgctgtgcgccgagaacagaaaggagatggaggactggatcagcagcctgaagagcgtgcagaccagagagccctacgaggtggcccagttcaacgtggagcacttcagcggcatgcacaactggtacgcctgcagccacgccagacccaccttctgcaacgtgtgcagagagagcctgagcggcgtgaccagccacggcctgagctgcgaggtgtgcaagttcaaggcccacaagagatgcgccgtgagagccaccaacaactgcaagtggaccaccctggccagcatcggcaaggacatcatcgaggacgaggacggcgtggccatgccccaccagtggctggagggcaacctgcccgtgagcgccaagtgcgccgtgtgcgacaagacctgcggcagcgtgctgagactgcaggactggaagtgcctgtggtgcaagaccatggtgcacaccgcctgcaaggacctgtaccaccccatctgccccctgggccagtgcaaggtgagcatcatcccccccatcgccctgaacagcaccgacagcgacggcttctgcagagccaccttcagcttctgcgtgagccccctgctggtgttcgtgaacagcaagagcggcgacaaccagggcgtgaagttcctgagaagattcaagcagctgctgaaccccgcccaggtgttcgacctgatgaacggcggcccccacctgggcctgagactgttccagaagttcgacaacttcagaatcctggtgtgcggcggcgacggcagcgtgggctgggtgctgagcgagatcgacaagctgaacctgaacaagcagtgccagctgggcgtgctgcccctgggcaccggcaacgacctggccagagtgctgggctggggcggcagctacgacgacgacacccagctgccccagatcctggagaagctggagagagccagcaccaagatgctggacagatggagcatcatgacctacgagctgaagctgccccccaaggccagcctgctgcccggcccccccgaggccagcgaggagttctacatgaccatctacgaggacagcgtggccacccacctgaccaagatcctgaacagcgacgagcacgccgtggtgatcagcagcgccaagaccctgtgcgagaccgtgaaggacttcgtggccaaggtggagaagacctacgacaagaccctggagaacgccgtggtggccgacgccgtggccagcaagtgcagcgtgctgaacgagaagctggagcagctgctgcaggccctgcacaccgacagccaggccgcccccgtgctgcccggcctgagccccctgatcgtggaggaggacgccgtggagagcagcagcgaggagagcctgggcgagagcaaggagcagctgggcgacgacgtgaccaagcccagcagccagaaggccgtgaagcccagagagatcatgctgagagccaacagcctgaagaaggccgtgagacaggtgatcgaggaggccggcaaggtgatggacgaccccaccgtgcacccctgcgagcccgccaaccagagcagcgactacgacagcaccgagaccgacgagagcaaggaggaggccaaggacgacggcgccaaggagagcatcaccgtgaagaccgcccccagaagccccgacgccagagccagctacggccacagccagaccgacagcgtgcccggccccgccgtggccgccagcaaggagaacctgcccgtgctgaacaccagaatcatctgccccggcctgagagccggcctggccgccagcatcgccggcagcagcatcatcaacaagatgctgctggccaacatcgaccccttcggcgccacccccttcatcgaccccgacctggacagcgtggacggctacagcgagaagtgcgtgatgaacaactacttcggcatcggcctggacgccaagatcagcctggagttcaacaacaagagagaggagcaccccgagaagtgcagaagcagaaccaagaacctgatgtggtacggcgtgctgggcaccagagagctgctgcagagaagctacaagaacctggagcagagagtgcagctggagtgcgacggccagtacatccccctgcccagcctgcagggcatcgccgtgctgaacatccccagctacgccggcggcaccaacttctggggcggcaccaaggaggacgacatcttcgccgcccccagcttcgacgacaagatcctggaggtggtggccatcttcgacagcatgcagatggccgtgagcagagtgatcaagctgcagcaccacagaatcgcccagtgcagaaccgtgaagatcaccatcttcggcgacgagggcgtgcccgtgcaggtggacggcgaggcctgggtgcagccccccggcatcatcaagatcgtgcacaagaacagagcccagatgctgaccagagacagagccttcgagagcaccctgaagagctgggaggacaagcagaagtgcgacagcggcaagcccgtgctgagaacccacctgtacatccaccacgccatcgacctggccaccgaggaggtgagccagatgcagctgtgcagccaggccgccgaggagctgatcaccagaatctgcgacgccgccaccatccactgcctgctggagcaggagctggcccacgccgtgaacgcctgcagccacgccctgaacaaggccaaccccagatgccccgagagcctgaccagagacaccgccaccgagatcgccatcaacgtgaaggccctgtacaacgagaccgagagcctgctggtgggcagagtgcccctgcagctggagagcccccacgaggagagagtgagcaacgccctgcacagcgtggaggtggagctgcagaagctgaccgagatcccctggctgtactacatcctgcaccccaacgaggacgaggagccccccatggactgcaccaagagaaacaacagaagcaccgtgttcagaatcgtgcccaagttcaagaaggagaaggtgcagaagcagaagaccagcagccagcccgtgcagaagtggggcaccgaggaggtggccgcctggctggacctgctgaacctgggcgagtacaaggacatcttcatcagacacgacatcagaggcgccgagctgctgcacctggagagaagagacctgaagaacaccgtgggcgagaagagagacaccaaggagaacggcaagcacatggacctgggcatccccaaggtgggccacgtgaagagaatcctgcagggcatcaaggagctgggcagaagcaccccccagagcgaggtgtag

SEQ ID NO: 81510 - DNA, 3303 bp, Artificial Sequence
  derived and/or modified sequence
atgttatgtgctgagaatcgtaaggagatggaggactggatctcctcgttaaagtcagtgcagacacgcgaaccgtacgaagtggcacagttcaatgtggagcatttctcagggatgcacaattggtatgcttgttcacacgcgaggccaaccttttgcaacgtgtgtcgggaaagcttaagcggggtgacctctcacggcctttcttgcgaggtttgtaaattcaaggcgcataagaggtgcgccgtgcgtgccactaacaactgcaagtggacaacccttgcctctattggcaaggatatcatagaagacgaggatggcgtagccatgccccaccagtggctggagggaaatttaccagtgagcgcaaaatgtgcagtttgcgataaaacttgcggaagtgtgctgagactgcaggactggaaatgcttgtggtgcaaaacgatggtacataccgcttgcaaggatttgtaccatcctatctgccccctgggacaatgcaaagtcagcatcattccaccaatagctctcaatagtaccgacagcgacggcttctgcagagcaactttctccttttgcgtgtctccactgctggtcttcgtcaacagtaagtcaggggacaatcagggagtgaagtttctgaggagatttaagcagctgctgaatccagctcaggtgtttgatttaatgaatgggggcccccatttgggactgcgcctgtttcagaaattcgataattttagaatcctcgtgtgcggtggcgacggctccgtcggctgggtgctaagtgagatcgataaactgaacctgaataaacagtgtcagttgggcgtgctgcccctaggaacaggcaacgatttggctagagtcctcggatggggcggaagctacgacgacgacacccaactcccgcagatcctcgagaaacttgaacgcgccagtacaaaaatgctggatcgctggtccataatgacatacgaattgaaactgccaccaaaggcgagccttcttccggggccccctgaggcttcagaagagttctatatgactatctacgaagactctgtggctactcatctaactaagattctgaattctgacgagcatgccgttgttattagtagtgcgaaaaccctttgtgaaaccgttaaggacttcgtggcgaaggtcgagaagacgtatgacaaaaccttggaaaacgccgtggttgccgatgctgtagcgtcaaagtgctctgtgctgaatgagaaactcgaacagctgctgcaggccctgcacacagacagccaggcggccccagtactacctggcctgtctcccctgatcgtggaggaagatgctgtggaaagtagctccgaggagtctctgggcgaaagtaaagagcagcttggggacgacgtgaccaaacccagtagtcagaaagcggtgaagccaagggaaataatgcttcgcgcaaacagtttgaaaaaggccgttagacaggtgatcgaggaggcgggcaaagtcatggatgatccaaccgtgcacccctgcgagccagcgaatcagagtagtgattatgattcaaccgaaacagacgagtctaaagaggaagccaaggacgacggagctaaagaatcaataaccgttaaaaccgctcccagaagccctgatgcaagagcttcctatggtcacagccaaacagatagtgtgcccgggcccgctgtggctgcaagtaaagaaaatcttcctgtgctgaacacccgtatcatttgtccagggctgcgggccgggcttgcagcttccattgcggggtcatccatcatcaacaagatgctacttgccaacatcgatccttttggtgctactccatttattgaccccgacctcgattctgttgatggctactctgagaagtgcgtcatgaacaactatttcgggatcggcctggacgccaagatcagccttgaatttaacaataagcgggaagaacaccctgagaaatgccgatctaggaccaaaaacctgatgtggtacggggttttaggcactcgagagctgctgcaacgtagttacaaaaatctggagcagcgggtgcaactggaatgtgacgggcagtatattccactgccatcccttcaaggcattgctgtgctcaacatcccgtcttacgcagggggaacaaatttttggggagggaccaaggaagatgatatttttgctgctcctagctttgacgataagattctggaggtggtggcaatttttgactcaatgcaaatggccgtgtctcgcgtaattaagctgcagcatcatcggatcgctcagtgccggactgtaaagatcactatcttcggcgatgaaggcgtgcctgtccaggtggacggtgaagcttgggtgcagccacctggcattatcaaaattgtgcataagaatagagctcaaatgctcaccagggatagagcttttgagagtaccttaaagtcgtgggaagacaaacagaagtgtgactccggcaagcccgtactccggacgcacctgtatatccatcatgccatagatcttgccaccgaggaggtttcgcaaatgcaactgtgctctcaggccgccgaggaactgattacacggatctgtgacgcggctacaatccactgtttgctggaacaagaacttgctcacgctgtgaatgcctgcagtcatgccctgaacaaggcaaaccctcgctgtccagaatctctcacacgggacacagcaacagagattgcaatcaatgtgaaagccttgtataatgaaacagagagcctgctggtaggaagggtaccgctgcagctagagtcccctcacgaagagcgagtgagcaatgcccttcactccgtggaagtggagctccagaagttgacagaaatcccctggctttattacattttacacccaaatgaagacgaggaacccccaatggactgcactaaacggaacaatcgcagtactgtgttccggattgtcccgaagttcaaaaaagagaaagtgcagaagcaaaaaacctcttctcagccagttcagaagtggggcactgaggaggttgccgcctggcttgatctacttaacctcggcgagtataaagacatcttcattcgccacgatatcaggggcgcagaactgctccatttggagcgaagagacctaaagaacaccgtaggcgaaaaaagagacacgaaggaaaatggcaaacacatggacctcggcatccctaaagtaggccacgttaaacgaatactgcagggaatcaaggagctcggacggagcaccccacaaagcgaagtatag

SEQ ID NO: 81511 - DNA, 3303 bp, Artificial Sequence
  derived and/or modified sequence
atgctgtgtgctgaaaataggaaggagatggaggactggatcagcagcctgaagtctgtgcagacccgggagccctatgaggtggcccagttcaacgtggagcacttcagcggcatgcacaactggtacgcctgcagccacgcccggcccaccttctgcaatgtgtgccgggagagcctgtctggagtgaccagccacggcctgagctgtgaggtgtgcaagttcaaggcccacaagagatgtgctgtgcgggccaccaacaactgcaagtggaccaccctggccagcatcggcaaggacatcattgaagatgaagatggagtggccatgccccaccagtggctggagggcaacctgcctgtgtctgccaagtgtgctgtgtgtgacaagacctgtggctctgtgctgcggctgcaggactggaagtgcctgtggtgcaagaccatggtgcacacagcctgcaaggacctgtaccaccccatctgccccctgggccagtgcaaggtgtccatcatcccccccatcgccctgaacagcacagacagtgatggcttctgccgggccaccttctccttctgtgtgagccccctgctggtgtttgtgaacagcaagagcggggacaaccagggcgtgaagttcctgcggcgcttcaagcagctgctgaacccagcccaggtgtttgacctgatgaatggaggcccccacctgggcctgcggctcttccagaagtttgacaacttccgcatcctggtgtgtggaggagatggctctgtgggctgggtgctgtctgaaattgacaagctgaacctgaacaagcagtgccagctgggcgtgctgcccctgggcactggaaatgacctggcccgggtgctgggctggggcggcagctatgatgatgacacccagctgccccagatcctggagaagctggagcgggccagcaccaagatgctggaccgctggagcatcatgacctatgagctgaagctgccccccaaggccagcctgctgcccggccccccagaggccagcgaggagttctacatgaccatctatgaagattctgtggccacccacctgaccaagatcctgaacagtgatgaacatgctgtggtgatcagcagcgccaagaccctgtgtgagaccgtgaaggactttgtggccaaggtggagaagacctatgacaagaccctggagaatgctgtggtggctgatgctgtggccagcaagtgcagcgtgctgaatgagaagctggagcagctgctgcaggccctgcacacagacagccaggccgcccctgtgctgcccggcctgagccccctcatcgtggaggaggatgctgtggagagcagcagcgaggagagcctgggggagagcaaggagcagctgggagatgatgtgaccaagcccagcagccagaaggctgtgaagccccgggagatcatgctgcgggccaacagcctgaagaaggctgtgcggcaggtgattgaggaggccggcaaggtgatggatgaccccaccgtgcacccctgtgagcccgccaaccagagcagtgactatgacagcacagaaacagatgagagcaaggaggaggccaaggatgatggagccaaggagagcatcaccgtgaagacagcccccaggagcccagatgcccgggccagctatggccacagccagacagattctgtgcccggccctgctgtggccgccagcaaggagaacctgcctgtgctgaacacccgcatcatctgccccggcctgcgggccggcctggccgccagcattgctggcagcagcatcatcaacaagatgctgctggccaacatcgacccctttggagccacccccttcattgatcctgacctggacagcgtggatggctacagcgagaagtgtgtgatgaacaactactttggaattggcctggatgccaagatcagcctggagttcaacaacaagcgggaggagcaccctgagaagtgccgcagcaggaccaagaacctgatgtggtacggcgtgctgggcacccgggagctgctgcagaggagctacaagaacctggagcagagggtgcagctggagtgtgatggccagtacatccccctgcccagcctgcagggcattgctgtgctgaacatccccagctatgctgggggcaccaacttctggggcggcaccaaggaggatgacatctttgctgcccccagctttgatgacaagatcctggaggtggtggccatctttgacagcatgcagatggctgtgtccagggtcatcaagctgcagcaccacagaattgcccagtgcaggacagtgaagatcaccatctttggagatgagggcgtgcctgtgcaggtggatggagaggcctgggtgcagcccccaggcatcatcaagatcgtgcacaagaacagagcccagatgctgacccgggaccgggcctttgagagcaccctgaagtcctgggaggacaagcagaagtgtgacagcggcaagcctgtgctgcggacccacctgtacatccaccacgccatcgacctggccacagaggaggtgtcccagatgcagctgtgcagccaggccgctgaggagctgatcacccgcatctgtgatgctgccaccatccactgcctgctggagcaggagctggcccatgctgtgaatgcctgcagccacgccctgaacaaggccaacccccgctgcccagagagcctgacccgggacacagccacagagatcgccatcaacgtgaaggccctgtacaatgaaacagagagcctgctggtgggccgggtgcccctgcagctggagagcccccatgaggagcgggtgtccaatgccctgcacagcgtggaggtggagctgcagaagctgacagagatcccctggctgtactacatcctgcaccccaatgaagatgaggagccccccatggactgcaccaagaggaacaacagaagcacagtgttcagaattgtgcccaagttcaagaaggagaaggtgcagaagcagaagaccagcagccagcctgtgcagaagtggggcacagaggaggtggccgcctggctggacctgctgaacctgggggagtacaaggacatcttcatcagacatgacatcagaggagctgagctgctgcacctggagcggcgggacctgaagaacacagtgggggagaagagggacaccaaggaaaatggcaagcacatggacctgggcatccccaaggtgggccacgtgaagaggatcctgcagggcatcaaggagctgggccgcagcaccccccagagcgaggtgtag

SEQ ID NO: 81512 - DNA, 3303 bp, Artificial Sequence
  derived and/or modified sequence
atgctgtgcgccgagaaccggaaggagatggaggactggatcagctctctcaagtcggtgcaaacacgggaaccttatgaagtggcccagttcaatgtggagcacttcagcggcatgcacaattggtatgcctgtagccacgctcgacccactttttgtaacgtgtgtcgcgagtctctgtctggggtaacatctcatggcctgagctgcgaagtttgtaaattcaaggctcataaaaggtgcgccgtgagagccactaataattgcaaatggaccaccttggctagcatcggtaaggacatcatcgaagatgaagacggcgtcgcgatgccacatcaatggctggagggaaatcttcccgtctcagccaagtgcgccgtgtgcgataagacatgtgggagtgtgctgcgtctgcaagactggaagtgcctgtggtgcaagacaatggtccatacggcctgcaaagacctgtatcaccctatatgcccattgggccagtgtaaggtgtccatcatcccccctatcgctcttaattctacggactcagatggattctgtcgggcaaccttttctttttgtgtgtcacctctcttggtgttcgtaaattcaaagagcggcgataaccagggcgtgaagtttttacgccggttcaagcagctgttgaaccccgcacaagtgttcgacctcatgaacggtggcccgcatctgggcttaagactgtttcaaaagtttgataactttagaattctagtctgcggaggggatggctctgtggggtgggtgctttcggagattgacaagctgaacctcaacaaacagtgtcagctcggagtgctccccctaggaacaggcaacgacctggctcgggttttgggctggggcggttcctatgacgatgatacccagctgccacaaattctggagaaacttgagagggctagcacgaagatgctggatcgctggtctatcatgacctatgagctgaaactccccccaaaagcctccctcctacccggtcctcccgaggcttccgaagaattctatatgactatatatgaggattcagtagccacccacctgactaaaattttaaattctgatgaacatgcggtggtgatctccagcgcaaagacactctgtgagaccgtgaaggacttcgtcgctaaagttgagaagacatacgataagaccctagagaacgctgtggttgccgacgcggtagcttctaagtgttccgttctgaacgagaaactggagcagctcttgcaagcacttcacacggactcccaagccgcccccgtactacccggactgtccccactaattgtcgaagaagacgcggtggaatcctcttccgaggagtccctcggcgagtcgaaggaacagttaggtgacgacgtcacaaagccgtccagtcagaaggccgtgaagccaagagagataatgttacgggcgaactccctcaaaaaggctgtccgacaagtgatcgaggaggctgggaaagtgatggacgaccctaccgttcatccttgcgagcctgccaatcagagcagcgattatgatagtactgaaacagacgagagtaaggaggaagccaaggacgatggcgccaaagagtcaatcactgtgaaaacagccccacgatcgcccgatgctcgagcatcatatggacactcacagaccgatagcgtaccaggacctgcagtagccgcttccaaagaaaacctgccagtgctcaataccaggatcatctgccctggactgcgtgccggcttggccgcaagcatcgctggttcatcaatcatcaataagatgctgttagccaatattgacccctttggcgctacaccatttattgatccagacctggattccgtggacggatactccgagaagtgcgtgatgaataactattttggaattgggctggacgctaagataagcctagaattcaataacaaacgagaggaacacccagaaaagtgtaggtcccggaccaagaatctgatgtggtacggagttctcggcactcgcgaacttttgcagaggtcatacaagaatctggaacagcgagttcagctagaatgtgatggacagtacattccacttcccagtctgcaaggtattgctgtactgaacatcccctcttatgcaggcggaactaacttttgggggggaacaaaggaagatgacatattcgccgctcccagcttcgacgacaaaatcctcgaggttgtcgctatctttgactctatgcaaatggcagtttcaagggtgattaaattacagcatcacaggatcgctcagtgtcggacggtcaaaattacaatattcggtgatgagggggtgccggtccaggtcgacggggaggcctgggtgcagcctcctggcataattaagatcgtgcacaaaaaccgcgcccaaatgctcactcgcgacagagctttcgagtccaccttgaagagttgggaggacaaacagaagtgcgattccggaaaacctgtcctgcgaacacatctatacatccatcatgccatcgatttggcaacagaagaggttagccagatgcagctatgcagccaagccgccgaagaactcattaccaggatatgcgatgctgcaactatccactgtctcttggagcaggagctggcccatgctgtgaatgcatgctcccatgcactgaataaagctaatcctagatgtcccgagtcactaacccgggataccgccaccgaaattgccataaacgtgaaagctctgtacaacgagacggagtccctactggtgggtcgagtcccattacaactggagtcgcctcacgaggaaagggtctctaatgccttgcattctgttgaagtggaacttcagaagttaactgagattccctggctgtactacattctccaccccaatgaggatgaggagcctccaatggattgcactaaaagaaataacaggtcaaccgtgtttaggattgtgcccaagtttaaaaaggaaaaggtgcagaagcagaagacttcgtcacaacccgttcagaagtgggggactgaagaggtcgccgcttggctggatctccttaaccttggtgagtacaaagacatattcatacggcatgacatccggggagcggaactgctgcatctggagaggcgcgacctcaaaaataccgttggagagaagcgagatacaaaagagaacggaaagcacatggacttggggattcctaaagtaggccacgtcaaacgcatattacagggtattaaagagctgggaagatccactccgcaaagtgaagtatag

SEQ ID NO: 81513 - DNA, 3303 bp, Artificial Sequence
  derived and/or modified sequence
atgctgtgcgcagagaataggaaggagatggaagattggatcagcagccttaagtccgtgcagaccagggagccatatgaagttgctcagttcaatgtcgagcacttctctggtatgcacaactggtacgcctgttctcatgcaaggccaactttttgcaacgtgtgccgggagtctctctctggagtcacaagccacggcttatcctgtgaggtgtgcaaatttaaagcccataaacggtgcgcggttcgcgctaccaataattgcaagtggacgacattagccagtatcggcaaagacatcatcgaagatgaggatggtgtggccatgccccatcaatggctagaaggaaatctaccagtctctgccaagtgcgcagtgtgcgataaaacctgcggtagtgtgttgagactccaggactggaagtgtctctggtgcaaaacgatggtccataccgcctgtaaagatctttatcaccccatttgcccattaggccagtgtaaagtcagcatcatcccacccatcgctctcaactctaccgactcggacggtttttgtagagcgaccttcagcttttgcgtgtctccactgttggtttttgtgaactccaagtcgggtgataatcaaggggtaaagtttctgcggagattcaagcagctgctgaaccccgcacaggtgttcgacttgatgaacggcggtcctcacctcgggctcaggctgtttcagaagttcgataactttaggatattggtgtgcggcggtgacggaagcgtggggtgggttttgagtgagatagataaactgaacttaaataagcagtgccaactgggggtactaccattgggtaccggcaacgacctggcaagagtgctgggctgggggggaagttacgatgacgacacccagctgccccagatcctggaaaaattggaaagggcgtctactaagatgctggacaggtggagcatcatgacctatgagctgaaattaccccctaaggcgtcattgctcccgggaccgcctgaagcctccgaggaattctacatgacaatctacgaagactccgtggccacccatttaaccaaaatcttgaattccgacgagcacgccgtggtcatcagttcggcaaagaccctgtgcgaaaccgtaaaagattttgtggcgaaagtggagaaaacatatgataagactctggagaatgctgttgtggcagatgccgtagccagtaaatgcagcgtattaaatgaaaaattagagcagctactgcaggcgctgcacactgactcacaggccgcacctgtacttccgggactaagccccttgatagtggaggaggacgctgtggagtccagctcagaagagtcactcggggagagcaaggaacagcttggcgacgacgtgaccaaaccctcctcacagaaggcggtcaagcccagggaaatcatgctaagagcgaactcccttaagaaggccgttcgccaagtcattgaggaggccggaaaggttatggacgatccaacagtgcatccctgtgagcccgctaaccagtctagcgattacgatagtacagagacggacgaaagtaaagaagaggcaaaggacgacggcgctaaggaaagtatcaccgtgaaaactgcacccagatcaccagacgcacgtgcctcttatggccatagccagactgacagcgttcctggacctgcggtggccgcttcaaaagaaaatctgcccgtcctgaacacgaggattatatgccctggcctccgggctggactggccgcatctatagccggttccagcatcataaataagatgctgctggccaatattgatccattcggcgcaaccccttttatagaccccgacctggacagcgtggacggttacagcgaaaaatgcgtgatgaataattacttcggcatcggtctggatgccaaaatttcattagaattcaataataaacgcgaagagcaccccgaaaaatgtcgcagtcggactaaaaatctgatgtggtatggcgtgctcgggactagagagttgctccagcggtcttacaagaacctggagcagcgagtgcagctcgagtgcgacggtcagtatattccactgccttcattacaaggcatcgccgtgttgaacatcccatcgtacgcaggagggaccaacttttggggcggtaccaaagaagacgatatcttcgccgcacctagctttgacgacaagattttggaagtcgttgctatattcgacagcatgcagatggcggtctctcgggtgattaagctccagcaccacaggattgcccagtgcagaactgtcaagataactatttttggcgacgagggcgtgcctgtacaggtggatggggaggcatgggtgcagccaccgggtataatcaagatagtccacaagaaccgggcacaaatgctgacacgcgatagagcctttgagtctacactgaaaagttgggaggacaagcagaaatgcgacagtgggaagccagtcctgcgtacccacctctacatccatcatgcaatagatctggctactgaggaggtcagtcagatgcagctgtgttctcaggcggctgaagagctcatcactagaatctgtgacgcagctacaattcactgtctactggagcaggaactcgcccacgccgtcaatgcatgctcgcacgccctcaataaagccaatccaaggtgtcctgagagcctgactagggataccgctacggaaatcgccatcaatgttaaagctctatacaatgagacagagtctcttttggttggccgagttcccctccagctcgaatcccctcacgaggagcgagtgagtaacgctttacatagtgtggaggtggagctccaaaagcttacagagatcccctggctttattatatcctgcatccaaatgaggacgaggagccacccatggactgcacgaagagaaataacaggtccactgtgttcagaattgttccaaaatttaagaaggaaaaggtgcagaagcagaagacctcatcccagccggttcaaaagtggggaaccgaggaggtcgctgcctggttggaccttctgaacctcggagaatacaaagatatttttatcagacacgacatcagaggcgcagaattgctgcatttggaacggcgagatctcaagaacacagtgggggaaaagcgggacaccaaagagaatggcaaacatatggatttgggaatccccaaggtcggacacgtcaaaagaatcctgcagggtatcaaagaactgggaaggagtactccacagtcagaagtctag

SEQ ID NO: 81514 - DNA, 3255 bp, Artificial Sequence
  derived and/or modified sequence
atgctgtgcgccgagaacagaaaggagatggaggactggatcagcagcctgaagagcgtgcagaccagagagccctacgaggtggcccagttcaacgtggagcacttcagcggcatgcacaactggtacgcctgcagccacgccagacccaccttctgcaacgtgtgcagagagagcctgagcggcgtgaccagccacggcctgagctgcgaggtgtgcaagttcaaggcccacaagagatgcgccgtgagagccaccaacaactgcaagtggaccaccctggccagcatcggcaaggacatcatcgaggacgaggacggcgtggccatgccccaccagtggctggagggcaacctgcccgtgagcgccaagtgcgccgtgtgcgacaagacctgcggcagcgtgctgagactgcaggactggaagtgcctgtggtgcaagaccatggtgcacaccgcctgcaaggacctgtaccaccccatctgccccctgggccagtgcaaggtgagcatcatcccccccatcgccctgaacagcaccgacagcgacggcttctgcagagccaccttcagcttctgcgtgagccccctgctggtgttcgtgaacagcaagagcggcgacaaccagggcgtgaagttcctgagaagattcaagcagctgctgaaccccgcccaggtgttcgacctgatgaacggcggcccccacctgggcctgagactgttccagaagttcgacaacttcagaatcctggtgtgcggcggcgacggcagcgtgggctgggtgctgagcgagatcgacaagctgaacctgaacaagcagtgccagctgggcgtgctgcccctgggcaccggcaacgacctggccagagtgctgggctggggcggcagctacgacgacgacacccagctgccccagatcctggagaagctggagagagccagcaccaagatgctggacagatggagcatcatgacctacgagctgaagctgccccccaaggccagcctgctgcccggcccccccgaggccagcgaggagttctacatgaccatctacgaggacagcgtggccacccacctgaccaagatcctgaacagcgacgagcacgccgtggtgatcagcagcgccaagaccctgtgcgagaccgtgaaggacttcgtggccaaggtggagaagacctacgacaagaccctggagaacgccgtggtggccgacgccgtggccagcaagtgcagcgtgctgaacgagaagctggagcagctgctgcaggccctgcacaccgacagccaggccgcccccgtgctgcccggcctgagccccctgatcgtggaggaggacgccgtggagagcagcagcgaggagagcctgggcgagagcaaggagcagctgggcgacgacgtgaccaagcccagcagccagaaggccgtgaagcccagagagatcatgctgagagccaacagcctgaagaaggccgtgagacaggtgatcgaggaggccggcaaggtgatggacgaccccaccgtgcacccctgcgagcccgccaaccagagcagcgactacgacagcaccgagaccgacgagagcaaggaggaggccaaggacgacggcgccaaggagagcatcaccgtgaagaccgcccccagaagccccgacgccagagccagctacggccacagccagaccgacagcgtgcccggccccgccgtggccgccagcaaggagaacctgcccgtgctgaacaccagaatcatctgccccggcctgagagccggcctggccgccagcatcgccggcagcagcatcatcaacaagatgctgctggccaacatcgaccccttcggcgccacccccttcatcgaccccgacctggacagcgtggacggctacagcgagaagtgcgtgatgaacaactacttcggcatcggcctggacgccaagatcagcctggagttcaacaacaagagagaggagcaccccgagaagtgcagaagcagaaccaagaacctgatgtggtacggcgtgctgggcaccagagagctgctgcagagaagctacaagaacctggagcagagagtgcagctggagtgcgacggccagtacatccccctgcccagcctgcagggcatcgccgtgctgaacatccccagctacgccggcggcaccaacttctggggcggcaccaaggaggacgacatcttcgccgcccccagcttcgacgacaagatcctggaggtggtggccatcttcgacagcatgcagatggccgtgagcagagtgatcaagctgcagcaccacagaatcgcccagtgcagaaccgtgaagatcaccatcttcggcgacgagggcgtgcccgtgcaggtggacggcgaggcctgggtgcagccccccggcatcatcaagatcgtgcacaagaacagagcccagatgctgaccagagacagagccttcgagagcaccctgaagagctgggaggacaagcagaagtgcgacagcggcaagcccgtgctgagaacccacctgtacatccaccacgccatcgacctggccaccgaggaggtgagccagatgcagctgtgcagccaggccgccgaggagctgatcaccagaatctgcgacgccgccaccatccactgcctgctggagcaggagctggcccacgccgtgaacgcctgcagccacgccctgaacaaggccaaccccagatgccccgagagcctgaccagagacaccgccaccgagatcgccatcaacgtgaaggccctgtacaacgagaccgagagcctgctggtgggcagagtgcccctgcagctggagagcccccacgaggagagagtgagcaacgccctgcacagcgtggaggtggagctgcagaagctgaccgagatcccctggctgtactacatcctgcaccccaacgaggacgaggagccccccatggactgcaccaagagaaacaacagaagcaccgtgttcagaatcgtgcccaagttcaagaaggagaaggtgcagaagcagaagaccagcagccagcccgtgcagaagtggggcaccgaggaggtggccgcctggctggacctgctgaacctgggcgagtacaaggacatcttcatcagacacgacatcagaggcgccgagctgctgcacctggagagaagagacctgaaggacctgggcatccccaaggtgggccacgtgaagagaatcctgcagggcatcaaggagctgggcagaagcaccccccagagcgaggtgtag

SEQ ID NO: 81515 - DNA, 3255 bp, Artificial Sequence
  derived and/or modified sequence
atgctgtgcgccgaaaatagaaaggaaatggaagactggataagctcgctaaaaagcgttcaaacccgcgagccgtacgaggtggcgcagttcaacgtggaacacttttcaggcatgcataactggtatgcctgtagccacgccagaccaaccttttgtaacgtgtgcagagagagcctgtcaggagtcacctctcacggactgagctgtgaagtgtgcaaattcaaggcccacaagcgttgtgccgtgagggccaccaacaattgtaagtggactaccctagccagcatcggtaaagacataatagaagacgaagatggcgtcgcgatgccgcaccagtggttggaaggcaacctcccggtgtccgcaaaatgcgctgtttgcgataaaacctgcggctcggttctgagactccaggattggaagtgcttatggtgtaagaccatggtgcacaccgcctgcaaagatctctatcaccccatttgtccactgggacaatgcaaagtgtccatcattcccccaattgccctgaactcaacagactctgatggcttctgtcgtgccaccttcagtttctgcgtgagccctctgctcgtgttcgtcaatagtaaatccggcgacaaccagggggtaaaatttcttcgccgtttcaagcagcttttaaaccctgcccaggtgtttgatctgatgaatggaggaccacacctcgggctgagactatttcagaagttcgataattttcggattctggtctgtggtggagatgggtccgtgggatgggtcttgagcgaaatcgacaagctaaatctgaacaaacagtgtcagctaggcgttctgcccctggggacagggaacgacctggcaagggtccttggttggggcggatcttacgatgatgatacacagctgccccaaatactcgaaaaactcgagcgcgccagtaccaagatgttagatcggtggagcattatgacatacgagctgaaactgcctccaaaggcttcgcttctgccaggcccacccgaggctagtgaagagttttatatgactatctatgaagactccgtggcgacccatctgacaaaaattctgaattcagatgaacatgccgtggtgatttccagcgcgaaaaccctgtgcgaaacagtaaaggacttcgtagccaaagtcgaaaaaacatatgataagactttagagaacgctgttgtggccgacgcagtcgcaagcaagtgtagcgtgctgaatgagaagttggagcagttgctgcaggccttacacacagactctcaggccgcgcctgtgctccccgggctcagtccacttatagttgaagaggatgccgttgagagctcaagcgaggagagtctgggggaatccaaagagcagttgggtgacgacgttaccaagccatctagtcagaaggcggttaagccacgcgaaatcatgttgcgcgcaaatagcctcaaaaaggccgtgcggcaggtaatagaggaggcggggaaggtgatggacgatcccacagtgcatccctgtgaaccggccaaccagagcagcgattatgattcgaccgaaacagatgaatccaaagaggaggcgaaggatgacggcgcaaaagaaagtataaccgtgaaaaccgccccaagatcacccgacgccagagcatcttatgggcactcccagacggacagcgttcccggccctgccgttgccgcatcaaaagaaaatttgcccgttctgaatacaagaatcatctgcccagggcttagagccggcctggcagcttctattgccgggtctagtatcataaacaagatgctcctggctaacatcgatcccttcggggctactcctttcatagatcctgacttagactctgtggacggatattccgagaagtgtgtgatgaataactattttggaatcgggttggatgcgaagatctcgcttgagttcaacaacaagcgcgaagagcacccagagaagtgtcgatcacgcaccaaaaatcttatgtggtacggcgtcctcggcacacgcgagcttctccaaagatcgtataaaaatttggaacagcgcgtccagctcgagtgtgacggccagtacattcctttacctagcctgcaaggaatcgccgtgctgaacataccaagttatgcgggaggcactaacttctggggcggcactaaggaggacgacatatttgccgctcccagttttgacgacaagatccttgaggttgtggctatctttgactcaatgcaaatggcagtgtcccgtgtgatcaagctgcagcaccaccggatcgcacagtgcaggacggtcaaaataacaattttcggagacgagggcgtcccagtccaggtcgacggcgaagcttgggtgcagcctccaggtattatcaagatcgtccacaagaatagagcacagatgctgacccgggaccgcgcgtttgaaagtacacttaagtcatgggaggacaagcagaaatgcgattcgggcaaaccggttctccgaacacacctttacatacaccatgcaatcgatctggccacagaggaagtgagccagatgcagttgtgctctcaggccgctgaggagctcattacaagaatttgcgatgctgccacaattcattgcttgctcgagcaagaactcgctcatgctgtgaacgcatgttcccatgctttgaataaggctaatcccagatgccccgaatctctgaccagagataccgccacggagatagctattaatgtaaaggcactttataacgagaccgagtcattgctggtcggtagggtgcctcttcaattggagtctccacatgaagaaagagtgagcaacgcattgcactcagttgaggtcgaattacagaagctgaccgaaatcccgtggttgtattatattctgcatcctaatgaggatgaggagcctccaatggactgcactaaaaggaacaacagatccaccgtgttcagaatcgtgccaaaatttaagaaagagaaagttcagaagcagaagacttcatctcagcccgtgcaaaaatggggcacagaggaagtcgcagcctggctcgatttgctcaacctcggggagtacaaagatattttcattagacacgacatcaggggagcggagttattacatcttgaacggcgcgacttaaaggatcttggtatcccgaaggttggccacgttaagcggatcctccagggcataaaagagctcggaagatccacaccccagtctgaagtctag

SEQ ID NO: 81516 - DNA, 3255 bp, Artificial Sequence
  derived and/or modified sequence
atgctgtgtgctgaaaataggaaggagatggaggactggatcagcagcctgaagtctgtgcagacccgggagccctatgaggtggcccagttcaacgtggagcacttcagcggcatgcacaactggtacgcctgcagccacgcccggcccaccttctgcaatgtgtgccgggagagcctgtctggagtgaccagccacggcctgagctgtgaggtgtgcaagttcaaggcccacaagagatgtgctgtgcgggccaccaacaactgcaagtggaccaccctggccagcatcggcaaggacatcattgaagatgaagatggagtggccatgccccaccagtggctggagggcaacctgcctgtgtctgccaagtgtgctgtgtgtgacaagacctgtggctctgtgctgcggctgcaggactggaagtgcctgtggtgcaagaccatggtgcacacagcctgcaaggacctgtaccaccccatctgccccctgggccagtgcaaggtgtccatcatcccccccatcgccctgaacagcacagacagtgatggcttctgccgggccaccttctccttctgtgtgagccccctgctggtgtttgtgaacagcaagagcggggacaaccagggcgtgaagttcctgcggcgcttcaagcagctgctgaacccagcccaggtgtttgacctgatgaatggaggcccccacctgggcctgcggctcttccagaagtttgacaacttccgcatcctggtgtgtggaggagatggctctgtgggctgggtgctgtctgaaattgacaagctgaacctgaacaagcagtgccagctgggcgtgctgcccctgggcactggaaatgacctggcccgggtgctgggctggggcggcagctatgatgatgacacccagctgccccagatcctggagaagctggagcgggccagcaccaagatgctggaccgctggagcatcatgacctatgagctgaagctgccccccaaggccagcctgctgcccggccccccagaggccagcgaggagttctacatgaccatctatgaagattctgtggccacccacctgaccaagatcctgaacagtgatgaacatgctgtggtgatcagcagcgccaagaccctgtgtgagaccgtgaaggactttgtggccaaggtggagaagacctatgacaagaccctggagaatgctgtggtggctgatgctgtggccagcaagtgcagcgtgctgaatgagaagctggagcagctgctgcaggccctgcacacagacagccaggccgcccctgtgctgcccggcctgagccccctcatcgtggaggaggatgctgtggagagcagcagcgaggagagcctgggggagagcaaggagcagctgggagatgatgtgaccaagcccagcagccagaaggctgtgaagccccgggagatcatgctgcgggccaacagcctgaagaaggctgtgcggcaggtgattgaggaggccggcaaggtgatggatgaccccaccgtgcacccctgtgagcccgccaaccagagcagtgactatgacagcacagaaacagatgagagcaaggaggaggccaaggatgatggagccaaggagagcatcaccgtgaagacagcccccaggagcccagatgcccgggccagctatggccacagccagacagattctgtgcccggccctgctgtggccgccagcaaggagaacctgcctgtgctgaacacccgcatcatctgccccggcctgcgggccggcctggccgccagcattgctggcagcagcatcatcaacaagatgctgctggccaacatcgacccctttggagccacccccttcattgatcctgacctggacagcgtggatggctacagcgagaagtgtgtgatgaacaactactttggaattggcctggatgccaagatcagcctggagttcaacaacaagcgggaggagcaccctgagaagtgccgcagcaggaccaagaacctgatgtggtacggcgtgctgggcacccgggagctgctgcagaggagctacaagaacctggagcagagggtgcagctggagtgtgatggccagtacatccccctgcccagcctgcagggcattgctgtgctgaacatccccagctatgctgggggcaccaacttctggggcggcaccaaggaggatgacatctttgctgcccccagctttgatgacaagatcctggaggtggtggccatctttgacagcatgcagatggctgtgtccagggtcatcaagctgcagcaccacagaattgcccagtgcaggacagtgaagatcaccatctttggagatgagggcgtgcctgtgcaggtggatggagaggcctgggtgcagcccccaggcatcatcaagatcgtgcacaagaacagagcccagatgctgacccgggaccgggcctttgagagcaccctgaagtcctgggaggacaagcagaagtgtgacagcggcaagcctgtgctgcggacccacctgtacatccaccacgccatcgacctggccacagaggaggtgtcccagatgcagctgtgcagccaggccgctgaggagctgatcacccgcatctgtgatgctgccaccatccactgcctgctggagcaggagctggcccatgctgtgaatgcctgcagccacgccctgaacaaggccaacccccgctgcccagagagcctgacccgggacacagccacagagatcgccatcaacgtgaaggccctgtacaatgaaacagagagcctgctggtgggccgggtgcccctgcagctggagagcccccatgaggagcgggtgtccaatgccctgcacagcgtggaggtggagctgcagaagctgacagagatcccctggctgtactacatcctgcaccccaatgaagatgaggagccccccatggactgcaccaagaggaacaacagaagcacagtgttcagaattgtgcccaagttcaagaaggagaaggtgcagaagcagaagaccagcagccagcctgtgcagaagtggggcacagaggaggtggccgcctggctggacctgctgaacctgggggagtacaaggacatcttcatcagacatgacatcagaggagctgagctgctgcacctggagcggcgggacctgaaggacctgggcatccccaaggtgggccacgtgaagaggatcctgcagggcatcaaggagctgggccgcagcaccccccagagcgaggtgtag

SEQ ID NO: 81517 - DNA, 3255 bp, Artificial Sequence
  derived and/or modified sequence
atgctgtgcgccgagaaccggaaggagatggaggactggatcagcagccttaaaagcgtacagacccgtgagccctacgaagtggcacagtttaacgtggaacatttcagcggcatgcacaactggtacgcctgcagccacgcaaggccgactttttgtaatgtgtgccgcgaaagcttgtcaggcgtgacatcccacggactgtcttgcgaagtctgtaagtttaaggctcacaaacggtgtgccgttcgtgcaaccaacaattgcaaatggacaacgctggcttctattggcaaggacatcatcgaggacgaggatggggtcgcaatgcctcatcagtggctggaaggcaacctgcccgtgagcgcgaagtgcgccgtttgtgacaaaacgtgcggatccgttctgcgactgcaagactggaagtgcctgtggtgcaagaccatggtccacaccgcatgcaaggacctgtatcaccctatctgtcccttgggccagtgcaaggtgagcatcatccctcccatcgcattgaattctacagacagtgacggcttctgcagggcaacattctccttttgtgtgtctcccttactggtatttgtgaactcaaaatcaggagacaatcagggcgtgaagtttcttaggcggttcaagcaactccttaatcccgcgcaagtgtttgatctgatgaacggcggcccacacctcggcctgaggctctttcagaagttcgacaactttaggattctggtgtgcggtggagacggcagcgtcggctgggtgctcagcgagatcgacaagcttaatctcaataagcaatgtcagctgggggtgctgccactaggaacaggaaacgaccttgcccgagtgctgggctggggcgggtcatatgatgacgacacacagttgccacagatcttagagaaactggaaagagcctccactaaaatgctcgaccgctggtccatcatgacctacgaactgaaactgccccctaaggcctccctcctgcccggcccacccgaagccagtgaagagttctacatgacaatctatgaagacagcgtggccacccacctcaccaagatcctgaactccgatgagcatgctgtggtgatttcatctgccaagactctttgcgagacagttaaagacttcgtcgccaaggtggaaaaaacatatgataaaacactggagaatgccgtggtagctgacgctgtcgctagcaagtgctccgtccttaatgaaaagctggaacagctcctccaggcacttcatactgacagccaagccgcacccgttctgcccggcctgtcaccactgattgtagaggaagatgctgttgaatctagttcagaagagagcctgggggagtctaaggaacagcttggcgatgatgtcacaaaacctagttctcaaaaggccgtgaaaccacgtgagatcatgctgagggccaacagtcttaaaaaagccgtaagacaggttatcgaagaggccggcaaagtcatggacgaccctacggttcatccatgcgaacccgccaaccagtcttccgattatgactccaccgaaacagacgaatcgaaagaagaggctaaagacgacggggcaaaggagagcattacagtgaaaacagctcctaggtcacctgacgccagagcttcttacggccactcacagaccgactcagtcccaggccccgccgtggctgcctctaaagaaaatcttccggttctaaacacgcggataatatgcccaggtctccgggctggcctggctgcatcgatcgccgggtcaagtattattaacaagatgctgctggctaatattgatccatttggagccacccccttcatagatccagacttggactccgtggatggttattcagagaagtgtgtgatgaacaactattttggaatcggccttgacgcaaaaatctctcttgagttcaacaacaaacgcgaggagcacccagagaagtgtagatctcgaactaaaaatcttatgtggtacggcgtgcttggcacacgggagctgttgcagcgtagctacaaaaacctggagcagagagtccagctggaatgtgatggtcagtatattcccttgccctccctgcagggaatcgcggtgcttaacataccctcatatgccgggggtacgaatttttgggggggcacaaaagaggatgacattttcgcggcaccaagttttgatgataagatcctggaggtggttgcgattttcgactccatgcaaatggccgtttctcgagtgatcaagctgcagcaccaccgaattgcacagtgtcggacggtaaaaatcactattttcggagatgagggtgtcccagtacaggtggacggggaagcctgggtacagcccccaggaattataaagattgtccataagaacagagcccagatgctgactagggatagggcctttgaatccaccctcaagagttgggaagataagcagaaatgtgactctggcaaacctgtactgcgcacgcacctgtatatccatcatgccatcgacctcgccacagaagaagtaagtcagatgcagctttgttctcaggcagccgaagaattaatcactcggatttgtgacgccgccacaatacactgcctgctcgaacaagaactggcacacgccgtgaatgcttgtagccacgcgctgaacaaggcgaacccccgatgccccgagtctctgacaagagacacagctacggaaatcgcaatcaacgtcaaagccctgtacaatgaaacagaatccctgctggtcggacgtgtgcccctacagctcgaaagtccccatgaagagagagttagcaatgctctgcacagtgtagaggtggagctccaaaagctcaccgaaatcccttggttgtattacatcctgcacccgaacgaggatgaagagcccccaatggattgcacgaaacgcaataaccgatccaccgtgttcaggattgtgcctaagttcaagaaggagaaggttcaaaagcagaaaacttcctcccagcctgtccagaagtggggaacagaggaagttgccgcctggttggatctgctcaatttgggtgagtacaaagacatcttcatccggcacgacatcaggggcgccgaattgcttcatctagagagacgtgatcttaaagaccttggcatacccaaggtgggccacgtgaagaggattctgcagggtattaaggaactcggtcggtctacccctcagtcagaggtgtag

SEQ ID NO: 81518 - DNA, 3255 bp, Artificial Sequence
  derived and/or modified sequence
atgctttgcgctgaaaaccgcaaagagatggaggactggattagcagtctgaaaagtgtacagaccagggaaccatatgaagtagcgcaattcaatgtcgagcactttagcgggatgcacaattggtatgcctgttctcatgcacgtcccactttctgcaacgtgtgccgagaatcattgtccggtgtaacttcacacggtctatcgtgcgaagtgtgtaagtttaaagctcacaagcgctgcgctgtgcgggcaactaacaactgcaagtggactacactggcatccattggcaaagatatcatcgaggatgaggatggtgttgccatgcctcaccagtggctggagggtaatctgccggtctccgccaagtgcgctgtgtgcgacaaaacctgcggctcagtcctacggttacaagactggaagtgcctgtggtgcaagacgatggtacacactgcatgcaaagacttgtaccatcccatttgccctctgggacaatgcaaggtgtctataatccctccgattgccctcaactctaccgatagcgacgggttttgccgcgctaccttttctttttgcgtatcccccctactcgtgttcgtcaatagcaagagcggcgataatcagggcgtgaagtttctccggagattcaagcaacttctcaaccctgcacaggtgtttgatctgatgaacgggggtccacatcttggcctgaggctgttccaaaagttcgacaatttcagaatcttggtctgcgggggtgatggcagcgtggggtgggtgctgagcgaaattgataagctgaacctgaataagcagtgtcaactaggggtgctgccactaggcaccgggaacgatctggccagggtactcggctggggagggagctacgacgatgacacacagttaccccagatcctagaaaagctggagcgcgcttcaactaagatgctggaccggtggagcatcatgacttatgagctgaagttgcctcccaaggcctctctgctgcctggtccccctgaggcatccgaggagttctacatgactatttatgaggacagcgtcgccacccacttgactaaaatacttaacagtgatgagcacgctgtcgtgatcagctcagctaaaaccttatgtgagaccgtcaaggactttgtagccaaagtggagaaaacatacgacaagaccctagagaacgcggtagtagcggacgccgtggcgtccaagtgctctgtgctgaacgaaaagctcgaacaattactccaggccctgcataccgacagccaggccgctcctgtcctgcctggcttgagtcccctgatagtggaggaagatgccgtggagtcttcatcagaagagtcactgggcgagtcaaaagagcagctgggcgatgacgtgaccaaaccgtcatcacagaaggcagtaaaaccaagagaaattatgctgcgggcaaatagtctcaagaaagctgtgaggcaggtgattgaagaggccggtaaggtcatggacgatccaaccgtacacccttgtgaacccgctaatcaatcatcagattatgattccactgaaaccgatgagagtaaagaagaagcgaaagatgatggcgcaaaggagtctattaccgtaaagactgctcccagatcccctgatgcccgtgctagttacgggcactcacaaacggattcagtcccaggcccagctgttgcagccagcaaggagaacctgccagtcctgaatacaagaatcatctgcccgggtctccgcgctggtctggctgcctcaatcgcagggtcctctattattaataagatgctattggcaaacattgaccccttcggcgctacccctttcatagatcctgatttggacagcgtagatgggtactcagaaaagtgcgttatgaacaattacttcgggatcgggctggacgccaaaatctctctcgagttcaacaataagcgggaagagcatcccgaaaaatgccgttcaagaacaaagaacctcatgtggtacggggttctcggcaccagggaattgctgcagcggagctacaagaacctggagcagagagtccaactcgaatgcgatggccaatatattcccctgccgtccctgcagggcatcgctgtgttgaacataccaagctacgcaggcggtactaatttctggggcggaactaaagaggatgacatctttgccgcaccttcatttgacgataagatccttgaggtggtcgcgatattcgattctatgcagatggccgtcagccgggtgatcaaactgcagcaccacagaatcgcacaatgcagaacagtgaagataacaatttttggcgacgagggggtgcccgtgcaggttgacggggaagcgtgggtgcaaccccctggtattataaagattgttcacaaaaatcgggctcagatgcttaccagagatcgggcttttgagtctacccttaaatcctgggaagacaagcagaagtgcgactccggaaaacccgtgttgcgcacacacctatacattcaccacgccattgacttggccaccgaggaggtgagccagatgcagctgtgctctcaggcggctgaagaattaatcacccggatctgcgacgctgccaccatacattgtcttctagagcaggaactcgcccacgcagtgaatgcctgcagtcacgcccttaataaggccaaccctcgctgcccagagtctcttacacgggataccgcaacagaaatcgccatcaatgtgaaagccctgtacaacgagacagagtctctgctggtgggccgagtcccgctgcagctagaatctccacacgaggagagggtgtccaatgcgctgcattctgtggaggttgaactgcagaaactgaccgagattccgtggctctactatatcctgcacccaaatgaggatgaggagcctcccatggattgcactaagcggaacaatcgttcaactgtgttcagaattgtccccaagttcaaaaaggagaaggttcagaagcaaaaaacaagcagtcagccggtccagaaatgggggactgaagaagtcgctgcctggctagaccttctgaacctgggtgagtacaaggacatctttatccgacacgacattaggggggcagagctcctgcacctcgaaagacgtgacctgaaggatctgggaatccctaaagtcgggcatgtgaaacgaatacttcaaggtattaaagagctcggacgttctacgccccagtctgaggtgtag

SEQ ID NO: 81519 - protein, 341 aa, Artificial Sequence
  derived and/or modified sequence
MSASQDSRSRDNGPDGMEPEGVIESNWNEIVDSFDDMNLSESLLRGIYAYGFEKPSAIQQRAILPCIKGYDVIAQAQSGTGKTATFAISILQQIELDLKATQALVLAPTRELAQQIQKVVMALGDYMGASCHACIGGTNVRAEVQKLQMEAPHIIVGTPGRVFDMLNRRYLSPKYIKMFVLDEADEMLSRGFKDQIYDIFQKLNSNTQVVLLSATMPSDVLEVTKKFMRDPIRILVKKEELTLEGIRQFYINVEREEWKLDTLCDLYETLTITQAVIFINTRRKVDWLTEKMHARDFTVSAMHGDMDQKERDVIMREFRSGSSRVLITTDLLNRSRWTVWP

SEQ ID NO: 81520 - DNA, 909 bp, Artificial Sequence
  derived and/or modified sequence
ctagtttctaaggatcatgtctgcgagccaggattcccggactgagcctaaccccgaggagcggccgcgtgaggcaccaggagcccacccggcgccgggcgggcgggtccattttgccgcacaagccgggctattggcaaactgcggatgggcaggtccaccttccttcgggggtgagcggcctgagatccagagacaatggccccgatgggatggagcccgaaggcgtcatcgagagtaactggaatgagattgttgacagctttgatgacatgaacctctcggagtcccttctccgtggcatctacgcgtatggttttgagaagccctctgccatccagcagcgagccattctaccttgtatcaagggttatgatgtgattgctcaagcccaatctgggactgggaaaacggccacatttgccatatcgattctgcagcagattgaattagatctaaaagccacccaggccttggtcctagcacccactcgagaattggctcagcaggtaagagtggcttctattccctccttcagggctgatttagggatgatgagtataatccaaggaccagagaagtcttctctgatcaccaccttgggaggaagacatgggtgccctaacactctcgagacctgctgggttaattaaaagctatttcttacccaaacgtaaccattgcttcctccacccatttcctgagtcaaatgggaaagctgttgggtgaagcctggctggctgggcaagtttgactgtgttctgaataagcaccttcactatgggctaagagatcccttggtgtgggggtgatcttacagtagtcagagcagatggacagtccttttcacccttgcttaatagccagagctgtttcatgcctggggcacacacaattctaatgctggac

SEQ ID NO: 81521 - DNA, 1169 bp, Artificial Sequence
  derived and/or modified sequence
ctagtttctaaggatcatgtctgcgagccaggattcccggttatgatgtgattgctcaagcccaatctgggactgggaaaacggccacatttgccatatcgattctgcagcagattgaattagatctaaaagccacccaggccttggtcctagcacccactcgagaattggctcagcagcccccaaatacatcaagatgtttgtactggatgaagctgacgaaatgttaagccgtggattcaaggaccagatctatgacatattccaaaagctcaacagcaacacccaggtagttttgctgtcagccacaatgccttctgatgtgcttgaggtgaccaagaagttcatgagggaccccattcggattcttgtcaagaaggaagagttgaccctggagggtatccgccagttctacatcaacgtggaacgagaggagtggaagctggacacactatgtgacttgtatgaaaccctgaccatcacccaggcagtcatcttcatcaacacccggaggaaggtggactggctcaccgagaagatgcatgctcgagatttcactgtatccgccatggtgtgtttgcccgctgccagcctgttgtgggtctgcccgtcagaagtgtcctacttgaagccagggttcctggaacccaggtgcctacctggtctgctgcatatttgttttctcttccagcatggagatatggaccaaaaggaacgagacgtgattatgagggagtttcgttctggctctagcagagttttgattaccactgacctgctggtgagtagagggaactgatagcaaaggcagaagggaggatccaaggtgattccctctccaaggggacatcagtgcctctcaggaaagtagcagcttggaatagaatctggcatgcctaaggcctttggggaactgggatgcttatttcctctgccttccttggctgcccacatggatgcctaagtgtcttccctccgggatagagtgtcctccgtgcacatgctgaagagttgtctttcttgacgtaggccagaggcattgatgtgcagcaggtttctttagtcatcaactatgaccttcccaccaacagggaaaactatatccacagaatcggtcgaggtggacggtttggccgtaaaggtgtggctattaacatggtgacagaaga

SEQ ID NO: 81522 - DNA, 1645 bp, Artificial Sequence
  derived and/or modified sequence
atgtctgcgagccaggattcccgatccagagacaatggccccgatgggatggagcccgaaggcgtcatcgagagtaactggaatgagattgttgacagctttgatgacatgaacctctcggagtcccttctccgtggcatctacgcgtatggttttgagaagccctctgccatccagcagcgagccattctaccttgtatcaagggttatgatgtgattgctcaagcccaatctgggactgggaaaacggccacatttgccatatcgattctgcagcagattgaattagatctaaaagccacccaggccttggtcctagcacccactcgagaattggctcagcagatacagaaggtggtcatggcactaggagactacatgggcgcctcctgtcacgcctgtatcgggggcaccaacgtgcgtgctgaggtgcagaaactgcagatggaagctccccacatcatcgtgggtacccctggccgtgtgtttgatatgcttaaccggagatacctgtcccccaaatacatcaagatgtttgtactggatgaagctgacgaaatgttaagccgtggattcaaggaccagatctatgacatattccaaaagctcaacagcaacacccaggtagttttgctgtcagccacaatgccttctgatgtgcttgaggtgaccaagaagttcatgagggaccccattcggattcttgtcaagaaggaagagttgaccctggagggtatccgccagttctacatcaacgtggaacgagaggagtggaagctggacacactatgtgacttgtatgaaaccctgaccatcacccaggcagtcatcttcatcaacacccggaggaaggtggactggctcaccgagaagatgcatgctcgagatttcactgtatccgccatgcatggagatatggaccaaaaggaacgagacgtgattatgagggagtttcgttctggctctagcagagttttgattaccactgacctgctgaatcggtcgaggtggacggtttggccgtaaaggtgtggctattaacatggtgacagaagaagacaagaggactcttcgagacattgagaccttctacaacacctccattgaggaaatgcccctcaatgttgctgacctcatctgaggggctgtcctgccacccagccccagccagggctcaatctctgggggctgaggagcagcaggaggggggagggaagggagccaagggatggacatcttgtcattttttttctttgaataaatgtcactttttgaggcaaaagaaggaaccgtgaacattttagacacccttttctttggggtaggctcttgccccaggcgccggctcttctcccaaaaaaaaaaaaaaaacactaatccatttccctaacctagtaacctccagatcccagaggctctcctcacctcagctgagctcctttgaaagtgattcaagggactatgtcactcagcctcatttgctggaccaaatctggagggagaacccctaaaacccctaagtgaggttgcccagggggttgtccccaggtggggggaagcaggggagagaaaatggtagccatttttacattgttttgtatagtatttattgattcaggaaacaaacacaaaattctgaataaaa

SEQ ID NO: 81523 - DNA, 441 bp, Artificial Sequence
  derived and/or modified sequence
atggagcccgagggcgtgatagagtctaactggaacgaaatcgtggactccttcgatgatatgaacctgagcgagtcccttctccggggaatctacgcttatggatttgagaaaccttcagcaattcagcaacgcgctattctaccctgtatcaaggggtacgacgtgatcgcgcaagctcagagcggcaccggtaagaccgccactttcgccattagtatccttcagcagatcgaacttgatctgaaagccacccaggcactggtcctggcgcctactagggaactcgctcagcaggttagagtagctagcattccctcttttagagctgatctcggcatgatgtcgatcatacaggggccagaaaaaagctctctgattactactctgggcggacgacatggctgccctaacactctggagacctgctgggtgaactag

SEQ ID NO: 81524 - DNA, 603 bp, Artificial Sequence
  derived and/or modified sequence
atgtttgtgctggacgaggctgacgaaatgctgtcacgtggatttaaagatcagatctacgatatctttcagaaactgaatagtaacacgcaagtggtgctgctttccgcaaccatgccctccgatgttctagaggtgactaagaaatttatgagagatcccattaggatccttgtcaaaaaagaggaacttaccctggagggaattcggcagttttatatcaatgtggagagagaggagtggaagctggataccctctgtgatctgtacgaaaccctgaccataacacaagccgtaatatttattaacactcgccggaaggtcgattggctgaccgagaagatgcatgctagggacttcactgtgtccgcgatggtgtgcctccctgccgcctcgcttctctgggtatgccccagtgaggtctcctacctgaagcccggtttcttagaaccaagatgcctccctgggctgctgcacatctgcttcctgttccagcatggggatatggatcaaaaggagcgggatgtgatcatgagagagttccggagcggttcctctagagtgcttataacaacggacctgctggtgtccagagggaactag

SEQ ID NO: 81525 - DNA, 1026 bp, Artificial Sequence
  derived and/or modified sequence
atgtccgccagccaggattcacgatcccgagacaatggacccgatggcatggagccggaaggagtgattgaatctaactggaacgagattgtagatagcttcgatgacatgaacctgtcagaaagcctgctgcgtggcatatacgcttatgggtttgagaaacctagcgctatacaacagcgcgctattttgccctgcatcaagggttatgatgtgatcgcccaggcacaatctgggacaggaaagacagccacttttgcaatatccatactgcagcaaattgagctcgacctaaaggcaacccaggctttagtactagcccctacaagagagttagctcagcagattcagaaagtggtaatggccctgggggactacatgggagcatcgtgccatgcttgtatcggaggaacaaacgtgagggcagaagtgcaaaagctgcagatggaagcaccacatatcatcgtggggactcctggacgggtgttcgacatgctaaaccggcgttacctgtccccaaagtatattaagatgttcgtgcttgacgaggcggacgaaatgctcagtcggggcttcaaggaccaaatttatgatattttccagaagttgaatagcaacactcaggtcgttctgctcagtgcgacaatgccatctgacgtccttgaggtgactaagaagtttatgcgcgatccgatcaggattctggtcaaaaaggaagaactcacactggagggaatacgccagttttacatcaatgtggaacgagaggaatggaaactggacactctttgtgatctgtatgagaccctgaccatcacccaggctgtaatcttcataaatacgagaagaaaggtggactggcttactgaaaaaatgcatgctagagacttcaccgtcagtgcaatgcatggagatatggatcaaaaggagcgggatgtcatcatgcgtgagttccggtcagggtcctcccgagttttaatcacgacagatctgctgaacaggtcccgctggactgtgtggccatag

SEQ ID NO: 81526 - DNA, 441 bp, Artificial Sequence
  derived and/or modified sequence
atggagcctgagggcgtgattgagagcaactggaatgagatcgtggacagctttgatgacatgaacctgtctgagagcctgctgcggggcatctatgcctacggctttgagaagcccagcgccatccagcagagggccatcctgccctgcatcaagggctatgatgtgattgcccaggcccagagcggcaccgggaagacagccacctttgccatcagcatcctgcagcagatcgagctggacctgaaggccacccaggccctggtgctggcccccacccgggagctggcccagcaggtgcgggtggccagcatccccagcttccgggctgacctgggcatgatgagcatcatccagggccctgagaagagcagcctcatcaccaccctgggcggccgccacggctgccccaacaccctggagacctgctgggtgaactag

SEQ ID NO: 81527 - DNA, 603 bp, Artificial Sequence
  derived and/or modified sequence
atgtttgtgctggatgaagcagatgagatgctgagccggggcttcaaggaccagatctatgacatcttccagaagctgaacagcaacacccaggtggtgctgctgagcgccaccatgcccagtgatgtgctggaggtgaccaagaagttcatgagggaccccatccgcatcctggtgaagaaggaggagctgaccctggagggcatccggcagttctacatcaacgtggagcgggaggagtggaagctggacaccctgtgtgacctgtatgagaccctgaccatcacccaggccgtcatcttcatcaacaccaggaggaaggtggactggctgacagagaagatgcacgcccgggacttcaccgtgtctgccatggtgtgcctgcctgctgccagcctgctgtgggtgtgccccagcgaggtgtcctacctgaagccaggcttcctggagccccgctgcctgcccggcctgctgcacatctgcttcctgttccagcacggggacatggaccagaaggagagagatgtgatcatgagggagttccgcagcggcagcagccgggtgctgatcaccacagacctgctggtgtcccggggcaactag

SEQ ID NO: 81528 - DNA, 1026 bp, Artificial Sequence
  derived and/or modified sequence
atgtctgccagccaggacagccgcagccgggacaatggaccagatggcatggagcctgagggcgtgattgagagcaactggaatgagatcgtggacagctttgatgacatgaacctgtctgagagcctgctgcggggcatctatgcctacggctttgagaagcccagcgccatccagcagagggccatcctgccctgcatcaagggctatgatgtgattgcccaggcccagagcggcaccgggaagacagccacctttgccatcagcatcctgcagcagatcgagctggacctgaaggccacccaggccctggtgctggcccccacccgggagctggcccagcagatccagaaggtggtgatggccctgggggactacatgggcgccagctgccacgcctgcattggaggcaccaacgtgcgggcagaggtgcagaagctgcagatggaggccccccacatcatcgtgggcaccccaggccgggtgtttgacatgctgaacagacgctacctgagccccaagtacatcaagatgtttgtgctggatgaagcagatgagatgctgagccggggcttcaaggaccagatctatgacatcttccagaagctgaacagcaacacccaggtggtgctgctgagcgccaccatgcccagtgatgtgctggaggtgaccaagaagttcatgagggaccccatccgcatcctggtgaagaaggaggagctgaccctggagggcatccggcagttctacatcaacgtggagcgggaggagtggaagctggacaccctgtgtgacctgtatgagaccctgaccatcacccaggccgtcatcttcatcaacaccaggaggaaggtggactggctgacagagaagatgcacgcccgggacttcaccgtgtctgccatgcatggagacatggaccagaaggagagagatgtgatcatgagggagttccgcagcggcagcagccgggtgctgatcaccacagacctgctgaacagaagccgctggacagtgtggccctag

SEQ ID NO: 81529 - DNA, 441 bp, Artificial Sequence
  derived and/or modified sequence
atggagcccgagggcgtgatcgagagcaactggaacgagatcgtggattccttcgacgacatgaacctgtcagaaagcctcttgagaggcatatacgcgtacggattcgaaaagcctagcgccattcagcagcgagccattctcccctgcattaagggttacgatgtcatagcccaggctcaatcagggaccggaaaaacagctacgttcgccatcagtattctgcagcagatcgagcttgatttaaaggcgacgcaggctttggtgctggcacctacccgcgagctcgcccaacaggtgcgggtggcgagtataccttcattccgagcagacctgggcatgatgtctatcattcagggtccagagaaatcctctctcataaccaccttaggaggcaggcacggttgccctaataccctggaaacatgctgggtgaactag

SEQ ID NO: 81530 - DNA, 603 bp, Artificial Sequence
  derived and/or modified sequence
atgttcgtgctggacgaggccgacgagatgctgagccggggcttcaaagatcaaatctacgacatttttcagaagctcaactccaatacacaagtggtgctgctcagcgccactatgccaagcgacgtgctggaagttaccaaaaaattcatgagggacccaatcagaatcttggtgaagaaggaggagctcactttagagggtattcgtcagttttatatcaacgtcgaacgcgaggaatggaagcttgacacactgtgtgacctgtatgaaaccctgacaatcactcaggccgtcatctttatcaacacgaggcgcaaagttgattggctgaccgaaaaaatgcacgcccgggattttacagtcagtgcaatggtgtgcctccctgccgcctccctcctgtgggtatgcccaagcgaggtgtcctatcttaagcctggttttcttgagcctcgttgcctgcccggactgctccacatttgtttcctcttccaacacggggacatggaccagaaagagagagatgtgataatgagggagtttagatctgggtcctcccgcgtcctgatcaccaccgacttgctcgtgtctaggggcaattag

SEQ ID NO: 81531 - DNA, 1026 bp, Artificial Sequence
  derived and/or modified sequence
atgagcgccagccaggacagccggagccgggacaacggccccgacggaatggagccagagggggtcatagagtctaattggaacgaaattgtggactccttcgacgacatgaacctgtcagagagtctgttgagaggaatctacgcctacgggtttgagaagccgtctgcaattcagcaaagagccattctcccctgtattaagggctatgacgtgatcgctcaggcccagtctggcacagggaagacagcaaccttcgcaataagcattctacagcagatcgaactggatctcaaagcaactcaggctcttgtcctcgcccccaccagggaactggcccagcagattcagaaggtcgtaatggcactcggagattacatgggagctagctgtcacgcttgtataggaggaacaaacgtgagggccgaggtgcagaaattacaaatggaagctcctcacatcattgtaggcaccccaggcagagtgtttgacatgcttaaccggaggtatctatcgcccaaatacatcaaaatgttcgtcctggatgaagcagacgagatgttgtcaaggggatttaaggaccaaatttacgacattttccagaaactcaactcaaacacccaggtggtgttgttgtcggcaactatgccaagcgatgtcctagaggtgacgaagaaatttatgagagaccccattaggattcttgtgaagaaggaagaactgacacttgaagggataagacagttctatatcaacgtggagagggaggaatggaaattggacaccctgtgcgatctgtacgagacactgaccattacccaggccgtgatcttcataaatacccggcggaaggtggactggctcactgaaaagatgcatgccagggactttacagtgtcggctatgcacggcgacatggaccaaaaagaaagagatgtgatcatgagagagtttcgttccggaagctcccgcgtcttaattacgaccgacctcctgaatcgttctcgatggacagtttggccttag

SEQ ID NO: 81532 - DNA, 441 bp, Artificial Sequence
  derived and/or modified sequence
atggagcctgagggggtgattgaaagtaattggaatgaaatcgtggattcctttgacgacatgaacctgagcgaatctctgttgcgcggtatttacgcctacggcttcgaaaaacccagtgcgatccaacagagggcaattttaccctgtattaaaggatacgatgtgattgcccaagcacagtcgggtaccgggaagacggccacctttgctattagcatcctgcagcaaattgaactggacctgaaagctacccaggcactggtgctcgcccctacccgggagttggcccagcaggtacgggtagctagcattccaagtttccgggcagacctgggaatgatgagcattatacagggccctgagaagtcctccctgatcactactcttggcggtaggcatggctgtcctaacacactggagacctgttgggtcaactag

SEQ ID NO: 81533 - DNA, 603 bp, Artificial Sequence
  derived and/or modified sequence
atgttcgtgcttgacgaagctgacgagatgcttagcagaggcttcaaggaccagatttatgacatatttcaaaagttaaattccaacacccaggtagtgctgcttagtgcgaccatgccttccgacgtgttggaagtgaccaaaaagttcatgagagatccgatccgtatcctggtgaagaaagaagagcttaccttagaagggatccggcagttttatattaacgtagagcgtgaagagtggaaattggacactctgtgtgacttgtatgaaactctaactatcactcaggccgtgatttttattaacacaaggaggaaagttgactggctcaccgaaaagatgcacgctcgtgactttaccgtttcagcaatggtttgcctgcccgctgcgagcctgttgtgggtgtgtccctccgaggtatcatatctgaaacccggttttctggagcctcgatgcctcccgggattgcttcacatttgtttcttgttccagcatggcgacatggaccaaaaagaaagggatgtaatcatgcgggaattcagatctggaagcagcagggtgctgattacgacagacctactggtttcccgaggcaactag

SEQ ID NO: 81534 - DNA, 1026 bp, Artificial Sequence
  derived and/or modified sequence
atgagcgcgagccaagacagtagaagtcgtgataatggccctgacggaatggaacctgaaggcgtcatcgagtctaactggaacgaaatcgtggattcctttgatgatatgaatttgagcgaatcactcctacggggtatatatgcttacggatttgaaaagccatccgcaatccaacagagagccatcctgccatgtattaaggggtatgacgtaatcgcgcaggcccagtccggcacggggaagactgccacgtttgcaatcagcatactacaacagatcgagcttgacctgaaagcgactcaggcactcgtgctcgctccaacgagggaattggctcaacagatccagaaggtggtaatggcgctcggggattacatgggagcatcatgtcatgcatgcataggcggaactaatgtgagagctgaggtgcagaagctgcaaatggaggctccacacatcattgtgggcacacccggacgcgtattcgacatgctgaatcgtcgctatctttcacccaaatacataaagatgttcgtcttagatgaggctgatgagatgctgtcgagaggttttaaggaccaaatttacgacatttttcagaaacttaactcaaacacccaggtcgtgctgctgtcagcaaccatgccttcagacgttctggaagtcacaaaaaagttcatgagagatcccattaggatattggtgaagaaggaggagcttacattggaggggatccgtcagttctatattaatgttgagagggaagagtggaagttggatactctgtgtgacctgtatgagactctgactatcacccaggccgtcatattcataaacacccgtagaaaagttgactggctgactgaaaagatgcatgccagagatttcaccgtctctgcaatgcacggagacatggaccagaaggaacgagacgtcattatgagggagtttcgctcagggtccagcagagtcctgataactaccgatctgctgaacaggagccgatggaccgtgtggccctag

SEQ ID NO: 81535 - DNA, 441 bp, Artificial Sequence
  derived and/or modified sequence
atggagcccgagggcgtgatcgagagcaactggaacgagatcgtggacagcttcgacgacatgaacctgagcgagagcctgctgagaggcatctacgcctacggcttcgagaagcccagcgccatccagcagagagccatcctgccctgcatcaagggctacgacgtgatcgcccaggcccagagcggcaccggcaagaccgccaccttcgccatcagcatcctgcagcagatcgagctggacctgaaggccacccaggccctggtgctggcccccaccagagagctggcccagcaggtgagagtggccagcatccccagcttcagagccgacctgggcatgatgagcatcatccagggccccgagaagagcagcctgatcaccaccctgggcggcagacacggctgccccaacaccctggagacctgctgggtgaactag

SEQ ID NO: 81536 - DNA, 603 bp, Artificial Sequence
  derived and/or modified sequence
atgttcgtgctggacgaggccgacgagatgctgagcagaggcttcaaggaccagatctacgacatcttccagaagctgaacagcaacacccaggtggtgctgctgagcgccaccatgcccagcgacgtgctggaggtgaccaagaagttcatgagagaccccatcagaatcctggtgaagaaggaggagctgaccctggagggcatcagacagttctacatcaacgtggagagagaggagtggaagctggacaccctgtgcgacctgtacgagaccctgaccatcacccaggccgtgatcttcatcaacaccagaagaaaggtggactggctgaccgagaagatgcacgccagagacttcaccgtgagcgccatggtgtgcctgcccgccgccagcctgctgtgggtgtgccccagcgaggtgagctacctgaagcccggcttcctggagcccagatgcctgcccggcctgctgcacatctgcttcctgttccagcacggcgacatggaccagaaggagagagacgtgatcatgagagagttcagaagcggcagcagcagagtgctgatcaccaccgacctgctggtgagcagaggcaactag

SEQ ID NO: 81537 - DNA, 1026 bp, Artificial Sequence
  derived and/or modified sequence
atgagcgccagccaggacagcagaagcagagacaacggccccgacggcatggagcccgagggcgtgatcgagagcaactggaacgagatcgtggacagcttcgacgacatgaacctgagcgagagcctgctgagaggcatctacgcctacggcttcgagaagcccagcgccatccagcagagagccatcctgccctgcatcaagggctacgacgtgatcgcccaggcccagagcggcaccggcaagaccgccaccttcgccatcagcatcctgcagcagatcgagctggacctgaaggccacccaggccctggtgctggcccccaccagagagctggcccagcagatccagaaggtggtgatggccctgggcgactacatgggcgccagctgccacgcctgcatcggcggcaccaacgtgagagccgaggtgcagaagctgcagatggaggccccccacatcatcgtgggcacccccggcagagtgttcgacatgctgaacagaagatacctgagccccaagtacatcaagatgttcgtgctggacgaggccgacgagatgctgagcagaggcttcaaggaccagatctacgacatcttccagaagctgaacagcaacacccaggtggtgctgctgagcgccaccatgcccagcgacgtgctggaggtgaccaagaagttcatgagagaccccatcagaatcctggtgaagaaggaggagctgaccctggagggcatcagacagttctacatcaacgtggagagagaggagtggaagctggacaccctgtgcgacctgtacgagaccctgaccatcacccaggccgtgatcttcatcaacaccagaagaaaggtggactggctgaccgagaagatgcacgccagagacttcaccgtgagcgccatgcacggcgacatggaccagaaggagagagacgtgatcatgagagagttcagaagcggcagcagcagagtgctgatcaccaccgacctgctgaacagaagcagatggaccgtgtggccctag

SEQ ID NO: 81538 - protein, 714 aa, Artificial Sequence
  derived and/or modified sequence
MSIALGNTYRRSLSDSETVSVLQASLCEEKKEKSSKPKDPPPFEGMEIDEVANINDMDEYIELLYEDIPDKVRGSALILQLARNPDNLEELLLNETALGALARVLREDWKQSVELATNIIYIFFCFSSFSQFHGLITHYKIGALCMNIIDHELKRHELWQEELSKKKKAVDEDPENQTLRKDYEKTFKKYQGLVVKQEQLLRVALYLLLNLAEDTRTELKMRNKNIVHMLVKALDRDNFELLILVVSFLKKLSIFMENKNDMVEMDIVEKLVKMIPCEHEDLLNITLRLLLNLSFDTGLRNKMVQVGLLPKLTALLGNDNYKQIAMCVLYHISMDDRFKSMFAYTDCIPQLMKMLFECSDERIDLELISFCINLAANKRNVQLICEGNGLKMLMKRALKFKDPLLMKMIRNISQHDGPTKNLFIDYVGDLAAQISNDEEEEFVIECLGTLANLTIPDLDWELVLKEYKLVPYLKDKLKPGAAEDDLVLEVVIMIGTVSMDDSCAALLAKSGIIPALIELLNAQQEDDEFVCQIIYVFYQMVFHQATRDVIIKETQAPAYLIDLMHDKNNEIRKVCDNTLDIIAEYDEEWAKKIQSEKFRWHNSQWLEMVESRQMDESEQYLYGDDRIEPYIHEGDILERPDLFYNSDGLIASEGAISPDFFNDYHLQNGDVVGQHSFPGSLGMDGFGQPVGILGRPATAYGFRPDEPYYYGYGS

SEQ ID NO: 81539 - protein, 494 aa, Artificial Sequence
  derived and/or modified sequence
MRNKNIVHMLVKALDRDNFELLILVVSFLKKLSIFMENKNDMVEMDIVEKLVKMIPCEHEDLLNITLRLLLNLSFDTGLRNKMVQVGLLPKLTALLGNDNYKQIAMCVLYHISMDDRFKSMFAYTDCIPQLMKMLFECSDERIDLELISFCINLAANKRNVQLICEGNGLKMLMKRALKFKDPLLMKMIRNISQHDGPTKNLFIDYVGDLAAQISNDEEEEFVIECLGTLANLTIPDLDWELVLKEYKLVPYLKDKLKPGAAEDDLVLEVVIMIGTVSMDDSCAALLAKSGIIPALIELLNAQQEDDEFVCQIIYVFYQMVFHQATRDVIIKETQAPAYLIDLMHDKNNEIRKVCDNTLDIIAEYDEEWAKKIQSEKFRWHNSQWLEMVESRQMDESEQYLYGDDRIEPYIHEGDILERPDLFYNSDGLIASEGAISPDFFNDYHLQNGDVVGQHSFPGSLGMDGFGQPVGILGRPATAYGFRPDEPYYYGYGS

SEQ ID NO: 81540 - DNA, 2145 bp, Artificial Sequence
  derived and/or modified sequence
atgtctattgccctaggcaatacataccgaagaagtctcagtgatagtgaaactgtctctgttctgcaggcgtccctgtgcgaagagaagaaggagaagagtagcaaaccaaaagaccctccgccctttgaagggatggagatagacgaagtggccaatatcaacgacatggacgagtacatagagctgctatatgaggacattcctgacaaagtgcggggtagcgcacttattctgcagctggcccgtaaccctgataacctggaagagctgctgctgaacgagacggctctaggggctctggcgagggtcctgcgtgaggattggaagcaatctgttgagttggcaacaaatatcatctacatatttttctgtttctcctcatttagccagtttcacggactgattacccactataagatcggcgcactatgcatgaacatcatagaccacgagctcaagcgacacgagctgtggcaggaagaactgtcaaagaagaagaaggctgtggatgaggacccggaaaaccagacccttcgaaaagactacgagaaaacgtttaagaagtaccagggcctggtggtcaagcaggagcagctattgagggtagccctctacctgcttctcaacctggcggaggacacccggaccgagttaaaaatgcgcaacaagaatattgtccatatgttggttaaggcactagacagggataacttcgagctgttgattcttgtcgtgtcttttctgaagaagctcagcatttttatggaaaacaagaacgatatggttgaaatggacattgtggaaaagctcgtgaagatgataccatgtgaacacgaagatttgctgaacatcactttgcgcttactgctgaacctcagtttcgatacagggttaaggaacaaaatggtgcaggtgggcctgcttccaaaactaacggcactacttggtaacgacaactataagcagatagcgatgtgtgtgttataccacatttcaatggatgacagattcaaatccatgttcgcctatactgactgtatcccacagctgatgaaaatgctgtttgagtgctctgatgagcgtatcgacctcgaattaatctccttttgtatcaatcttgccgccaacaaaaggaatgtacaattaatttgtgagggtaacggcttgaagatgctgatgaaaagggcgctcaagttcaaggatcctctgctgatgaagatgattcggaatatctcacagcacgacggacctaccaaaaacctgtttattgactatgtcggcgacctcgcagcccaaatctcaaatgacgaggaggaggagtttgtgattgaatgccttggaacgttagccaatctcacaatcccagatctggattgggagctggtcctcaaagagtataaacttgtcccttatttgaaagataaactcaagccaggtgccgccgaggacgacctcgttttagaggtagttatcatgatcggaacggtcagcatggatgactcttgtgctgcattgctggcaaagtcagggattatcccggccctgatcgagcttttaaatgcacaacaggaggacgatgaatttgtgtgccagataatttatgtgttttaccaaatggtgtttcaccaagccacccgagatgtgatcattaaggaaacacaagcgccagcctatctcatcgatctgatgcatgataagaataacgagatacggaaagtttgtgataataccttggacatcatagcagaatatgacgaggagtgggcgaaaaaaatacagtccgaaaaattcagatggcacaattctcagtggctggaaatggtggagtcgcgacagatggacgaatctgaacagtacctctatggcgacgacaggattgaaccatatattcacgaaggtgatatcttggagaggcccgacttgttttacaactctgatggtctgattgcctccgaaggggccatcagccccgactttttcaatgattaccacctacaaaatggggatgtggttggccagcactctttccctgggtcactaggcatggatggcttcggtcagcctgtcggaattctaggcagacccgctactgcttacggattccgccccgatgagccttactattatggttatgggtcctag

SEQ ID NO: 81541 - DNA, 3015 bp, Artificial Sequence
  derived and/or modified sequence
aggcgactctgggcgggtctgggccgctccagtgttttggggcacagaagctgtgggaggagctggaggcttcaccgtggtaaccacagcgccgctgctgccccgccttgcaggcctcaggactgtcatcgcctctgggtgtgagggtactttggccaccgtccccggaaataaccgcgcctgcctctcaagataccccatcctctccacgccgctgccgctgccgccatgcaaggggaggacgccagatacctcaaaaggaaagttaaaggagggaatatagatgtacatccatcagaaaaagcactcattgttcactatgaagtggaagctaccattcttggagaaatgggggaccccatgttgggagaacgaaaagaatgtcaaaaaatcattcgacttaagagtctcaatgccaacacagatataacttccctggcaaggaaggtggttgaagaatgtaaactcattcatccttcaaaactaaatgaggtagaacagctgttgtactatctacagaaccgccgtgattcattgtcaggaaaagattgggaagggtcagcaggacttctgaagagggaacacgacctttaaggaggccaacagatcaggagaaggcaaaagggatgtcgattgcccttggcaacacttaccggagaagtctttcagattcagaaactgtttctgtactccaagcaagcttatgtgaagagaaaaaagaaaaatcaagcaagcctaaagatccacctccttttgaaggaatggagattgatgaagttgctaacattaatgacatggatgaatatattgagttattatatgaagatattcctgacaaagttcggggttctgctttgatcctgcagcttgctcgaaatcctgataacttggaagaactactattgaatgaaactgcccttggtgcattagcaagggtcctgagagaagactggaagcaaagtgtcgagttagctacaaacataatttacatctttttttgtttctccagcttttctcaatttcatggacttattactcactataaaattggagctctgtgtatgaatattattgatcatgagttaaaaagacatgagctttggcaagaagaactctcaaagaagaagaaagctgttgatgaagaccctgaaaaccaaaccttgagaaaggattatgaaaaaacctttaaaaagtaccaggggcttgtggtaaaacaggaacagctattacgagttgctctttatttgcttctgaatcttgctgaggatactcgtaccgaactgaaaatgaggaacaagaacatagttcacatgttggtgaaagcccttgatcgggacaattttgagctgctaattttagttgtgtcattcttgaagaaactcagcatttttatggagaataaaaatgatatggtggaaatggatattgttgaaaaactggtgaaaatgataccttgtgagcatgaagacctgctgaatatcaccctccgacttttactaaacctatcctttgacacaggactgaggaataagatggtacaagttggactgcttcccaagctcactgcactcctaggcaatgacaactacaaacaaatagcaatgtgtgttctttaccacataagcatggatgaccgctttaaatcaatgtttgcatacactgactgtataccacagttaatgaagatgctgtttgaatgttcagatgaacgaattgacttggaactcatttctttctgcattaatcttgctgctaacaaaagaaatgtacagcttatctgtgaaggaaatgggctgaagatgctcatgaagagggctctgaagtttaaggatccattgctgatgaaaatgattagaaacatttctcagcatgatggaccaactaaaaatctgtttattgattatgttggggaccttgcagcccagatctctaatgatgaagaagaggagtttgtgattgaatgtttgggaactcttgcaaacttgaccattccagacttagactgggaattggttcttaaagaatataagttggttccatacctcaaggataaactaaaaccaggtgctgcagaagatgatcttgttttagaagtggttataatgattggaactgtatccatggatgactcttgtgctgcattgctagccaaatctggcataatccctgcactcattgaattgctaaatgctcaacaagaagatgatgaatttgtgtgtcagataatttatgtcttctaccagatggttttccaccaagccacaagagacgtcataatcaaggaaacacaggctccagcatatctcatagacctaatgcatgataagaataatgaaatccgaaaggtctgtgataatacattagatattatagcggaatatgatgaagaatgggctaagaaaattcagagtgaaaagtttcgctggcataactctcagtggctggagatggtagagagtcgtcagatggatgagagtgagcagtacttgtatggtgatgatcgaattgagccatacattcatgaaggagatattctcgaaagacctgaccttttctacaactcagatggattaattgcctctgaaggagccataagtcccgatttcttcaatgattaccaccttcaaaatggagatgttgttgggcagcattcatttcctggcagccttggaatggatggctttggccaaccagttggcattcttggacgccctgccacagcatatggattccgccctgatgaaccttactactatggctatggatcttgataaagtatctgtttccatgtgtaatctcagcttagaagaaatctgtgtgggttgggttaattttggatctttgcctaataatgcatgttgatgttattgtgggtctgtgtttgtttttatttttatatgttgttagctgcagattaaccccagcccctctgtcttctgttaagtacagttgatactgacattgttcactcatcaaaccacatcttgatgctaagtaacatttcccatgagccac

SEQ ID NO: 81542 - DNA, 2145 bp, Artificial Sequence
  derived and/or modified sequence
atgagcatcgccctgggcaacacctaccgccgcagcctgagtgacagcgagaccgtgtctgtgctgcaggccagcctgtgtgaggagaagaaggagaagagcagcaagcccaaggaccccccaccatttgagggcatggagattgatgaggtggccaacatcaatgacatggatgagtacatcgagctgctgtatgaggacatcccagacaaggtgcggggcagcgccctgatcctgcagctggccagaaatccagacaacctggaggagctgctgctgaatgaaacagccctgggcgccctggcccgggtgctgcgggaggactggaagcagagcgtggagctggccaccaacatcatctacatcttcttctgcttcagcagcttcagccagttccacggcctcatcacccactacaagattggagccctgtgcatgaacatcatcgaccacgagctgaagagacatgagctgtggcaggaggagctgagcaagaagaagaaggctgtggatgaggaccctgagaaccagaccctgaggaaggactatgagaagaccttcaagaagtaccagggcctggtggtgaagcaggagcagctgctgcgggtggccctgtacctgctgctgaacctggccgaggacaccaggacagagctgaagatgaggaacaagaacatcgtgcacatgctggtgaaggccctggaccgggacaactttgagctgctgatcctggtggtgtccttcctgaagaagctgagcatcttcatggagaacaagaatgacatggtggagatggacatcgtggagaagctggtgaagatgatcccctgtgaacatgaggacctgctgaacatcaccctgcggctgctgctgaacctgagctttgacaccggcctgaggaacaagatggtgcaggtgggcctgctgcccaagctgacagccctgctgggcaatgacaactacaagcagatcgccatgtgtgtgctgtaccacatctccatggatgaccgcttcaagtccatgtttgcctacacagactgcatcccccagctgatgaagatgctgtttgaatgttctgatgaaagaattgacctggagctgatctccttctgcatcaacctggccgccaacaagagaaatgtgcagctgatctgtgagggcaatggcctgaagatgctgatgaagagggccctgaagttcaaggaccccctgctgatgaagatgatccggaacatcagccagcatgatggccccaccaagaacctcttcatcgactatgtgggggacctggccgcccagatcagcaatgatgaggaggaggagtttgtgattgaatgtctgggcaccctggccaacctgaccatcccagacctggactgggagctggtgctgaaggagtacaagctggtgccctacctgaaggacaagctgaagccaggagctgctgaagatgacctggtgctggaggtggtgatcatgattggcaccgtgtccatggatgacagctgtgccgccctgctggccaagagcggcatcatcccagccctgattgagctgctgaatgcccagcaggaggatgatgaatttgtgtgccagatcatctacgtgttctaccagatggtgttccaccaggccaccagagatgtgatcatcaaggagacccaggccccagcctacctgattgacctgatgcatgacaagaacaatgagatcaggaaggtgtgtgacaacaccctggacatcatcgccgagtatgatgaggagtgggccaagaagatccagagcgagaagttccgctggcacaacagccagtggctggagatggtggagagccggcagatggatgaaagtgagcagtacctgtatggagatgacagaattgagccctacatccacgagggggacatcctggagaggccagacctcttctacaacagtgatggcctcatcgccagcgagggcgccatcagcccagacttcttcaatgactaccacctgcagaatggagatgtggtgggccagcacagcttccctggcagcctgggcatggatggcttcggccagcctgtgggcatcctgggccggcctgccacagcctacggcttccggccagatgagccctactactacggctacggcagctag

SEQ ID NO: 81543 - DNA, 2145 bp, Artificial Sequence
  derived and/or modified sequence
atgagcatcgccctgggcaacacctaccggcggagcctgagcgacagtgaaacagtgagcgttctacaagcctcgctgtgcgaggaaaaaaaggaaaagagtagtaaacctaaggatccccctccttttgaaggtatggagatagacgaggtggcaaatattaatgacatggacgaatatatcgaactgctctatgaggacatccccgacaaagtcagagggtccgcacttatcctgcaattggccaggaatcccgacaacctggaggagctgttgctcaacgagacagcactgggggcattagcgagagtgctcagagaagactggaaacagtccgtagaactggccacgaacatcatctatatcttcttctgtttttcttcattttcacagttccacggcttgatcacccattacaagattggagccttgtgtatgaacatcatcgatcatgaactgaagcgtcacgagctgtggcaagaagaactgtctaagaaaaagaaggccgtggacgaagaccctgaaaaccaaacactgcgcaaggattatgaaaaaacctttaaaaagtaccagggcctcgtagttaaacaagagcagctactccgcgttgccctgtacctgcttctaaacctggcggaggatactcggaccgaacttaaaatgcgaaacaagaacatcgtgcatatgctcgtgaaagcattggaccgggataactttgagctcctgatattagtggtgtcattcctaaagaagttgagtatttttatggagaataagaatgatatggtcgaaatggacattgtggagaaactggttaaaatgatcccttgcgagcatgaggatctgctgaacatcacgctgcgcctgttgctcaatctttcgttcgatactggcctcaggaataaaatggttcaggtgggcctcttacctaagctgaccgctctgcttggcaacgataactacaagcaaatagctatgtgtgtactttatcatatttcaatggacgatagatttaaaagcatgttcgcgtatactgactgtattccccagctgatgaagatgctctttgaatgctctgatgaaaggattgacctggaattgatttcattctgcattaacctagcagcaaataaacgcaatgtacagcttatctgcgagggtaacgggctgaaaatgcttatgaaacgggccctgaaattcaaggatcctcttctgatgaaaatgatccgtaacatcagccagcatgacggtcccactaaaaacctatttattgactatgtgggtgatctcgccgcacagatttccaatgatgaagaagaggagttcgtcatcgagtgtctaggaaccctagcaaatctgacaattcctgatttggattgggagttggtactgaaggagtacaagctggtcccatacttgaaagataaattaaaaccgggcgcggccgaggatgatctggtgctggaggtggttatcatgatcggcaccgttagtatggatgattcatgcgcagccctattagcaaagagtggcattatcccagctctaatagagctgctaaacgctcagcaggaggacgatgaattcgtctgccaaataatttatgtgttttatcagatggtgttccaccaggcgacacgcgacgtcattattaaagagactcaggccccggcctacctgatcgaccttatgcacgacaagaataatgagatccggaaagtgtgcgataatacgctcgatattattgccgaatacgacgaggaatgggccaaaaagatccagtcggagaaatttagatggcacaactcacaatggctggagatggtcgagtccagacaaatggacgagagcgaacagtatctctacggcgatgacagaatagaaccttatattcatgaaggcgacatacttgagcggcccgatttgttctataactctgacgggctgatcgccagtgagggagccatctcccccgacttttttaacgactatcacctccagaacggcgacgtggtgggccagcatagcttcccaggatcacttggaatggacggatttggccagcccgtcggaatcctgggccgtcctgccaccgcatacggttttcgcccagatgagccctactactatggctacggctcatag

SEQ ID NO: 81544 - DNA, 2145 bp, Artificial Sequence
  derived and/or modified sequence
atgtctatagctttgggaaacacttaccgcaggagtctcagcgactctgagacagtatctgtgctgcaggcatccctgtgcgaggagaaaaaagagaaatctagcaaacccaaggatcctcctccattcgaaggcatggagatcgacgaagtcgccaacattaacgacatggacgaatatatcgaactcctatatgaggatatccctgacaaggtacgcggttctgcattgattttgcaacttgccaggaatcccgacaatctggaggagcttttgctgaatgaaactgcactcggtgcactggctcgcgtgctccgcgaggattggaagcagtcggtagaactggcgactaacattatttacatttttttttgcttctcgagcttctcccagttccatgggctgatcacccactataaaatcggagctctctgtatgaatataattgatcatgaactgaaaagacacgagctatggcaggaggagctgtctaaaaaaaagaaggcagtggacgaagaccctgaaaatcagacactgcgcaaggactatgagaagacctttaaaaaataccagggtctcgtcgtgaagcaagaacagctccttagggtcgctttgtacctcctcctcaatctcgcagaggatacccgaaccgaactgaagatgcggaacaaaaacattgtgcatatgctggtgaaagctctggatcgtgacaacttcgagctgctgatcctggtcgtgtcctttttgaagaagctgagcatattcatggagaataagaatgacatggtggaaatggacattgtcgaaaagctcgtgaagatgataccgtgtgaacacgaagacctgttgaatatcacactgcgcttgctgctgaatctgtcctttgacacgggacttcgcaacaagatggtgcaggtcggactgcttcccaaactgaccgctctgctggggaatgataattacaagcagatcgcaatgtgcgtgctttatcatatttcaatggacgacaggttcaaatccatgttcgcatataccgattgtatcccgcaactcatgaaaatgctgtttgagtgttcagacgagcggatagatttagagcttatctctttttgcatcaatcttgccgctaataagaggaacgtgcagctgatctgtgaaggaaatggattgaagatgctgatgaagcgcgctctgaagtttaaggaccctttactcatgaagatgataaggaacatttcgcaacacgacggcccaactaaaaacttgtttatcgactatgtaggggatctggcagcccagatctcgaacgatgaagaagaggaatttgtcatcgagtgtttaggtacattagcaaatctcaccataccagacttagattgggaactggttctcaaggagtacaagttagtgccttatctgaaggacaagctaaaaccaggagcagctgaagatgatctggtactggaggtggtaatcatgattggcaccgttagtatggacgattcctgtgccgcactgctggctaaaagcggcatcatcccagcactgatagagctgctcaatgcccagcaagaggatgatgagttcgtctgccagatcatttacgtcttctaccaaatggtgttccaccaagccacccgggatgttataataaaagaaacccaggcccctgcctacctgatcgatctcatgcacgacaaaaacaatgagatacggaaggtgtgcgataacaccctggacattatcgctgagtacgatgaagagtgggccaagaagatacagtcagaaaaattcagatggcacaactcccaatggcttgaaatggtggagtcacgtcagatggatgagtcggagcaatacctctacggtgacgatagaattgaaccgtacatccacgagggagatatcctggagaggccagacctcttctacaacagtgacgggctgatcgctagcgaaggggcaatcagccctgacttctttaacgattaccacctgcagaatggggacgtggtcggccagcactccttccctggaagcttaggaatggacggttttggacagcccgttggaattctaggccgacccgcaaccgcttatggattccggcctgacgagccatactattatggctacggctcgtag

SEQ ID NO: 81545 - DNA, 2145 bp, Artificial Sequence
  derived and/or modified sequence
atgagcatcgccctgggcaacacctacagaagaagcctgagcgacagcgagaccgtgagcgtgctgcaggccagcctgtgcgaggagaagaaggagaagagcagcaagcccaaggaccccccccccttcgagggcatggagatcgacgaggtggccaacatcaacgacatggacgagtacatcgagctgctgtacgaggacatccccgacaaggtgagaggcagcgccctgatcctgcagctggccagaaaccccgacaacctggaggagctgctgctgaacgagaccgccctgggcgccctggccagagtgctgagagaggactggaagcagagcgtggagctggccaccaacatcatctacatcttcttctgcttcagcagcttcagccagttccacggcctgatcacccactacaagatcggcgccctgtgcatgaacatcatcgaccacgagctgaagagacacgagctgtggcaggaggagctgagcaagaagaagaaggccgtggacgaggaccccgagaaccagaccctgagaaaggactacgagaagaccttcaagaagtaccagggcctggtggtgaagcaggagcagctgctgagagtggccctgtacctgctgctgaacctggccgaggacaccagaaccgagctgaagatgagaaacaagaacatcgtgcacatgctggtgaaggccctggacagagacaacttcgagctgctgatcctggtggtgagcttcctgaagaagctgagcatcttcatggagaacaagaacgacatggtggagatggacatcgtggagaagctggtgaagatgatcccctgcgagcacgaggacctgctgaacatcaccctgagactgctgctgaacctgagcttcgacaccggcctgagaaacaagatggtgcaggtgggcctgctgcccaagctgaccgccctgctgggcaacgacaactacaagcagatcgccatgtgcgtgctgtaccacatcagcatggacgacagattcaagagcatgttcgcctacaccgactgcatcccccagctgatgaagatgctgttcgagtgcagcgacgagagaatcgacctggagctgatcagcttctgcatcaacctggccgccaacaagagaaacgtgcagctgatctgcgagggcaacggcctgaagatgctgatgaagagagccctgaagttcaaggaccccctgctgatgaagatgatcagaaacatcagccagcacgacggccccaccaagaacctgttcatcgactacgtgggcgacctggccgcccagatcagcaacgacgaggaggaggagttcgtgatcgagtgcctgggcaccctggccaacctgaccatccccgacctggactgggagctggtgctgaaggagtacaagctggtgccctacctgaaggacaagctgaagcccggcgccgccgaggacgacctggtgctggaggtggtgatcatgatcggcaccgtgagcatggacgacagctgcgccgccctgctggccaagagcggcatcatccccgccctgatcgagctgctgaacgcccagcaggaggacgacgagttcgtgtgccagatcatctacgtgttctaccagatggtgttccaccaggccaccagagacgtgatcatcaaggagacccaggcccccgcctacctgatcgacctgatgcacgacaagaacaacgagatcagaaaggtgtgcgacaacaccctggacatcatcgccgagtacgacgaggagtgggccaagaagatccagagcgagaagttcagatggcacaacagccagtggctggagatggtggagagcagacagatggacgagagcgagcagtacctgtacggcgacgacagaatcgagccctacatccacgagggcgacatcctggagagacccgacctgttctacaacagcgacggcctgatcgccagcgagggcgccatcagccccgacttcttcaacgactaccacctgcagaacggcgacgtggtgggccagcacagcttccccggcagcctgggcatggacggcttcggccagcccgtgggcatcctgggcagacccgccaccgcctacggcttcagacccgacgagccctactactacggctacggcagctag

SEQ ID NO: 81546 - protein, 748 aa, Artificial Sequence
  derived and/or modified sequence
MQGEDARYLKSIRLKSLNANTDITSLARKVVEECKLIHPSKLNEVEQLLYYLQNRRDSLSGKEKKEKSSKPKDPPPFEGMEIDEVANINDMDEYIELLYEDIPDKVRGSALILQLARNPDNLEELLLNETALGALARVLREDWKQSVELATNIIYIFFCFSSFSQFHGLITHYKIGALCMNIIDHELKRHELWQEELSKKKKAVDEDPENQTLRKDYEKTFKKYQGLVVKQEQLLRVALYLLLNLAEDTRTELKMRNKNIVHMLVKALDRDNFELLILVVSFLKKLSIFMENKNDMVEMDIVEKLVKMIPCEHEDLLNITLRLLLNLSFDTGLRNKMVQVGLLPKLTALLGNDNYKQIAMCVLYHISMDDRFKSMFAYTDCIPQLMKMLFECSDERIDLELISFCINLAANKRNVQLICEGNGLKMLMKRALKFKDPLLMKMIRNISQHDGPTKNLFIDYVGDLAAQISNDEEEEFVIECLGTLANLTIPDLDWELVLKEYKLVPYLKDKLKPGAAEDDLVLEVVIMIGTVSMDDSCAALLAKSGIIPALIELLNAQQEDDEFVCQIIYVFYQMVFHQATRDVIIKETQAPAYLIDLMHDKNNEIRKVCDNTLDIIAEYDEEWAKKIQSEKFRWHNSQWLEMVESRQMDESEQYLYGDDRIEPYIHEGDILERPDLFYNSDGLIASEGAISPDFFNDYHLQNGDVVGQHSFPGSLGMDGFGQPVGILGRPATAYGFRPDEPYYYGYGS

SEQ ID NO: 81547 - DNA, 2247 bp, Artificial Sequence
  derived and/or modified sequence
atgcagggagaggatgccagatatttgaagagtatcaggttaaaatccctgaatgctaacacggacatcacgtctctcgcgagaaaagtggtggaagaatgcaagttaattcaccccagcaaactgaatgaggtggagcaactgctttactacctgcagaacaggagggactctctcagcggcaaggagaaaaaagaaaaaagttcaaagccaaaagacccaccacctttcgaaggcatggaaattgacgaggtcgctaatattaacgatatggatgagtacattgaactgctgtacgaggacatcccagacaaggtcaggggcagcgccctcatattgcagctggccagaaacccagataatctggaggagttactgctgaatgagacggcactcggggctctggctcgggtcctgcgcgaggattggaagcagagcgtcgagctcgcgaccaacattatctatatatttttttgtttcagcagcttctcacagtttcacggactgataacccattacaagataggggccctatgtatgaacatcattgaccatgaattaaagcgccacgagctctggcaggaggagctcagcaaaaagaagaaagcagtggatgaggaccctgaaaatcaaactttgagaaaggactacgagaagaccttcaaaaagtatcagggactcgtcgtgaagcaagagcagctgttgagggttgccctctatctgctgctgaacctggctgaggacaccaggaccgagctgaaaatgcgaaacaaaaatatcgtgcatatgctggttaaggcactcgaccgagataacttcgagctacttatcctggttgtgtcattcctgaagaaactgtccatcttcatggaaaataaaaatgacatggtagagatggacatagttgaaaagcttgtgaagatgatcccctgtgagcacgaggacctcctgaatattacactgagactgctgctgaacctgtcctttgacacaggacttaggaataagatggtccaggttggactcctgcccaagctgactgcactgttgggaaacgacaactacaaacagatagccatgtgtgtcttgtaccatatctctatggacgacagatttaaaagtatgtttgcttacacagattgtatcccccagctaatgaaaatgctgttcgagtgttcagacgagcgcatcgaccttgagttgattagcttctgcattaaccttgctgccaacaagaggaatgtgcagctgatctgcgagggaaatggcctcaagatgctcatgaagagagcacttaagttcaaggacccacttctgatgaagatgatccggaacattagccaacacgatgggccaacaaagaatctattcatagattatgtcggcgacctggctgcacaaatctccaacgatgaggaggaagaattcgtcattgagtgtctgggcactctggccaacctgactatcccagatctggattgggagctggttctcaaagagtataaactcgttccctatttaaaagataaactaaaacctggcgccgcggaagatgaccttgtacttgaagtggtgataatgataggaactgtgagcatggacgattcctgcgccgccctgctggctaaatccgggataattccggcgctgattgaactcttgaatgcgcagcaggaagatgacgaattcgtctgtcagattatatacgttttctatcaaatggtgtttcatcaagccactagagacgtcattatcaaagaaacacaggctccagcctatctgatcgacctaatgcatgataaaaataacgagatcaggaaggtgtgcgataatacactggatattatcgccgagtatgacgaggagtgggccaaaaaaatccagtccgaaaagttccggtggcacaacagtcagtggctggagatggtggaatctagacagatggatgagtcagaacagtatctctatggagacgataggatcgaaccatatatccatgaaggtgacatcctcgagcgtcctgacttattttataattcagatgggttaattgcaagtgagggcgctatatccccagacttctttaatgattaccaccttcagaacggagatgtggttggccaacacagcttccctgggtctctcgggatggatgggttcggccagcccgtgggaatcctaggacgaccggcaacggcctacggttttcgtcctgacgagccgtactattacgggtacggatcttag

SEQ ID NO: 81548 - DNA, 2718 bp, Artificial Sequence
  derived and/or modified sequence
ttgcaggcctcaggactgtcatcgcctctgggtgtgagggtactttggccaccgtccccggaaataaccgcgcctgcctctcaagataccccatcctctccacgccgctgccgctgccgccatgcaaggggaggacgccagatacctcaaaagcattcgacttaagagtctcaatgccaacacagatataacttccctggcaaggaaggtggttgaagaatgtaaactcattcatccttcaaaactaaatgaggtagaacagctgttgtactatctacagaaccgccgtgattcattgtcaggaaaagagaaaaaagaaaaatcaagcaagcctaaagatccacctccttttgaaggaatggagattgatgaagttgctaacattaatgacatggatgaatatattgagttattatatgaagatattcctgacaaagttcggggttctgctttgatcctgcagcttgctcgaaatcctgataacttggaagaactactattgaatgaaactgcccttggtgcattagcaagggtcctgagagaagactggaagcaaagtgtcgagttagctacaaacataatttacatctttttttgtttctccagcttttctcaatttcatggacttattactcactataaaattggagctctgtgtatgaatattattgatcatgagttaaaaagacatgagctttggcaagaagaactctcaaagaagaagaaagctgttgatgaagaccctgaaaaccaaaccttgagaaaggattatgaaaaaacctttaaaaagtaccaggggcttgtggtaaaacaggaacagctattacgagttgctctttatttgcttctgaatcttgctgaggatactcgtaccgaactgaaaatgaggaacaagaacatagttcacatgttggtgaaagcccttgatcgggacaattttgagctgctaattttagttgtgtcattcttgaagaaactcagcatttttatggagaataaaaatgatatggtggaaatggatattgttgaaaaactggtgaaaatgataccttgtgagcatgaagacctgctgaatatcaccctccgacttttactaaacctatcctttgacacaggactgaggaataagatggtacaagttggactgcttcccaagctcactgcactcctaggcaatgacaactacaaacaaatagcaatgtgtgttctttaccacataagcatggatgaccgctttaaatcaatgtttgcatacactgactgtataccacagttaatgaagatgctgtttgaatgttcagatgaacgaattgacttggaactcatttctttctgcattaatcttgctgctaacaaaagaaatgtacagcttatctgtgaaggaaatgggctgaagatgctcatgaagagggctctgaagtttaaggatccattgctgatgaaaatgattagaaacatttctcagcatgatggaccaactaaaaatctgtttattgattatgttggggaccttgcagcccagatctctaatgatgaagaagaggagtttgtgattgaatgtttgggaactcttgcaaacttgaccattccagacttagactgggaattggttcttaaagaatataagttggttccatacctcaaggataaactaaaaccaggtgctgcagaagatgatcttgttttagaagtggttataatgattggaactgtatccatggatgactcttgtgctgcattgctagccaaatctggcataatccctgcactcattgaattgctaaatgctcaacaagaagatgatgaatttgtgtgtcagataatttatgtcttctaccagatggttttccaccaagccacaagagacgtcataatcaaggaaacacaggctccagcatatctcatagacctaatgcatgataagaataatgaaatccgaaaggtctgtgataatacattagatattatagcggaatatgatgaagaatgggctaagaaaattcagagtgaaaagtttcgctggcataactctcagtggctggagatggtagagagtcgtcagatggatgagagtgagcagtacttgtatggtgatgatcgaattgagccatacattcatgaaggagatattctcgaaagacctgaccttttctacaactcagatggattaattgcctctgaaggagccataagtcccgatttcttcaatgattaccaccttcaaaatggagatgttgttgggcagcattcatttcctggcagccttggaatggatggctttggccaaccagttggcattcttggacgccctgccacagcatatggattccgccctgatgaaccttactactatggctatggatcttgataaagtatctgtttccatgtgtaatctcagcttagaagaaatctgtgtgggttgggttaattttggatctttgcctaataatgcatgttgatgttattgtgggtctgtgtttgtttttatttttatatgttgttagctgcagattaaccccagcccctctgtcttctgttaagtacagttgatactgacattgttcactcatcaaaccacatcttgatgctaagtaacatttcccatgagccacaaaactgaatgctgaaaagctactagactggaaaacaaacactgcattatgtatgttaagtgactaatttaatttcaattaaaaagcgtaaagtgaaaatgaataa

SEQ ID NO: 81549 - DNA, 2247 bp, Artificial Sequence
  derived and/or modified sequence
atgcagggagaagatgcccgctacctgaagagcatccggctgaagagcctgaatgccaacacagacatcaccagcctggccaggaaggtggtggaggagtgcaagctgatccaccccagcaagctgaatgaggtggagcagctgctgtactacctgcagaacagaagagacagcctgagcggcaaggagaagaaggagaagagcagcaagcccaaggaccccccaccatttgagggcatggagattgatgaggtggccaacatcaatgacatggatgagtacatcgagctgctgtatgaggacatcccagacaaggtgcggggcagcgccctgatcctgcagctggccagaaatccagacaacctggaggagctgctgctgaatgaaacagccctgggcgccctggcccgggtgctgcgggaggactggaagcagagcgtggagctggccaccaacatcatctacatcttcttctgcttcagcagcttcagccagttccacggcctcatcacccactacaagattggagccctgtgcatgaacatcatcgaccacgagctgaagagacatgagctgtggcaggaggagctgagcaagaagaagaaggctgtggatgaggaccctgagaaccagaccctgaggaaggactatgagaagaccttcaagaagtaccagggcctggtggtgaagcaggagcagctgctgcgggtggccctgtacctgctgctgaacctggccgaggacaccaggacagagctgaagatgaggaacaagaacatcgtgcacatgctggtgaaggccctggaccgggacaactttgagctgctgatcctggtggtgtccttcctgaagaagctgagcatcttcatggagaacaagaatgacatggtggagatggacatcgtggagaagctggtgaagatgatcccctgtgaacatgaggacctgctgaacatcaccctgcggctgctgctgaacctgagctttgacaccggcctgaggaacaagatggtgcaggtgggcctgctgcccaagctgacagccctgctgggcaatgacaactacaagcagatcgccatgtgtgtgctgtaccacatctccatggatgaccgcttcaagtccatgtttgcctacacagactgcatcccccagctgatgaagatgctgtttgaatgttctgatgaaagaattgacctggagctgatctccttctgcatcaacctggccgccaacaagagaaatgtgcagctgatctgtgagggcaatggcctgaagatgctgatgaagagggccctgaagttcaaggaccccctgctgatgaagatgatccggaacatcagccagcatgatggccccaccaagaacctcttcatcgactatgtgggggacctggccgcccagatcagcaatgatgaggaggaggagtttgtgattgaatgtctgggcaccctggccaacctgaccatcccagacctggactgggagctggtgctgaaggagtacaagctggtgccctacctgaaggacaagctgaagccaggagctgctgaagatgacctggtgctggaggtggtgatcatgattggcaccgtgtccatggatgacagctgtgccgccctgctggccaagagcggcatcatcccagccctgattgagctgctgaatgcccagcaggaggatgatgaatttgtgtgccagatcatctacgtgttctaccagatggtgttccaccaggccaccagagatgtgatcatcaaggagacccaggccccagcctacctgattgacctgatgcatgacaagaacaatgagatcaggaaggtgtgtgacaacaccctggacatcatcgccgagtatgatgaggagtgggccaagaagatccagagcgagaagttccgctggcacaacagccagtggctggagatggtggagagccggcagatggatgaaagtgagcagtacctgtatggagatgacagaattgagccctacatccacgagggggacatcctggagaggccagacctcttctacaacagtgatggcctcatcgccagcgagggcgccatcagcccagacttcttcaatgactaccacctgcagaatggagatgtggtgggccagcacagcttccctggcagcctgggcatggatggcttcggccagcctgtgggcatcctgggccggcctgccacagcctacggcttccggccagatgagccctactactacggctacggcagctag

SEQ ID NO: 81550 - DNA, 2247 bp, Artificial Sequence
  derived and/or modified sequence
atgcagggcgaggacgcccggtacctgaagagcatccggctgaagtcgcttaacgccaacaccgatatcacttccctggcaaggaaagtggtggaagagtgcaagctgatccacccaagtaagctcaacgaagtcgagcagctgctctactatctgcaaaatcgcagagacagtcttagcggaaaagaaaagaaggaaaagagttctaaacctaaggaccccccccccttcgagggaatggagatcgatgaagttgcaaacatcaacgacatggatgagtacattgaactgctctatgaggatattccagataaagtgagaggtagcgcactcatattacagctggctaggaacccagataaccttgaggagctgctgttgaatgagacagcgctgggggcattggccagagtgctgagggaagattggaaacagagcgtggaactagccacgaatatcatttacatcttcttctgcttctcctccttctcccagttccatggactgataacccattacaagatcggcgctctctgcatgaacatcattgatcacgagctgaagcggcacgagctgtggcaggaagaactgtccaagaagaagaaggctgtagacgaggaccccgagaatcagactctgcggaaggactatgagaaaacattcaaaaagtatcaggggttagtggtgaaacaggagcagctcctgagggtggctctctacctgcttttgaacctggccgaggacacacgaacggagctcaaaatgagaaacaaaaacatcgtacacatgctagtgaaagctctggatcgtgataatttcgagctgctcatcctcgtggttagtttcctgaaaaagttgagcatctttatggagaataaaaacgacatggtagaaatggatattgttgaaaagctggtgaaaatgatcccatgcgagcatgaggacctattgaatatcacactcagactgctgcttaacctgtcttttgacacaggtctccggaacaaaatggtccaagttgggttactgccaaagctcacggccctgctgggaaacgataattacaagcagattgccatgtgcgtcctgtaccacatttcaatggacgatcgtttcaagtcaatgtttgcctatacagactgcataccccagctcatgaagatgctgttcgagtgtagcgacgaaagaatagacctggagcttatctccttctgcattaacctggctgcgaataagcggaacgtccagttaatctgtgaggggaatggcctgaagatgctgatgaagcgggccctgaagtttaaagaccccctccttatgaagatgatcagaaatatatcacagcatgatggccccacaaaaaatctgttcatcgattatgttggggatctggcggcgcaaatctctaacgacgaggaggaggagtttgttatcgagtgtctcgggaccctggcaaacttgacgattcctgacctggactgggagttagtacttaaggagtataagcttgtgccttacctgaaagataagctgaaacccggcgctgccgaagatgacctagtgttggaggtggtgataatgataggcaccgtgtcaatggatgactcatgtgcggccctgctggcgaagagcgggattatcccagctctgattgagctcctgaacgcccagcaggaggacgatgagttcgtctgccaaatcatctatgttttttatcagatggtcttccatcaggctactagagatgttattatcaaggagacacaggctccagcgtatcttatcgacctcatgcacgataagaataatgagatccgcaaagtgtgcgacaatacactggacatcatcgcggagtacgatgaggagtgggcgaagaagattcagtccgagaaatttaggtggcacaatagccagtggctcgaaatggttgagtctaggcaaatggacgaatctgagcagtatctctacggagacgatcgcattgagccatacattcacgagggagatatcctggagcggcccgatctcttttataattctgatggtctgattgcttcggagggcgcaatcagcccggatttctttaacgactaccacctccagaacggggacgtggttggccagcacagcttcccgggaagtctcggcatggatgggtttggccaaccagtcggaatcttgggcagaccggccacagcctacggcttccggccagacgagccttactattatgggtatggcagttag

SEQ ID NO: 81551 - DNA, 2247 bp, Artificial Sequence
  derived and/or modified sequence
atgcaaggggaggatgcccgatacctgaaaagtattagactgaaatctttgaacgcaaataccgacatcacgagcctggcccgtaaggtggtggaagaatgtaagctgattcatccctccaagctgaacgaggttgaacagctcttatactatttgcagaatcgacgggacagtctctcaggaaaagagaagaaagagaagagctccaaaccaaaggatcctcccccttttgagggcatggaaattgacgaggtcgctaacatcaacgacatggacgagtacatcgagctgctctatgaagatattcctgacaaggtgcgcggtagcgcgctgatcttgcaactcgcaagaaacccagacaacttagaagaactgttgctgaatgagaccgcgttgggagcactggccagggtcctcagagaagactggaaacaatctgtcgagctcgctaccaacatcatttacatcttcttttgtttctcttcgttttcccagttccatggtttaataacgcactacaagatcggagcattatgcatgaatatcatagaccacgagttgaagcgtcatgagctgtggcaggaagaattgtctaaaaagaaaaaagccgttgatgaggaccctgaaaaccaaacacttcgtaaagattacgaaaagacattcaagaaatatcagggcctggtggtcaaacaggagcagttactgagggtggcattgtatctgctgttgaacttagccgaggacacacggacggaactgaagatgaggaataagaatatagttcacatgctcgtgaaggctctggaccgtgacaacttcgagctgctgattctggttgtgtcattccttaagaagttgagcatctttatggaaaataagaacgatatggtcgagatggacattgtggagaagctagtcaaaatgattccgtgcgaacatgaagatctgttgaatataaccctgagactcctgctgaacttgtccttcgacaccggactcaggaataagatggttcaggttggattgctgcctaagctcaccgccttgctggggaacgacaactacaagcaaatcgcaatgtgcgttctgtaccacatctcgatggatgaccgcttcaagagcatgtttgcttataccgactgcattcctcagctgatgaagatgttgttcgagtgttctgatgaaagaatcgatctagagctgatcagtttttgcatcaaccttgccgcaaacaagcggaacgttcagttgatctgtgagggcaacggcttgaaaatgcttatgaaaagggcgttgaaattcaaggacccccttttaatgaaaatgattagaaatattagtcagcacgatggtccaaccaaaaatctgtttatagactatgtgggagacttggcggctcaaatttcaaacgacgaggaagaggagttcgttatagagtgcttaggcacattggcgaacttgacaatacctgacctagattgggaactggtgctcaaggagtacaagctggtgccgtatctgaaggacaagctgaaacccggagcagccgaggatgacctggtgctcgaggtggtaattatgattggtaccgtttccatggacgatagctgcgctgcactgctggccaaatcaggcatcattccagccctcattgaactgctcaatgctcagcaggaagacgatgagttcgtatgccagataatctacgtcttctaccagatggtgttccatcaggctacacgggacgtgattattaaagagactcaggccccagcttatctcattgatctcatgcacgacaagaacaatgagattagaaaggtgtgtgacaatacacttgacatcatcgcggagtacgatgaggagtgggccaaaaaaatacagagcgagaagtttagatggcacaactcacagtggctggagatggtggagagtagacaaatggatgaaagcgaacaatatctgtacggagatgatcgaatcgaaccttacatacatgagggggacatccttgaaagaccggatctcttttacaacagtgacggcctcatcgcatctgagggcgcaatttctcccgatttcttcaatgattatcatcttcagaacggtgatgtagtcggccagcattctttcccaggctcactgggcatggacggctttggtcagcctgtggggattctcgggagaccagccaccgcatatgggtttcgtcccgatgagccttactattacggctacggatcctag

SEQ ID NO: 81552 - DNA, 2247 bp, Artificial Sequence
  derived and/or modified sequence
atgcagggcgaggacgccagatacctgaagagcatcagactgaagagcctgaacgccaacaccgacatcaccagcctggccagaaaggtggtggaggagtgcaagctgatccaccccagcaagctgaacgaggtggagcagctgctgtactacctgcagaacagaagagacagcctgagcggcaaggagaagaaggagaagagcagcaagcccaaggaccccccccccttcgagggcatggagatcgacgaggtggccaacatcaacgacatggacgagtacatcgagctgctgtacgaggacatccccgacaaggtgagaggcagcgccctgatcctgcagctggccagaaaccccgacaacctggaggagctgctgctgaacgagaccgccctgggcgccctggccagagtgctgagagaggactggaagcagagcgtggagctggccaccaacatcatctacatcttcttctgcttcagcagcttcagccagttccacggcctgatcacccactacaagatcggcgccctgtgcatgaacatcatcgaccacgagctgaagagacacgagctgtggcaggaggagctgagcaagaagaagaaggccgtggacgaggaccccgagaaccagaccctgagaaaggactacgagaagaccttcaagaagtaccagggcctggtggtgaagcaggagcagctgctgagagtggccctgtacctgctgctgaacctggccgaggacaccagaaccgagctgaagatgagaaacaagaacatcgtgcacatgctggtgaaggccctggacagagacaacttcgagctgctgatcctggtggtgagcttcctgaagaagctgagcatcttcatggagaacaagaacgacatggtggagatggacatcgtggagaagctggtgaagatgatcccctgcgagcacgaggacctgctgaacatcaccctgagactgctgctgaacctgagcttcgacaccggcctgagaaacaagatggtgcaggtgggcctgctgcccaagctgaccgccctgctgggcaacgacaactacaagcagatcgccatgtgcgtgctgtaccacatcagcatggacgacagattcaagagcatgttcgcctacaccgactgcatcccccagctgatgaagatgctgttcgagtgcagcgacgagagaatcgacctggagctgatcagcttctgcatcaacctggccgccaacaagagaaacgtgcagctgatctgcgagggcaacggcctgaagatgctgatgaagagagccctgaagttcaaggaccccctgctgatgaagatgatcagaaacatcagccagcacgacggccccaccaagaacctgttcatcgactacgtgggcgacctggccgcccagatcagcaacgacgaggaggaggagttcgtgatcgagtgcctgggcaccctggccaacctgaccatccccgacctggactgggagctggtgctgaaggagtacaagctggtgccctacctgaaggacaagctgaagcccggcgccgccgaggacgacctggtgctggaggtggtgatcatgatcggcaccgtgagcatggacgacagctgcgccgccctgctggccaagagcggcatcatccccgccctgatcgagctgctgaacgcccagcaggaggacgacgagttcgtgtgccagatcatctacgtgttctaccagatggtgttccaccaggccaccagagacgtgatcatcaaggagacccaggcccccgcctacctgatcgacctgatgcacgacaagaacaacgagatcagaaaggtgtgcgacaacaccctggacatcatcgccgagtacgacgaggagtgggccaagaagatccagagcgagaagttcagatggcacaacagccagtggctggagatggtggagagcagacagatggacgagagcgagcagtacctgtacggcgacgacagaatcgagccctacatccacgagggcgacatcctggagagacccgacctgttctacaacagcgacggcctgatcgccagcgagggcgccatcagccccgacttcttcaacgactaccacctgcagaacggcgacgtggtgggccagcacagcttccccggcagcctgggcatggacggcttcggccagcccgtgggcatcctgggcagacccgccaccgcctacggcttcagacccgacgagccctactactacggctacggcagctag

SEQ ID NO: 81553 - DNA, 2259 bp, Artificial Sequence
  derived and/or modified sequence
atgggcgatccaatgctcggggagagaaaagaatgccagaagataatccgcctcaagtcgctcaacgctaacaccgatatcacatccctcgcacggaaagtggtcgaggagtgcaagctcattcacccgagcaaactcaacgaggtggaacagctgttgtactatctccagaatcggcgagatagcctttcagggaaggagaaaaaagaaaagtcttccaaacctaaagacccaccaccattcgaggggatggagattgatgaagtagcaaatattaacgacatggacgagtatattgaacttttgtatgaggacatacctgacaaagtgcgcggtagtgctctgattctccagttggcaagaaatcccgataatctggaagaacttctgcttaatgagacggccttgggcgctcttgcccgcgttctgagagaagactggaagcaaagcgtcgagctggccacgaacattatctacatttttttctgtttctcctctttttcgcaattccacggacttatcacgcattacaagatcggagcactgtgcatgaacattatcgatcatgagcttaaacggcatgagctctggcaggaagagctgtctaaaaaaaaaaaagccgtcgatgaagatcccgaaaaccagactctacgaaaggactatgaaaaaacctttaaaaaataccaggggctcgtggtgaaacaggagcagctgttacgtgttgccttatacctcctgctaaacctggcagaggacactcgcactgagttaaagatgcgaaacaaaaatatcgttcacatgctagttaaggccttagaccgcgacaacttcgagctgctgatccttgtggtcagttttcttaaaaagcttagcatttttatggaaaataaaaatgatatggtggagatggacatcgtggagaagctcgtgaagatgattccttgcgagcacgaggacctgctgaatattacactcaggttactcctcaacctatcctttgatacgggtctgagaaataaaatggtgcaggtgggcctgctacctaagctgacagctctgctggggaatgataactataagcagatagccatgtgtgtgctatatcacatttccatggacgaccgctttaaaagtatgtttgcttatacagactgcattccccagctcatgaagatgttattcgaatgttcggacgagaggatagatttggaattaataagcttttgtatcaacctggccgctaataaaagaaatgtgcaactgatatgcgaggggaatggattgaagatgctcatgaaaagagcgctgaagtttaaggatcctttactaatgaagatgatccgcaatatttcgcagcacgatggaccaaccaagaacctcttcatcgattacgtcggagacctcgccgcacaaataagcaatgacgaggaagaggaattcgtcatcgaatgccttgggacgctcgccaatctcacaataccagaccttgactgggagctggtcctcaaagagtataaactggtcccatacctgaaagacaaactgaagcctggagcagccgaggatgatctggtgctagaggtggtgatcatgatcgggaccgtgtctatggatgactcttgtgcagcgctcctggccaagtctggaattatcccagctctaatcgagctcttaaacgcccaacaggaggatgacgaattcgtttgccagatcatctatgttttttatcaaatggtttttcaccaagccacacgggatgtgatcatcaaggaaacgcaagcgcccgcctacctcattgatctaatgcacgacaaaaataacgagattaggaaggtgtgcgataacacccttgacatcatcgctgaatatgatgaggagtgggccaaaaagattcaaagcgagaagtttagatggcacaactcccaatggctggagatggtggagtctcggcagatggatgagagcgagcagtatttgtatggggacgatcgcatagaaccgtatattcatgagggcgacatcctggaaagaccggatctgttctacaatagcgatggcctgatagccagcgaaggcgccatctccccggactttttcaatgactaccacttacagaacggtgatgttgtgggccaacactcgttcccaggaagtctggggatggatggcttcggccagcctgtgggcattctggggcgccctgccacagcctatggcttcagaccagatgaaccatattactatggttatggttcttag

SEQ ID NO: 81554 - DNA, 1485 bp, Artificial Sequence
  derived and/or modified sequence
atgaggaataaaaacattgtgcacatgctcgtcaaagccttggatcgcgataattttgagcttttaatattagtggtgtcgtttcttaaaaagctttccatttttatggaaaataaaaatgatatggttgagatggacattgtggaaaagctggtgaagatgatcccgtgtgagcacgaggatttactgaatatcacactgcgtcttctgctgaacctgtcattcgacaccggcctgagaaacaagatggttcaggttggactgctgcccaaattaacagcactattggggaatgacaattacaaacagattgcaatgtgtgtgctgtaccatatatctatggacgaccgattcaaatcgatgtttgcgtataccgattgcattcctcagctcatgaaaatgctgttcgaatgctctgatgagcggatcgatctggagctcataagcttctgtataaatctcgccgcaaataaaagaaatgtgcagctgatctgtgagggaaacggtttgaagatgctaatgaagagggcgctgaaattcaaagatcccctactgatgaaaatgatccggaatatcagccagcacgacggtcccactaaaaacctttttattgattacgtaggggatctggcagcacagatctctaatgacgaggaggaagagttcgtgatcgaatgcctgggtacattggccaacctaactatccctgatctcgactgggagctcgttctcaaggagtataagcttgtgccctacctcaaggacaaactgaagcctggagcagctgaggatgacttggttctggaggttgtgatcatgattgggaccgtgtccatggacgactcatgtgcagccctgctcgccaaatccggcattatacctgctcttatcgagttactgaacgcccagcaggaagatgacgaatttgtgtgtcagataatttacgtgttctaccagatggtctttcatcaggccacaagagatgtgattattaaagaaactcaggcccctgcctacctgatcgacctgatgcatgataagaataatgaaattcgaaaagtctgtgataacacactcgatataattgcagaatacgatgaagagtgggccaaaaagattcagtccgagaaatttcgctggcataattctcaatggttggaaatggtagaatcaagacaaatggacgagtctgagcagtacttatatggggacgaccgtatcgaaccgtacatccatgaaggtgatattttagagcggccagatttgttctataactccgacggcctgatcgcctcagagggggcgatctcaccagattttttcaacgactaccacctgcagaatggggatgtggtaggtcagcatagctttcccggaagcttagggatggacggcttcggccaaccagtaggcatcctgggccgaccagcaacggcctatggatttaggccagacgagccctattactacggctacgggagctag

SEQ ID NO: 81555 - DNA, 1956 bp, Artificial Sequence
  derived and/or modified sequence
aacataaattttagaaggacagtattcaaccggctacctctatcttggctgtaaagagaagtctgtttgttttttcaatttgctctttatttgcttctgaatcttgctgaggatactcgtaccgaactgaaaatgaggaacaagaacatagttcacatgttggtgaaagcccttgatcgggacaattttgagctgctaattttagttgtgtcattcttgaagaaactcagcatttttatggagaataaaaatgatatggtggaaatggatattgttgaaaaactggtgaaaatgataccttgtgagcatgaagacctgctgaatatcaccctccgacttttactaaacctatcctttgacacaggactgaggaataagatggtacaagttggactgcttcccaagctcactgcactcctaggcaatgacaactacaaacaaatagcaatgtgtgttctttaccacataagcatggatgaccgctttaaatcaatgtttgcatacactgactgtataccacagttaatgaagatgctgtttgaatgttcagatgaacgaattgacttggaactcatttctttctgcattaatcttgctgctaacaaaagaaatgtacagcttatctgtgaaggaaatgggctgaagatgctcatgaagagggctctgaagtttaaggatccattgctgatgaaaatgattagaaacatttctcagcatgatggaccaactaaaaatctgtttattgattatgttggggaccttgcagcccagatctctaatgatgaagaagaggagtttgtgattgaatgtttgggaactcttgcaaacttgaccattccagacttagactgggaattggttcttaaagaatataagttggttccatacctcaaggataaactaaaaccaggtgctgcagaagatgatcttgttttagaagtggttataatgattggaactgtatccatggatgactcttgtgctgcattgctagccaaatctggcataatccctgcactcattgaattgctaaatgctcaacaagaagatgatgaatttgtgtgtcagataatttatgtcttctaccagatggttttccaccaagccacaagagacgtcataatcaaggaaacacaggctccagcatatctcatagacctaatgcatgataagaataatgaaatccgaaaggtctgtgataatacattagatattatagcggaatatgatgaagaatgggctaagaaaattcagagtgaaaagtttcgctggcataactctcagtggctggagatggtagagagtcgtcagatggatgagagtgagcagtacttgtatggtgatgatcgaattgagccatacattcatgaaggagatattctcgaaagacctgaccttttctacaactcagatggattaattgcctctgaaggagccataagtcccgatttcttcaatgattaccaccttcaaaatggagatgttgttgggcagcattcatttcctggcagccttggaatggatggctttggccaaccagttggcattcttggacgccctgccacagcatatggattccgccctgatgaaccttactactatggctatggatcttgataaagtatctgtttccatgtgtaatctcagcttagaagaaatctgtgtgggttgggttaattttggatctttgcctaataatgcatgttgatgttattgtgggtctgtgtttgtttttatttttatatgttgttagctgcagattaaccccagcccctctgtcttctgttaagtacagttgatactgacattgttcactcatcaaaccacatcttgatgctaagtaacatttcccatgagccacaaaactgaatgctgaaaagctactagactggaaaacaaacactgcattatgtatgttaagtgactaatttaatttcaattaaaaagcgtaaagtg

SEQ ID NO: 81556 - DNA, 2259 bp, Artificial Sequence
  derived and/or modified sequence
atgggagaccccatgctgggggagaggaaagaatgccagaagatcatccggctgaagagcctgaatgccaacacagacatcaccagcctggccaggaaggtggtggaggagtgcaagctgatccaccccagcaagctgaatgaggtggagcagctgctgtactacctgcagaacagaagagacagcctgagcggcaaggagaagaaggagaagagcagcaagcccaaggaccccccaccatttgagggcatggagattgatgaggtggccaacatcaatgacatggatgagtacatcgagctgctgtatgaggacatcccagacaaggtgcggggcagcgccctgatcctgcagctggccagaaatccagacaacctggaggagctgctgctgaatgaaacagccctgggcgccctggcccgggtgctgcgggaggactggaagcagagcgtggagctggccaccaacatcatctacatcttcttctgcttcagcagcttcagccagttccacggcctcatcacccactacaagattggagccctgtgcatgaacatcatcgaccacgagctgaagagacatgagctgtggcaggaggagctgagcaagaagaagaaggctgtggatgaggaccctgagaaccagaccctgaggaaggactatgagaagaccttcaagaagtaccagggcctggtggtgaagcaggagcagctgctgcgggtggccctgtacctgctgctgaacctggccgaggacaccaggacagagctgaagatgaggaacaagaacatcgtgcacatgctggtgaaggccctggaccgggacaactttgagctgctgatcctggtggtgtccttcctgaagaagctgagcatcttcatggagaacaagaatgacatggtggagatggacatcgtggagaagctggtgaagatgatcccctgtgaacatgaggacctgctgaacatcaccctgcggctgctgctgaacctgagctttgacaccggcctgaggaacaagatggtgcaggtgggcctgctgcccaagctgacagccctgctgggcaatgacaactacaagcagatcgccatgtgtgtgctgtaccacatctccatggatgaccgcttcaagtccatgtttgcctacacagactgcatcccccagctgatgaagatgctgtttgaatgttctgatgaaagaattgacctggagctgatctccttctgcatcaacctggccgccaacaagagaaatgtgcagctgatctgtgagggcaatggcctgaagatgctgatgaagagggccctgaagttcaaggaccccctgctgatgaagatgatccggaacatcagccagcatgatggccccaccaagaacctcttcatcgactatgtgggggacctggccgcccagatcagcaatgatgaggaggaggagtttgtgattgaatgtctgggcaccctggccaacctgaccatcccagacctggactgggagctggtgctgaaggagtacaagctggtgccctacctgaaggacaagctgaagccaggagctgctgaagatgacctggtgctggaggtggtgatcatgattggcaccgtgtccatggatgacagctgtgccgccctgctggccaagagcggcatcatcccagccctgattgagctgctgaatgcccagcaggaggatgatgaatttgtgtgccagatcatctacgtgttctaccagatggtgttccaccaggccaccagagatgtgatcatcaaggagacccaggccccagcctacctgattgacctgatgcatgacaagaacaatgagatcaggaaggtgtgtgacaacaccctggacatcatcgccgagtatgatgaggagtgggccaagaagatccagagcgagaagttccgctggcacaacagccagtggctggagatggtggagagccggcagatggatgaaagtgagcagtacctgtatggagatgacagaattgagccctacatccacgagggggacatcctggagaggccagacctcttctacaacagtgatggcctcatcgccagcgagggcgccatcagcccagacttcttcaatgactaccacctgcagaatggagatgtggtgggccagcacagcttccctggcagcctgggcatggatggcttcggccagcctgtgggcatcctgggccggcctgccacagcctacggcttccggccagatgagccctactactacggctacggcagctag

SEQ ID NO: 81557 - DNA, 1485 bp, Artificial Sequence
  derived and/or modified sequence
atgaggaacaagaacatcgtgcacatgctggtgaaggccctggaccgggacaactttgagctgctgatcctggtggtgtccttcctgaagaagctgagcatcttcatggagaacaagaatgacatggtggagatggacatcgtggagaagctggtgaagatgatcccctgtgaacatgaggacctgctgaacatcaccctgcggctgctgctgaacctgagctttgacaccggcctgaggaacaagatggtgcaggtgggcctgctgcccaagctgacagccctgctgggcaatgacaactacaagcagatcgccatgtgtgtgctgtaccacatctccatggatgaccgcttcaagtccatgtttgcctacacagactgcatcccccagctgatgaagatgctgtttgaatgttctgatgaaagaattgacctggagctgatctccttctgcatcaacctggccgccaacaagagaaatgtgcagctgatctgtgagggcaatggcctgaagatgctgatgaagagggccctgaagttcaaggaccccctgctgatgaagatgatccggaacatcagccagcatgatggccccaccaagaacctcttcatcgactatgtgggggacctggccgcccagatcagcaatgatgaggaggaggagtttgtgattgaatgtctgggcaccctggccaacctgaccatcccagacctggactgggagctggtgctgaaggagtacaagctggtgccctacctgaaggacaagctgaagccaggagctgctgaagatgacctggtgctggaggtggtgatcatgattggcaccgtgtccatggatgacagctgtgccgccctgctggccaagagcggcatcatcccagccctgattgagctgctgaatgcccagcaggaggatgatgaatttgtgtgccagatcatctacgtgttctaccagatggtgttccaccaggccaccagagatgtgatcatcaaggagacccaggccccagcctacctgattgacctgatgcatgacaagaacaatgagatcaggaaggtgtgtgacaacaccctggacatcatcgccgagtatgatgaggagtgggccaagaagatccagagcgagaagttccgctggcacaacagccagtggctggagatggtggagagccggcagatggatgaaagtgagcagtacctgtatggagatgacagaattgagccctacatccacgagggggacatcctggagaggccagacctcttctacaacagtgatggcctcatcgccagcgagggcgccatcagcccagacttcttcaatgactaccacctgcagaatggagatgtggtgggccagcacagcttccctggcagcctgggcatggatggcttcggccagcctgtgggcatcctgggccggcctgccacagcctacggcttccggccagatgagccctactactacggctacggcagctag

SEQ ID NO: 81558 - DNA, 2259 bp, Artificial Sequence
  derived and/or modified sequence
atgggcgaccccatgctgggcgagcggaaggagtgccagaagatcatcaggctcaaaagcctcaacgcaaataccgatattacttccttggctcgtaaggtggtcgaggagtgtaaactgatccatccatctaagctgaatgaagtggagcaattgctgtattacctgcagaatcgacgggattctctctctgggaaggaaaaaaaagaaaagtcctccaagcccaaagatccaccccccttcgagggcatggagatcgacgaggtcgccaatattaacgatatggatgagtacatcgaacttttgtacgaagacatcccagacaaggtacgcggctcagcgctaattctgcagttggccaggaacccagacaacctggaagagctcttgctcaacgaaacagcactaggggccctggcaagagttctgagggaggactggaaacagtcagtggaattggccacaaacataatttacatcttcttctgtttctcttcattctctcagttccatggattgattacacactataagatcggtgcgctatgcatgaatatcatcgaccacgagctcaagaggcacgagctgtggcaggaggaactttctaagaaaaagaaggcagtagacgaggatcctgaaaatcaaaccttaagaaaagattacgagaaaactttcaagaagtatcagggcttagtggtgaaacaggaacagctcctaagagtggcactgtacttactgttgaacctggctgaagacacacgaacagagctcaagatgaggaataagaacatcgtccacatgcttgttaaggctctcgaccgggacaatttcgaacttcttatccttgttgtctcgtttctcaagaaactgagcatattcatggaaaacaaaaatgacatggtcgaaatggacatcgtggagaagctcgtaaagatgataccttgcgagcacgaggacctcttgaatatcacgttgaggttgcttcttaacttgtccttcgacaccggcctccggaataaaatggtgcaagttggacttctgcctaagctgacagccctgttgggaaacgacaactacaagcagattgccatgtgcgtgctctaccatatcagcatggatgatagattcaaatcgatgtttgcttacacagactgcatccctcagcttatgaagatgctgtttgaatgcagcgacgaacgcatagatctagagcttataagcttctgcattaacctggctgcaaacaaacggaatgtccagcttatatgtgaaggaaacggcctgaagatgttgatgaagagggctttgaagttcaaagaccccctgctcatgaaaatgatccgcaacatttctcagcatgatggaccgactaagaacctgttcattgattacgtgggggatctggccgcccagatctccaatgatgaggaggaagagtttgtgattgaatgcctgggtaccttggccaatcttacaattccggatctggactgggagctcgtgctgaaggagtacaagctcgttccatacctcaaggacaaacttaaaccaggcgcagcagaggacgaccttgtgttggaagtagtgataatgatcggtactgtgagcatggatgattcctgcgcagccctcctggccaaaagtgggataattcctgcacttatagagctgttgaatgcccaacaggaggacgacgaatttgtgtgccagataatttacgtcttctatcagatggtttttcaccaggccacgcgcgatgtgatcattaaggagacgcaggcacctgcctatctcattgacctgatgcatgataaaaacaatgagatacgaaaggtctgtgacaacaccctggatatcatcgcagaatacgatgaggaatgggcaaaaaagatccaatctgagaagtttaggtggcataactcccaatggctggagatggttgagtcacggcagatggatgaaagcgagcagtatctctacggcgacgatcgcatcgaaccctatatccatgagggggacatactggaaaggccggatctgttctacaattctgatggacttattgcgtccgagggcgccatctcacccgacttttttaatgattatcacctgcaaaacggcgacgtcgtcgggcagcactcttttccgggatctctcggcatggacggcttcggccaaccagtgggcatccttgggcgacccgctaccgcgtacggcttccggcctgacgagccttactactacgggtatggtagctag

SEQ ID NO: 81559 - DNA, 1485 bp, Artificial Sequence
  derived and/or modified sequence
atgcggaacaagaacatcgtgcacatgctggtgaaggccctggaccgggacaatttcgaactccttattctcgttgtgtcttttctgaagaaactctccatttttatggagaacaaaaacgatatggtggagatggatattgttgaaaaattagttaagatgatcccatgcgaacacgaagatctgctgaatatcactctgcgcctgctactgaacttatccttcgatactggcctgcgcaataaaatggtgcaggtaggactcctccctaaattgaccgccctactggggaatgacaactataagcagattgcaatgtgcgtcttgtaccatatttccatggacgatcgtttcaaaagtatgtttgcttacaccgattgtataccacagctcatgaaaatgctgttcgaatgttccgacgaacggatcgacctagagctcatctctttctgcataaatctggcggccaataaacgcaatgtgcaactaatttgcgagggaaatggcctgaaaatgctcatgaagagggcacttaagttcaaagatcctttgctaatgaagatgatccggaatatcagccagcatgacgggcctaccaagaacttatttatagactacgttggagacctggccgcacagatatccaatgacgaggaggaggagtttgtgatcgagtgcctcggaaccctggccaacctgaccattccagacctggactgggaactggtgttgaaggagtacaagttagtaccctatctgaaggacaaattaaaaccaggcgctgccgaagacgacttagtgctagaagtggtaatcatgattggtacagtgagcatggacgattcctgtgccgccctgctggctaaatccggcatcattcctgcgttgatagaactgcttaacgcccaacaggaggatgacgaatttgtgtgtcagataatatatgtgttttaccagatggtcttccatcaggctacacgtgatgtcataatcaaggaaacacaggccccggcctacctgatcgacctcatgcacgacaagaataacgaaatacgaaaggtgtgcgataacaccttagacatcattgccgagtacgacgaggagtgggctaaaaaaatacaaagcgaaaaatttagatggcacaattctcagtggctagagatggtggaatcccgtcagatggatgagagtgagcagtacctatacggagatgaccgaattgagccatatattcatgaaggcgatatcctggagcgccctgatctgttttataactccgatgggctgattgctagtgagggtgccatttctccagatttttttaacgactaccatctccaaaacggtgatgtggtggggcagcatagttttccggggagcctcggaatggatggcttcgggcagcccgtggggatcttagggcgacctgccaccgcttacggcttcaggcctgatgaaccgtattactatgggtatggaagctag

SEQ ID NO: 81560 - DNA, 2259 bp, Artificial Sequence
  derived and/or modified sequence
atgggggacccaatgcttggcgagcgtaaagaatgtcaaaaaatcattaggctaaaatcgttaaacgccaacacagacatcacatccttggctaggaaggtcgtggaagaatgtaaactcatccacccttctaagctcaatgaggtcgaacagctcctatattatctccagaaccgacgcgactctctctcaggaaaagagaagaaggagaagtcctccaagccaaaggaccctcctccttttgaaggcatggagatcgacgaagtagccaacattaacgacatggatgaatatatcgaactcttgtatgaggatataccagacaaagtgaggggtagcgccctgatcctccagctggctcgaaatccggacaatttggaggagctgctgctcaacgagactgccctgggtgccctcgctcgagtacttcgggaggactggaagcaatcagtggagctggccacaaacatcatctacatatttttctgttttagcagcttctcccagtttcacggactgatcacgcattacaaaatcggggctctgtgtatgaatatcatagaccatgagttaaagcggcatgagctctggcaagaggagctatctaagaagaagaaagcagttgatgaagaccctgagaatcaaacacttcgcaaagattatgagaaaacttttaagaaataccagggcctggtggtgaagcaggaacagctgctgagggtggctctgtaccttttgctgaacctagcagaggatactcgcactgaactcaaaatgaggaataaaaatatcgtgcacatgttagtgaaagcgctggaccgagataatttcgagctcctgatcctcgtggtctctttcctaaaaaagctttccatttttatggaaaacaaaaacgacatggtggaaatggatatagtcgagaagctggtcaagatgattccctgcgaacacgaggaccttcttaacattactctgcgcctgttattgaatctttcattcgacactgggcttagaaataagatggtgcaggttggtctgttgccgaagctcaccgccctgctaggaaacgataattataaacagattgcgatgtgcgtgctgtatcatattagtatggacgacaggttcaaaagtatgttcgcctacaccgattgcatccctcaactgatgaaaatgttattcgaatgttccgatgagaggattgacttggagctgatctccttttgtatcaacctggcggctaacaaacggaacgtgcaactgatctgtgaaggcaatggactaaagatgctgatgaagcgagccctgaaattcaaggacccactgctcatgaagatgattcgcaatatatctcagcatgatggcccaacaaaaaatctgttcatagattacgtgggcgacctcgcagcacagatctccaacgacgaagaggaagaatttgtcatagaatgtttgggaacattagccaatctgacaatccccgacttagattgggagctcgtcctgaaagaatataagctggtgccatacttaaaagacaaactaaagccgggagcggctgaggacgatttggtgcttgaagtggttataatgatcggtactgtgtcaatggatgactcctgcgcagccctgctcgcaaagtccggcatcatcccggctcttatcgagttgctgaatgcacagcaggaagacgacgagttcgtatgccaaattatctatgtgttctatcagatggtgtttcaccaggccacaagagatgtgatcataaaggaaacccaggcgccagcttatcttatagacctgatgcacgacaaaaataacgagatccggaaagtatgcgacaacactctggatataatcgccgagtacgacgaggagtgggctaagaaaattcagtccgagaagttcaggtggcacaactctcagtggcttgaaatggtggagtcaagacaaatggacgagtccgagcaatatctgtatggcgatgatcggatcgagccatatatacatgagggagacatcctcgagcgacccgacctcttttataatagcgacgggcttatcgcgtcagaaggtgccatctctcccgacttcttcaatgactaccatcttcagaacggggacgtcgtcggccagcactccttccctggcagccttgggatggatggcttcggccagcctgtgggcatcctgggacgccctgctacagcctatgggttcagacctgacgaaccatattattacgggtacggtagctag

SEQ ID NO: 81561 - DNA, 1485 bp, Artificial Sequence
  derived and/or modified sequence
atgcggaataagaatattgtccatatgctggttaaagccctcgacagggacaactttgagcttctaatcttagtcgtctctttcctgaagaagctctctatcttcatggaaaacaagaacgatatggttgagatggatatagtcgagaagctcgtcaagatgattccctgcgaacacgaggatttactgaacattacgctgagactcctgctcaatttatccttcgataccggtctcagaaacaagatggtgcaagtgggtctgctcccaaagctcaccgcacttttgggcaacgataattacaaacagattgctatgtgcgtgttgtaccatatttctatggatgatcggttcaagagcatgtttgcttatactgattgtataccacagcttatgaagatgctgtttgagtgttccgatgagcggatcgacttggagctaatcagcttctgcatcaatctggcagcaaataaacggaatgtgcaactgatatgtgagggcaatgggttgaagatgctgatgaaaagagcactgaagtttaaagatcccctgctgatgaaaatgattagaaatatttcgcagcatgacgggcctacaaagaacctgtttatagattacgtcggggacttggcagcccagatctccaatgatgaagaggaggagttcgtgatcgaatgcctcgggacgttggccaacttgactatccctgacctcgactgggaactagttctgaaagaatacaagcttgtgccctacctaaaagacaagctgaagcccggtgctgccgaggatgacctcgttctagaggtggtgatcatgataggaacagtgtccatggacgactcatgtgcggctctgttggccaagtctgggatcatccctgccctgattgagttattgaatgcccagcaggaagacgatgaatttgtctgtcagatcatttacgtattctatcagatggtttttcaccaggccactcgggacgtaattattaaggagacgcaggccccagcctaccttattgacttaatgcatgacaaaaacaacgagattcgtaaggtttgcgacaacacactcgacataatcgctgagtacgacgaggagtgggctaaaaagatacaatctgagaaatttcggtggcataatagtcaatggctcgaaatggtggagagcagacagatggacgagtcagagcagtacctttatggtgacgatcggatagaaccttatatccacgaaggagacatcttggaacgacccgacctgttctacaatagcgatggcttaatcgccagcgagggcgctatatcacctgattttttcaatgactaccatcttcagaatggggacgtcgtcggtcagcacagcttccctggctcccttgggatggacggctttgggcagccagtaggcatcctgggacggcctgctaccgcatatggcttcaggcccgacgaaccctattactacggatacggcagttag

SEQ ID NO: 81562 - DNA, 2259 bp, Artificial Sequence
  derived and/or modified sequence
atgggcgaccccatgctgggcgagagaaaggagtgccagaagatcatcagactgaagagcctgaacgccaacaccgacatcaccagcctggccagaaaggtggtggaggagtgcaagctgatccaccccagcaagctgaacgaggtggagcagctgctgtactacctgcagaacagaagagacagcctgagcggcaaggagaagaaggagaagagcagcaagcccaaggaccccccccccttcgagggcatggagatcgacgaggtggccaacatcaacgacatggacgagtacatcgagctgctgtacgaggacatccccgacaaggtgagaggcagcgccctgatcctgcagctggccagaaaccccgacaacctggaggagctgctgctgaacgagaccgccctgggcgccctggccagagtgctgagagaggactggaagcagagcgtggagctggccaccaacatcatctacatcttcttctgcttcagcagcttcagccagttccacggcctgatcacccactacaagatcggcgccctgtgcatgaacatcatcgaccacgagctgaagagacacgagctgtggcaggaggagctgagcaagaagaagaaggccgtggacgaggaccccgagaaccagaccctgagaaaggactacgagaagaccttcaagaagtaccagggcctggtggtgaagcaggagcagctgctgagagtggccctgtacctgctgctgaacctggccgaggacaccagaaccgagctgaagatgagaaacaagaacatcgtgcacatgctggtgaaggccctggacagagacaacttcgagctgctgatcctggtggtgagcttcctgaagaagctgagcatcttcatggagaacaagaacgacatggtggagatggacatcgtggagaagctggtgaagatgatcccctgcgagcacgaggacctgctgaacatcaccctgagactgctgctgaacctgagcttcgacaccggcctgagaaacaagatggtgcaggtgggcctgctgcccaagctgaccgccctgctgggcaacgacaactacaagcagatcgccatgtgcgtgctgtaccacatcagcatggacgacagattcaagagcatgttcgcctacaccgactgcatcccccagctgatgaagatgctgttcgagtgcagcgacgagagaatcgacctggagctgatcagcttctgcatcaacctggccgccaacaagagaaacgtgcagctgatctgcgagggcaacggcctgaagatgctgatgaagagagccctgaagttcaaggaccccctgctgatgaagatgatcagaaacatcagccagcacgacggccccaccaagaacctgttcatcgactacgtgggcgacctggccgcccagatcagcaacgacgaggaggaggagttcgtgatcgagtgcctgggcaccctggccaacctgaccatccccgacctggactgggagctggtgctgaaggagtacaagctggtgccctacctgaaggacaagctgaagcccggcgccgccgaggacgacctggtgctggaggtggtgatcatgatcggcaccgtgagcatggacgacagctgcgccgccctgctggccaagagcggcatcatccccgccctgatcgagctgctgaacgcccagcaggaggacgacgagttcgtgtgccagatcatctacgtgttctaccagatggtgttccaccaggccaccagagacgtgatcatcaaggagacccaggcccccgcctacctgatcgacctgatgcacgacaagaacaacgagatcagaaaggtgtgcgacaacaccctggacatcatcgccgagtacgacgaggagtgggccaagaagatccagagcgagaagttcagatggcacaacagccagtggctggagatggtggagagcagacagatggacgagagcgagcagtacctgtacggcgacgacagaatcgagccctacatccacgagggcgacatcctggagagacccgacctgttctacaacagcgacggcctgatcgccagcgagggcgccatcagccccgacttcttcaacgactaccacctgcagaacggcgacgtggtgggccagcacagcttccccggcagcctgggcatggacggcttcggccagcccgtgggcatcctgggcagacccgccaccgcctacggcttcagacccgacgagccctactactacggctacggcagctag

SEQ ID NO: 81563 - DNA, 1485 bp, Artificial Sequence
  derived and/or modified sequence
atgagaaacaagaacatcgtgcacatgctggtgaaggccctggacagagacaacttcgagctgctgatcctggtggtgagcttcctgaagaagctgagcatcttcatggagaacaagaacgacatggtggagatggacatcgtggagaagctggtgaagatgatcccctgcgagcacgaggacctgctgaacatcaccctgagactgctgctgaacctgagcttcgacaccggcctgagaaacaagatggtgcaggtgggcctgctgcccaagctgaccgccctgctgggcaacgacaactacaagcagatcgccatgtgcgtgctgtaccacatcagcatggacgacagattcaagagcatgttcgcctacaccgactgcatcccccagctgatgaagatgctgttcgagtgcagcgacgagagaatcgacctggagctgatcagcttctgcatcaacctggccgccaacaagagaaacgtgcagctgatctgcgagggcaacggcctgaagatgctgatgaagagagccctgaagttcaaggaccccctgctgatgaagatgatcagaaacatcagccagcacgacggccccaccaagaacctgttcatcgactacgtgggcgacctggccgcccagatcagcaacgacgaggaggaggagttcgtgatcgagtgcctgggcaccctggccaacctgaccatccccgacctggactgggagctggtgctgaaggagtacaagctggtgccctacctgaaggacaagctgaagcccggcgccgccgaggacgacctggtgctggaggtggtgatcatgatcggcaccgtgagcatggacgacagctgcgccgccctgctggccaagagcggcatcatccccgccctgatcgagctgctgaacgcccagcaggaggacgacgagttcgtgtgccagatcatctacgtgttctaccagatggtgttccaccaggccaccagagacgtgatcatcaaggagacccaggcccccgcctacctgatcgacctgatgcacgacaagaacaacgagatcagaaaggtgtgcgacaacaccctggacatcatcgccgagtacgacgaggagtgggccaagaagatccagagcgagaagttcagatggcacaacagccagtggctggagatggtggagagcagacagatggacgagagcgagcagtacctgtacggcgacgacagaatcgagccctacatccacgagggcgacatcctggagagacccgacctgttctacaacagcgacggcctgatcgccagcgagggcgccatcagccccgacttcttcaacgactaccacctgcagaacggcgacgtggtgggccagcacagcttccccggcagcctgggcatggacggcttcggccagcccgtgggcatcctgggcagacccgccaccgcctacggcttcagacccgacgagccctactactacggctacggcagctag

SEQ ID NO: 81564 - protein, 421 aa, Artificial Sequence
  derived and/or modified sequence
MGQAGCKGLCLSLFDYKTEKYVIAKNKKVGLLYRLLQASILAYLVVWVFLIKKGYQDVDTSLQSAVITKVKGVAFTNTSDLGQRIWDVADYVIPAQGENVFFVVTNLIVTPNQRQNVCAENEGIPDGACSKDSDCHAGEAVTAGNGVKTGRCLRRENLARGTCEIFAWCPLETSSRPEEPFLKEAEDFTIFIKNHIRFPKFNFSNNVMDVKDRSFLKSCHFGPKNHYCPIFRLGSVIRWAGSDFQDIALEGGVIGINIEWNCDLDKAASECHPHYSFSRLDNKLSKSVSSGYNFRFARYYRDAAGVEFRTLMKAYGIRFDVMVNGKGAFFCDLVLIYLIKKREFYRDKKYEEVRGLEDSSQEAEDEASGLGLSEQLTSGPGLLGMPEQQELQEPPEAKRGSSSQKGNGSVCPQLLEPHRST

SEQ ID NO: 81565 - DNA, 1266 bp, Artificial Sequence
  derived and/or modified sequence
atgggccaggccggctgcaagggcctgtgcctgagcctgttcgactacaagaccgagaagtacgtgatcgccaagaacaagaaggtgggcctgctgtacagactgctgcaggccagcatcctggcctacctggtggtgtgggtgttcctgatcaagaagggctaccaggacgtggacaccagcctgcagagcgccgtgatcaccaaggtgaagggcgtggccttcaccaacaccagcgacctgggccagagaatctgggacgtggccgactacgtgatccccgcccagggcgagaacgtgttcttcgtggtgaccaacctgatcgtgacccccaaccagagacagaacgtgtgcgccgagaacgagggcatccccgacggcgcctgcagcaaggacagcgactgccacgccggcgaggccgtgaccgccggcaacggcgtgaagaccggcagatgcctgagaagagagaacctggccagaggcacctgcgagatcttcgcctggtgccccctggagaccagcagcagacccgaggagcccttcctgaaggaggccgaggacttcaccatcttcatcaagaaccacatcagattccccaagttcaacttcagcaacaacgtgatggacgtgaaggacagaagcttcctgaagagctgccacttcggccccaagaaccactactgccccatcttcagactgggcagcgtgatcagatgggccggcagcgacttccaggacatcgccctggagggcggcgtgatcggcatcaacatcgagtggaactgcgacctggacaaggccgccagcgagtgccacccccactacagcttcagcagactggacaacaagctgagcaagagcgtgagcagcggctacaacttcagattcgccagatactacagagacgccgccggcgtggagttcagaaccctgatgaaggcctacggcatcagattcgacgtgatggtgaacggcaagggcgccttcttctgcgacctggtgctgatctacctgatcaagaagagagagttctacagagacaagaagtacgaggaggtgagaggcctggaggacagcagccaggaggccgaggacgaggccagcggcctgggcctgagcgagcagctgaccagcggccccggcctgctgggcatgcccgagcagcaggagctgcaggagccccccgaggccaagagaggcagcagcagccagaagggcaacggcagcgtgtgcccccagctgctggagccccacagaagcacctag

SEQ ID NO: 81566 - DNA, 1266 bp, Artificial Sequence
  derived and/or modified sequence
atggggcaggctgggtgtaaaggtttgtgcctctccctgttcgactacaagacagagaagtacgttattgcaaagaataaaaaagtcggcttgttgtacaggttgttgcaggctagcattctcgcctacttggtagtgtgggtgttcctcataaaaaagggatatcaggatgtagatactagtctacagtccgccgttatcacaaaggttaagggcgtggcattcactaacacgtcagacctggggcagcggatctgggatgtcgcagactacgtaattccggcccagggcgaaaatgtctttttcgtggtgaccaatctaatcgtgactcccaatcagcgacagaatgtgtgtgctgaaaatgagggaattcccgacggcgcctgcagcaaggattcagactgccatgcaggcgaggcagtgaccgcggggaatggggtaaaaacagggcgatgcctacgcagggagaatctcgcccgtggtacttgtgagatctttgcctggtgccctcttgagactagtagccgacccgaggaacctttcctgaaggaggctgaagactttaccatcttcattaagaatcatattagatttcctaaattcaatttttccaacaacgtgatggacgttaaagacaggtcattccttaaatcgtgtcacttcggacccaaaaaccattattgccccatttttagactggggtctgtgattcggtgggcaggaagtgacttccaagatatcgcgctagagggcggagtcatcggaatcaatatcgaatggaactgtgatctggataaagcagcaagtgaatgtcaccctcattatagcttctctagacttgacaataagctatccaaatccgtctcgagcggctataacttccggttcgccagatattatagagacgcagccggagtcgagtttcgcaccctgatgaaggcctatggaatcagattcgatgttatggtgaatggcaagggcgcctttttctgtgacctggtccttatatatcttatcaagaaacgcgagttttatcgggacaaaaagtacgaggaagtgcgcgggctcgaggactcaagtcaggaagcggaggatgaagccagtggcttgggcctctctgaacagctcacatcggggccaggcctactgggaatgcctgaacagcaggaactgcaggaacccccggaggcaaagcggggatctagcagtcagaaaggaaatggcagcgtatgtccacaattgctggagccacaccgatctacttag

SEQ ID NO: 81567 - DNA, 1266 bp, Artificial Sequence
  derived and/or modified sequence
atgggccaggccggctgcaagggcctgtgcctgagcctgtttgactacaagacagagaagtatgtgattgccaagaacaagaaggtgggcctgctgtaccgcctgctgcaggccagcatcctggcctacctggtggtgtgggtgttcctgatcaagaagggctaccaggatgtggacaccagcctgcagagcgctgtgatcaccaaggtgaagggcgtggccttcaccaacaccagtgacctgggccagaggatctgggatgtggccgactatgtgatcccagcccagggagaaaatgtgttctttgtggtgaccaacctgattgtgacccccaaccagaggcagaatgtgtgtgccgagaatgaaggcatcccagatggagcctgcagcaaggacagcgactgccacgccggggaggccgtgacagctggaaatggagtgaagacaggccgctgcctgcggcgggagaacctggcccggggcacctgtgagatctttgcctggtgccccctggagaccagcagcaggcctgaggagcccttcctgaaggaggccgaggacttcaccatcttcatcaagaaccacatccgcttccccaagttcaacttcagcaacaacgtgatggatgtgaaggacaggagcttcctgaagagctgccacttcggccccaagaaccactactgccccatcttccggctgggcagcgtcatccgctgggccggcagtgacttccaggacatcgccctggagggcggcgtcatcggcatcaacatcgagtggaactgtgacctggacaaggccgccagcgagtgccacccccactacagcttcagccggctggacaacaagctgagcaagtctgtgagcagcggctacaacttccgctttgcccgctactacagagatgctgctggggtggagttccgcaccctgatgaaggcctacggcatccgctttgatgtgatggtgaatggcaagggggccttcttctgtgacctggtgctgatctacctgatcaagaagcgggagttctacagagacaagaagtatgaggaggtgcggggcctggaggacagcagccaggaggccgaggatgaggccagcggcctgggcctgtctgagcagctgaccagcggccctggcctgctgggcatgcctgagcagcaggagctgcaggagcccccagaggccaagaggggcagcagcagccagaagggaaatggatctgtgtgcccccagctgctggagccccacaggagcacctag

SEQ ID NO: 81568 - DNA, 1266 bp, Artificial Sequence
  derived and/or modified sequence
atgggccaggccggctgcaagggcctgtgcctgagcctgttcgactacaaaacagagaagtatgtcatcgcgaaaaacaagaaggtcggcctgctgtatagactgcttcaggctagtatattggcctatcttgtggtgtgggtattccttattaaaaaaggctatcaggacgtggacacctccttacaaagcgcggtcattacaaaagttaaaggagtggctttcacaaacacgtccgacctgggtcaacggatttgggatgttgccgactatgtaatccctgcgcaaggtgagaatgtgttctttgttgtcactaatttaattgtgaccccaaaccagcggcagaacgtctgtgcagaaaatgagggaatcccagacggggcatgctctaaagacagcgactgccacgccggcgaggctgtgaccgctgggaacggagtgaagaccggcagatgcttacgcagggaaaacttggcgagagggacttgcgagattttcgcttggtgtcctcttgagacttctagtagacccgaagaacccttccttaaagaggccgaggatttcactatttttatcaagaaccatatccgattccccaagtttaattttagcaacaatgtcatggatgtaaaggataggtcctttctgaagagctgccacttcggccctaaaaaccattactgcccaatcttccgactaggttcagtgatccgttgggctggcagcgacttccaggacattgctctggagggcggcgtgataggcatcaacatagagtggaactgtgacttggacaaggcggcaagcgagtgccaccctcattacagtttcagccgcctggataataagttatctaagtctgtcagctccgggtataactttcgcttcgcaaggtattacagagacgccgctggcgtggagtttcgcacactgatgaaagcttatggcatcaggttcgacgtgatggtgaacggtaaaggcgcctttttctgtgatctcgtgctgatctatttaatcaaaaaaagggaattttaccgggacaagaagtacgaagaggtccgcgggctggaggattcatcacaggaagcagaagacgaggctagtgggctcggactgagcgaacagctgaccagcgggcccgggctattagggatgccagagcaacaggagctgcaggagccccctgaggccaaacggggtagctcatcccagaagggcaatggatccgtgtgccctcagttattagaaccacacagatccacctag

SEQ ID NO: 81569 - DNA, 1998 bp, Artificial Sequence
  derived and/or modified sequence
cgggcgccgggcgcgcagggaccgagggaccgagtgctccccatgagcgcacgtgggccgggcggtccgcaagcccggctgagagcgcgccatggggcaggcgggctgcaaggggctctgcctgtcgctgttcgactacaagaccgagaagtatgtcatcgccaagaacaagaaggtgggcctgctgtaccggctgctgcaggcctccatcctggcgtacctggtcgtatgggtgttcctgataaagaagggttaccaagacgtcgacacctccctgcagagtgctgtcatcaccaaagtcaagggcgtggccttcaccaacacctcggatcttgggcagcggatctgggatgtcgccgactacgtcattccagcccagggagagaacgtcttttttgtggtcaccaacctgattgtgacccccaaccagcggcagaacgtctgtgctgagaatgaaggcattcctgatggcgcgtgctccaaggacagcgactgccacgctggggaagcggttacagctggaaacggagtgaagaccggccgctgcctgcggagagagaacttggccaggggcacctgtgagatctttgcctggtgcccgttggagacaagctccaggccggaggagccattcctgaaggaggccgaagacttcaccattttcataaagaaccacatccgtttccccaaattcaacttctccaacaatgtgatggacgtcaaggacagatctttcctgaaatcatgccactttggccccaagaaccactactgccccatcttccgactgggctccgtgatccgctgggccgggagcgacttccaggatatagccctggagggtggcgtgataggaattaatattgaatggaactgtgatcttgataaagctgcctctgagtgccaccctcactattcttttagccgtctggacaataaactttcaaagtctgtctcctccgggtacaacttcagatttgccagatattaccgagacgcagccggggtggagttccgcaccctgatgaaagcctacgggatccgctttgacgtgatggtgaacggcaagggtgctttcttctgcgacctggtactcatctacctcatcaaaaagagagagttttaccgtgacaagaagtacgaggaagtgaggggcctagaagacagttcccaggaggccgaggacgaggcatcggggctggggctatctgagcagctcacatctgggccagggctgctggggatgccggagcagcaggagctgcaggagccacccgaggcgaagcgtggaagcagcagtcagaaggggaacggatctgtgtgcccacagctcctggagccccacaggagcacgtgaattgcctctgcttacgttcaggccctgtcctaaacccagccgtctagcacccagtgatcccatgcctttgggaatcccaggatgctgcccaacgggaaatttgtacattgggtgctatcaatgccacatcacagggaccagccatcacagagcaaagtgacctccacgtctgatgctggggtcatcaggacggacccatcatggctgtctttttgccccaccccctgccgtcagttcttcctttctccgtggctggcttcccgcactagggaacgggttgtaaatggggaacatgacttccttccggagtccttgagcacctcagctaaggaccgcagtgccctgtagagttcctagattacctcactgggaatagcattgtgcgtgtccggaaaagggctccatttggttccagcccactcccctctgcaagtgccgcagcttccctcagagcatactctccagtggatccaagtactctctctcctaaagacaccaccttcctgccagctgtttgcccttaggccagtacacagaattaaagtgggggagatggcagacgctttctgggacctgcccaagatatgtattctctgacactcttatttggtcataaaacaataaatggtgtcaatttcaaa

SEQ ID NO: 81570 - DNA, 1266 bp, Artificial Sequence
  derived and/or modified sequence
atgggtcaggctggctgcaagggcctttgcctctccctgtttgactacaaaaccgagaagtatgtgatcgccaagaacaagaaagttggtctgctgtaccgtttactacaggctagtattctggcctacctggttgtgtgggtgtttctaatcaagaagggctaccaggatgttgacacttctttgcaatccgcggtaattactaaagtaaaaggtgtggcctttactaacacaagcgatttaggacagcgaatctgggatgtcgccgactacgtcattcctgctcaaggggaaaacgttttctttgtggttacaaatctgattgtgacccccaatcagcgccagaatgtatgtgccgagaatgaaggaattcctgatggtgcgtgtagcaaagactcggactgccacgccggagaagcagtgacagcaggcaacggtgtcaagactgggaggtgcctgaggcgcgaaaatctcgccaggggcacctgtgagattttcgcatggtgcccgctagaaacttcgtctcggcctgaggagccgttccttaaggaggccgaagacttcactatttttatcaagaaccatatacgcttccccaagtttaatttttcaaacaatgtcatggacgtgaaggacaggagcttcctcaaaagttgccacttcggacctaaaaaccattactgcccaatcttccgactgggcagcgttattaggtgggccggttccgatttccaagacatagcgctggaagggggtgtgatcgggattaacatcgagtggaactgtgatctggataaggcagcctctgagtgccatccacactatagtttcagccgacttgacaacaagctcagcaagagcgtcagtagcgggtacaattttaggtttgccaggtactacagagacgcagcaggcgtggagtttcggacgttgatgaaagcctatggcattcgctttgatgtcatggtgaacgggaagggcgcattcttctgtgatctcgtcttaatatatttaattaaaaaacgcgagttctatcgcgataaaaaatacgaggaggtgcggggtcttgaggacagttcccaggaagcagaagatgaggcatctggactgggactgtctgagcaactcactagcggaccaggactcctaggcatgccagagcaacaagagcttcaagagcctccggaggccaaacgcggttcgagctcgcagaaggggaacggaagcgtttgtcctcagcttctagagccccacagatctacctag

SEQ ID NO: 81571 - protein, 398 aa, Artificial Sequence
  derived and/or modified sequence
MGQAGCKGLCLSLFDYKTEKYVIAKNKKVGLLYRLLQASILAYLVVWVFLIKKGYQDVDTSLQSAVITKVKGVAFTNTSDLGQRIWDVADYVIPAQNEGIPDGACSKDSDCHAGEAVTAGNGVKTGRCLRRENLARGTCEIFAWCPLETSSRPEEPFLKEAEDFTIFIKNHIRFPKFNFSKSNVMDVKDRSFLKSCHFGPKNHYCPIFRLGSVIRWAGSDFQDIALEGGVIGINIEWNCDLDKAASECHPHYSFSRLDNKLSKSVSSGYNFRFARYYRDAAGVEFRTLMKAYGIRFDVMVNGKGAFFCDLVLIYLIKKREFYRDKKYEEVRGLEDSSQEAEDEASGLGLSEQLTSGPGLLGMPEQQELQEPPEAKRGSSSQKGNGSVCPQLLEPHRST

SEQ ID NO: 81572 - protein, 362 aa, Artificial Sequence
  derived and/or modified sequence
MPTYRPPSHRWVFLIKKGYQDVDTSLQSAVITKVKGVAFTNTSDLGQRIWDVADYVIPAQNEGIPDGACSKDSDCHAGEAVTAGNGVKTGRCLRRENLARGTCEIFAWCPLETSSRPEEPFLKEAEDFTIFIKNHIRFPKFNFSKSNVMDVKDRSFLKSCHFGPKNHYCPIFRLGSVIRWAGSDFQDIALEGGVIGINIEWNCDLDKAASECHPHYSFSRLDNKLSKSVSSGYNFRFARYYRDAAGVEFRTLMKAYGIRFDVMVNGKGAFFCDLVLIYLIKKREFYRDKKYEEVRGLEDSSQEAEDEASGLGLSEQLTSGPGLLGMPEQQELQEPPEAKRGSSSQKGNGSVCPQLLEPHRST

SEQ ID NO: 81573 - DNA, 1197 bp, Artificial Sequence
  derived and/or modified sequence
atgggccaggccggctgcaagggcctgtgcctgagcctgttcgactacaagaccgagaagtacgtgatcgccaagaacaagaaggtgggcctgctgtacagactgctgcaggccagcatcctggcctacctggtggtgtgggtgttcctgatcaagaagggctaccaggacgtggacaccagcctgcagagcgccgtgatcaccaaggtgaagggcgtggccttcaccaacaccagcgacctgggccagagaatctgggacgtggccgactacgtgatccccgcccagaacgagggcatccccgacggcgcctgcagcaaggacagcgactgccacgccggcgaggccgtgaccgccggcaacggcgtgaagaccggcagatgcctgagaagagagaacctggccagaggcacctgcgagatcttcgcctggtgccccctggagaccagcagcagacccgaggagcccttcctgaaggaggccgaggacttcaccatcttcatcaagaaccacatcagattccccaagttcaacttcagcaagagcaacgtgatggacgtgaaggacagaagcttcctgaagagctgccacttcggccccaagaaccactactgccccatcttcagactgggcagcgtgatcagatgggccggcagcgacttccaggacatcgccctggagggcggcgtgatcggcatcaacatcgagtggaactgcgacctggacaaggccgccagcgagtgccacccccactacagcttcagcagactggacaacaagctgagcaagagcgtgagcagcggctacaacttcagattcgccagatactacagagacgccgccggcgtggagttcagaaccctgatgaaggcctacggcatcagattcgacgtgatggtgaacggcaagggcgccttcttctgcgacctggtgctgatctacctgatcaagaagagagagttctacagagacaagaagtacgaggaggtgagaggcctggaggacagcagccaggaggccgaggacgaggccagcggcctgggcctgagcgagcagctgaccagcggccccggcctgctgggcatgcccgagcagcaggagctgcaggagccccccgaggccaagagaggcagcagcagccagaagggcaacggcagcgtgtgcccccagctgctggagccccacagaagcacctag

SEQ ID NO: 81574 - DNA, 1089 bp, Artificial Sequence
  derived and/or modified sequence
atgcccacctacagaccccccagccacagatgggtgttcctgatcaagaagggctaccaggacgtggacaccagcctgcagagcgccgtgatcaccaaggtgaagggcgtggccttcaccaacaccagcgacctgggccagagaatctgggacgtggccgactacgtgatccccgcccagaacgagggcatccccgacggcgcctgcagcaaggacagcgactgccacgccggcgaggccgtgaccgccggcaacggcgtgaagaccggcagatgcctgagaagagagaacctggccagaggcacctgcgagatcttcgcctggtgccccctggagaccagcagcagacccgaggagcccttcctgaaggaggccgaggacttcaccatcttcatcaagaaccacatcagattccccaagttcaacttcagcaagagcaacgtgatggacgtgaaggacagaagcttcctgaagagctgccacttcggccccaagaaccactactgccccatcttcagactgggcagcgtgatcagatgggccggcagcgacttccaggacatcgccctggagggcggcgtgatcggcatcaacatcgagtggaactgcgacctggacaaggccgccagcgagtgccacccccactacagcttcagcagactggacaacaagctgagcaagagcgtgagcagcggctacaacttcagattcgccagatactacagagacgccgccggcgtggagttcagaaccctgatgaaggcctacggcatcagattcgacgtgatggtgaacggcaagggcgccttcttctgcgacctggtgctgatctacctgatcaagaagagagagttctacagagacaagaagtacgaggaggtgagaggcctggaggacagcagccaggaggccgaggacgaggccagcggcctgggcctgagcgagcagctgaccagcggccccggcctgctgggcatgcccgagcagcaggagctgcaggagccccccgaggccaagagaggcagcagcagccagaagggcaacggcagcgtgtgcccccagctgctggagccccacagaagcacctag

SEQ ID NO: 81575 - DNA, 1197 bp, Artificial Sequence
  derived and/or modified sequence
atgggccaggccgggtgcaaaggactctgtctcagcctgttcgactacaagaccgaaaaatacgtgatcgctaagaacaagaaggtgggacttctttacagattattacaagcttctatattggcatacctcgtcgtgtgggttttcttgataaagaaaggatatcaggatgtcgatacgagccttcagtctgccgtgattactaaggtgaagggcgttgcctttacaaatactagtgatttgggtcaaaggatttgggatgtggcagactacgtgattcccgctcagaacgaagggattcctgacggcgcgtgcagtaaagattcagattgtcacgccggggaagcagtgacagctggcaacggggtcaagacagggcggtgcttgaggcgggaaaacctcgcacgggggacttgcgaaattttcgcatggtgccctctcgaaacatccagcaggcctgaggaacccttcctcaaggaagcagaagatttcacaattttcattaaaaatcatatcagattcccaaagttcaacttttccaaaagcaacgtcatggatgttaaggacagatcctttctgaagtcctgccacttcggaccgaaaaatcattactgcccaatctttcgccttggcagcgttatcaggtgggcgggctccgatttccaggacattgcactcgaaggtggagttattgggataaacattgagtggaactgcgatctggataaggccgcttctgagtgccacccccattattctttttcacgtcttgacaataagctcagtaaaagcgttagctctggatataatttcagattcgcacgctactatagagacgcggctggcgtcgaattccgcacacttatgaaggcctatggcattcgctttgacgtcatggtgaatggaaagggtgcgttcttctgcgacctggtgctgatctatctgatcaagaaaagagagttctatagagacaaaaagtacgaagaagtgcggggcctggaagactcttctcaggaagccgaggatgaagcgtctggcttaggactgtctgagcagctcacatctgggcctgggctgctaggaatgcctgagcaacaggagctgcaggaacctccagaggcgaagcgtggctcatcatcccagaaggggaacggcagcgtttgtcctcagttgcttgaacctcacaggagcacatag

SEQ ID NO: 81576 - DNA, 1089 bp, Artificial Sequence
  derived and/or modified sequence
atgccaacctacagacctccatcgcaccgatgggtgttcctgatcaagaagggctatcaggatgtggacacgagtctacagtccgccgtgattaccaaagtaaagggcgttgccttcactaacacatcagacctgggtcagcggatctgggacgtggcagattacgtaattcctgctcagaatgagggcatacccgatggcgcttgctcaaaggattcggactgccacgctggagaagccgtgaccgccgggaatggggtgaagaccgggcggtgcctcagaagggaaaatttagcaagaggaacatgtgagatctttgcatggtgccctcttgagacctcaagcagacctgaagagccctttctgaaggaggcagaagactttacgattttcattaagaaccatatcagattccccaagtttaacttcagtaaaagtaacgtcatggatgtcaaagacagatccttcctcaaatcctgccacttcggccccaagaaccattattgcccaatcttccgcctggggtccgttataagatgggccgggtcagatttccaggatatagcccttgaaggcggcgtgattggtataaacatcgaatggaactgcgacttagacaaagctgcaagcgaatgtcacccgcactactcgttctcacggttagacaacaagttgtctaaaagtgtatctagtggttacaactttcgcttcgcacgttattacagagacgccgcaggggtggaatttagaaccctgatgaaagcgtacggcatccgctttgacgtgatggtgaacggaaagggcgctttcttctgcgatctcgtgctgatatacttaattaaaaaacgggagttctacagggacaagaagtatgaggaggtcagggggctcgaggactcatcacaggaggctgaagacgaagcctctgggctcggcctttcagaacagctcacttctgggcctggcctgcttgggatgcccgagcagcaggaactccaggaaccacctgaggcaaagagaggtagttcatcacaaaagggaaatggaagcgtctgccctcaactgctggaaccacaccggagcacctag

SEQ ID NO: 81577 - DNA, 1197 bp, Artificial Sequence
  derived and/or modified sequence
atgggccaggccggctgcaagggcctgtgcctgagcctgtttgactacaagacagagaagtatgtgattgccaagaacaagaaggtgggcctgctgtaccgcctgctgcaggccagcatcctggcctacctggtggtgtgggtgttcctgatcaagaagggctaccaggatgtggacaccagcctgcagagcgctgtgatcaccaaggtgaagggcgtggccttcaccaacaccagtgacctgggccagaggatctgggatgtggccgactatgtgatcccagcccagaatgaaggcatcccagatggagcctgcagcaaggacagcgactgccacgccggggaggccgtgacagctggaaatggagtgaagacaggccgctgcctgcggcgggagaacctggcccggggcacctgtgagatctttgcctggtgccccctggagaccagcagcaggcctgaggagcccttcctgaaggaggccgaggacttcaccatcttcatcaagaaccacatccgcttccccaagttcaacttcagcaagagcaatgtgatggatgtgaaggaccgctccttcctgaagagctgccacttcggccccaagaaccactactgccccatcttccggctgggcagcgtcatccgctgggccggcagtgacttccaggacatcgccctggagggcggcgtgattggcatcaacatcgagtggaactgtgacctggacaaggccgccagcgagtgccacccccactacagcttcagccggctggacaacaagctgagcaagtctgtgagcagcggctacaacttccgctttgcccgctactacagagatgctgctggggtggagttccgcaccctgatgaaggcctacggcatccgctttgatgtgatggtgaatggaaaaggagccttcttctgtgacctggtgctgatctacctgatcaagaagcgggagttctacagagacaagaagtatgaggaggtgcggggcctggaggacagcagccaggaggctgaagatgaggccagcggcctgggcctgtctgagcagctgaccagcggccctggcctgctgggcatgcctgagcagcaggagctgcaggagcccccagaggccaagaggggcagcagcagccagaagggaaatggatctgtgtgcccccagctgctggagccccacaggagcacctag

SEQ ID NO: 81578 - DNA, 1089 bp, Artificial Sequence
  derived and/or modified sequence
atgcccacctaccggccccccagccaccgctgggtgttcctgatcaagaagggctaccaggatgtggacaccagcctgcagagcgctgtgatcaccaaggtgaagggcgtggccttcaccaacaccagtgacctgggccagaggatctgggatgtggccgactatgtgatcccagcccagaatgaaggcatcccagatggagcctgcagcaaggacagcgactgccacgccggggaggccgtgacagctggaaatggagtgaagacaggccgctgcctgcggcgggagaacctggcccggggcacctgtgagatctttgcctggtgccccctggagaccagcagcaggcctgaggagcccttcctgaaggaggccgaggacttcaccatcttcatcaagaaccacatccgcttccccaagttcaacttcagcaagagcaatgtgatggatgtgaaggaccgctccttcctgaagagctgccacttcggccccaagaaccactactgccccatcttccggctgggcagcgtcatccgctgggccggcagtgacttccaggacatcgccctggagggcggcgtgattggcatcaacatcgagtggaactgtgacctggacaaggccgccagcgagtgccacccccactacagcttcagccggctggacaacaagctgagcaagtctgtgagcagcggctacaacttccgctttgcccgctactacagagatgctgctggggtggagttccgcaccctgatgaaggcctacggcatccgctttgatgtgatggtgaatggaaaaggagccttcttctgtgacctggtgctgatctacctgatcaagaagcgggagttctacagagacaagaagtatgaggaggtgcggggcctggaggacagcagccaggaggctgaagatgaggccagcggcctgggcctgtctgagcagctgaccagcggccctggcctgctgggcatgcctgagcagcaggagctgcaggagcccccagaggccaagaggggcagcagcagccagaagggaaatggatctgtgtgcccccagctgctggagccccacaggagcacctag

SEQ ID NO: 81579 - DNA, 1197 bp, Artificial Sequence
  derived and/or modified sequence
atgggccaggccggctgcaagggcctgtgcctgagcctgttcgactacaagaccgagaaatacgtaatcgccaagaataagaaagtcggcttactctatcggctcctccaggcctccatactggcctacctggtggtgtgggtatttctgattaaaaagggctatcaggacgtagataccagcctgcagtccgctgttataactaaagttaagggagtggccttcaccaacacctcagacctcggacagcggatctgggacgtcgcggactacgtaataccagcccagaacgagggaattcccgatggtgcctgttctaaagatagtgactgtcacgcgggggaagccgtgacagccggaaacggggtgaagaccggcagatgtttgcgacgcgaaaatctggccaggggaacctgtgaaatttttgcgtggtgtccactcgagacatcctcgagaccagaggaacctttcctgaaagaggccgaggactttaccattttcattaaaaaccacattcgattcccaaaattcaatttctctaagagtaatgtgatggacgtcaaggacaggagcttcctgaaatcttgccattttggccccaaaaaccattactgtccaatctttaggcttgggagtgtgatccgttgggccggaagtgactttcaagacattgcactcgaaggcggcgtcattggtatcaatatcgagtggaattgcgatctggataaagccgcatcggagtgccatcctcactattcttttagccgactcgacaacaagttgtccaaaagcgtcagctctggttataactttcgattcgcgcgctattatagagacgccgccggggtcgaattccggacgctgatgaaggcctacggcattagattcgacgtaatggtgaacgggaagggtgcctttttttgtgacctggtattgatctacctgattaagaaaagggagttctaccgcgataagaaatacgaggaagtcagagggctcgaggacagctcccaggaggctgaagatgaggcgtccggcctggggctctctgaacagcttacatcaggccctggattactcggaatgccagaacagcaggagttgcaggaaccccccgaagcaaaacgaggaagttcctcacagaagggcaacggctcagtgtgcccccagctgttggaaccccaccgcagcacctag

SEQ ID NO: 81580 - DNA, 1089 bp, Artificial Sequence
  derived and/or modified sequence
atgcccacctaccggccccccagccaccggtgggtgttcctgatcaagaagggttaccaggatgtggatacgtctctgcagagcgcagtaataaccaaggtgaagggggtcgcgttcactaatacttcagatctggggcagagaatctgggacgtcgcagactatgtgatccccgcccagaacgagggaatcccggatggagcgtgtagtaaagactcagactgccatgccggagaggccgtgacagctggcaatggagtcaagactgggagatgcctgagacgagagaatctggccagaggcacatgtgagatttttgcctggtgcccacttgaaacctctagcagacctgaagaacctttcttaaaagaggctgaagactttaccatctttatcaaaaaccatattaggtttcccaagtttaacttttccaaaagtaatgtgatggatgttaaggacagatctttcctcaaatcatgtcacttcgggcccaaaaatcactactgccccattttccgcctggggtctgtgatacgatgggccggaagcgactttcaggacattgctctcgaaggaggggtaatcggtattaacattgagtggaattgtgacctggacaaggcggcctccgaatgccatcctcattacagcttttcccggcttgataacaaactgtcaaaatctgtgagttccggctataactttaggttcgcccggtattacagggacgcagccggcgtggaattcaggacgctcatgaaagcatacggcatcaggtttgatgttatggttaacggtaagggggctttcttctgcgatctggtactgatatatctcatcaaaaaacgagagttttatcgagataagaagtacgaggaggtccggggtttggaggatagctcccaagaggctgaggatgaagcgagcgggctcggactgagcgaacagctcacttcgggtcccggtctgctcgggatgccggagcagcaggagttgcaagagccgcccgaagccaagcgcggatcttctagccagaagggcaatggcagcgtgtgcccacaactcctggagccgcatcgcagcacctag

SEQ ID NO: 81581 - DNA, 2031 bp, Artificial Sequence
  derived and/or modified sequence
cagctcccagccgaggctttctcaaccgcgtcaataaaaggccgccccgacccgcccccgcgccccgcagccctgccggacaccccgggctgcagctgagcgggcgcagacgggccgaggcgggcgccgggcgcgcagggaccgagggaccgagtgctccccatgagcgcacgtgggccgggcggtccgcaagcccggctgagagcgcgccatggggcaggcgggctgcaaggggctctgcctgtcgctgttcgactacaagaccgagaagtatgtcatcgccaagaacaagaaggtgggcctgctgtaccggctgctgcaggcctccatcctggcgtacctggtcgtatgggtgttcctgataaagaagggttaccaagacgtcgacacctccctgcagagtgctgtcatcaccaaagtcaagggcgtggccttcaccaacacctcggatcttgggcagcggatctgggatgtcgccgactacgtcattccagcccagaatgaaggcattcctgatggcgcgtgctccaaggacagcgactgccacgctggggaagcggttacagctggaaacggagtgaagaccggccgctgcctgcggagagagaacttggccaggggcacctgtgagatctttgcctggtgcccgttggagacaagctccaggccggaggagccattcctgaaggaggccgaagacttcaccattttcataaagaaccacatccgtttccccaaattcaacttctccaaaagcaatgtgatggacgtcaaggacagatctttcctgaaatcatgccactttggccccaagaaccactactgccccatcttccgactgggctccgtgatccgctgggccgggagcgacttccaggatatagccctggagggtggcgtgataggaattaatattgaatggaactgtgatcttgataaagctgcctctgagtgccaccctcactattcttttagccgtctggacaataaactttcaaagtctgtctcctccgggtacaacttcagatttgccagatattaccgagacgcagccggggtggagttccgcaccctgatgaaagcctacgggatccgctttgacgtgatggtgaacggcaagggtgctttcttctgcgacctggtactcatctacctcatcaaaaagagagagttttaccgtgacaagaagtacgaggaagtgaggggcctagaagacagttcccaggaggccgaggacgaggcatcggggctggggctatctgagcagctcacatctgggccagggctgctggggatgccggagcagcaggagctgcaggagccacccgaggcgaagcgtggaagcagcagtcagaaggggaacggatctgtgtgcccacagctcctggagccccacaggagcacgtgaattgcctctgcttacgttcaggccctgtcctaaacccagccgtctagcacccagtgatcccatgcctttgggaatcccaggatgctgcccaacgggaaatttgtacattgggtgctatcaatgccacatcacagggaccagccatcacagagcaaagtgacctccacgtctgatgctggggtcatcaggacggacccatcatggctgtctttttgccccaccccctgccgtcagttcttcctttctccgtggctggcttcccgcactagggaacgggttgtaaatggggaacatgacttccttccggagtccttgagcacctcagctaaggaccgcagtgccctgtagagttcctagattacctcactgggaatagcattgtgcgtgtccggaaaagggctccatttggttccagcccactcccctctgcaagtgccgcagcttccctcagagcatactctccagtggatccaagtactctctctcctaaagacaccaccttcctgccagctgtttgcccttaggccagtacacagaattaaagtgggggagatggcagacgctttctgggacctgcccaagatatgtattctctgacactcttatttggtcataaaacaata

SEQ ID NO: 81582 - DNA, 1197 bp, Artificial Sequence
  derived and/or modified sequence
atggggcaggccggatgcaaaggcctttgtctgtccttgtttgattacaagaccgagaaatatgtaattgcaaaaaataagaaggttggcctcctttaccgccttctacaagcctctatacttgcctacctggttgtgtgggttttcttaattaagaaaggttatcaagacgtcgatacatcgctgcagtctgctgtaattactaaagtcaaaggcgttgctttcaccaacacgagcgacctgggccagcgcatctgggacgtcgctgattatgtgatccccgctcagaacgaaggcatccctgacggtgcctgcagcaaagattccgactgccatgctggggaagccgtgactgccggtaacggtgtcaagaccggtcgttgcctacgccgtgagaacctggctagagggacgtgcgaaatctttgcctggtgccctcttgagaccagttcacggcctgaggagccgtttctgaaagaagcggaggacttcactatctttattaagaatcacattcggttccctaaattcaatttcagtaaaagcaacgtgatggacgtgaaggatcgatcctttctcaagagctgccacttcggccctaagaatcattactgccctatcttcagacttggaagtgtgattcggtgggccggttcagactttcaggacatagccctagaaggcggagtgattggtataaacatcgaatggaactgcgatcttgacaaggccgcttcagaatgtcatcctcactattctttttcgaggctggacaacaagctctctaagtctgtgtccagcggatacaactttagattcgcgcgatactatcgggacgctgccggagtcgaattccgcacattgatgaaagcttacggtatcagattcgacgtcatggttaatgggaaaggcgctttcttctgcgacctagtactgatttacctgattaagaagcgcgaattttaccgcgacaagaagtacgaggaggtgcgaggattagaagactcatctcaagaggctgaagacgaggcaagcggactgggcctgtcggagcagctcacgtccggtccaggattgctcggaatgccagagcaacaggagcttcaggagccccctgaggccaaaaggggctcaagttctcaaaagggcaacggctctgtttgtcctcaattactggagccacatcgctccacatag

SEQ ID NO: 81583 - DNA, 1536 bp, Artificial Sequence
  derived and/or modified sequence
cttgtcgcctctgctgcttgcaggactgggtttcagtcagcagtgggagctgtggcccctgcccaggagctggtgggacaggtggagccctgagcctgctccacctcaactaggagttgctgtgactgctaccccaccccaaggcctggggaagctccccgaagccagcagagtggctgatgcccacgtaccggcccccttcccacagatgggtgttcctgataaagaagggttaccaagacgtcgacacctccctgcagagtgctgtcatcaccaaagtcaagggcgtggccttcaccaacacctcggatcttgggcagcggatctgggatgtcgccgactacgtcattccagcccagaatgaaggcattcctgatggcgcgtgctccaaggacagcgactgccacgctggggaagcggttacagctggaaacggagtgaagaccggccgctgcctgcggagagagaacttggccaggggcacctgtgagatctttgcctggtgcccgttggagacaagctccaggccggaggagccattcctgaaggaggccgaagacttcaccattttcataaagaaccacatccgtttccccaaattcaacttctccaaaagcaatgtgatggacgtcaaggacagatctttcctgaaatcatgccactttggccccaagaaccactactgccccatcttccgactgggctccgtgatccgctgggccgggagcgacttccaggatatagccctggagggtggcgtgataggaattaatattgaatggaactgtgatcttgataaagctgcctctgagtgccaccctcactattcttttagccgtctggacaataaactttcaaagtctgtctcctccgggtacaacttcagatttgccagatattaccgagacgcagccggggtggagttccgcaccctgatgaaagcctacgggatccgctttgacgtgatggtgaacggcaagggtgctttcttctgcgacctggtactcatctacctcatcaaaaagagagagttttaccgtgacaagaagtacgaggaagtgaggggcctagaagacagttcccaggaggccgaggacgaggcatcggggctggggctatctgagcagctcacatctgggccagggctgctggggatgccggagcagcaggagctgcaggagccacccgaggcgaagcgtggaagcagcagtcagaaggggaacggatctgtgtgcccacagctcctggagccccacaggagcacgtgaattgcctctgcttacgttcaggccctgtcctaaacccagccgtctagcacccagtgatcccatgcctttgggaatcccaggatgctgcccaacgggaaatttgtacattgggtgctatcaatgccacatcacagggaccagccatcacagagcaaagtgacctccacgtctgatgctggggtcatcaggacggacccatcatggctgtctttttgccccaccccctgccgtcagttcttcctttctccgtggctggcttcccgcacta

SEQ ID NO: 81584 - DNA, 1089 bp, Artificial Sequence
  derived and/or modified sequence
atgcctacatatcgccctccaagtcacagatgggtgttcctcattaaaaaaggctatcaggatgtcgacacgagtctgcagtctgccgtaattaccaaggttaagggagtcgcttttactaatacttccgacctggggcagcgcatctgggatgttgcggactatgtaataccagcccaaaacgaggggatacctgatggagcgtgtagtaaggattccgattgccacgccggagaggccgtcacagccggtaatggcgtgaagacaggccgatgtcttcggcgagagaatttggctcgcggtacctgcgagatcttcgcttggtgcccgcttgaaacctcctccagacccgaagaaccgttccttaaggaggccgaagacttcactatcttcataaagaatcatatcagattccctaagttcaacttctcaaagagtaacgtaatggacgttaaagatcgctccttcctgaaatcatgccactttggcccaaagaatcactattgcccaatttttagattaggctccgtgatcagatgggctggaagcgacttccaggacatagccttggagggcggtgtgatcgggatcaacatcgagtggaattgcgacctagataaggccgcttccgaatgccaccctcactacagctttagtcgcctcgacaataaactgtccaaaagcgtgtcatctggctataacttcagatttgcgaggtattatagagatgccgcaggggtggaattcagaaccctgatgaaggcctacggcatccggttcgacgtgatggtgaatggaaaaggggcattcttttgcgacctggtactgatctatctcattaagaagcgggagttttatagagacaagaagtacgaggaggttcgaggcctcgaagattcttctcaagaagcagaagatgaggcttcagggctcggcttaagcgaacagttgaccagcgggcctggactgctgggcatgccagaacaacaggaactccaggaacctcccgaggccaagaggggcagcagctcccagaaaggaaatggctccgtgtgtccccagctcttagaacctcataggtctacctag

SEQ ID NO: 81585 - protein, 807 aa, Artificial Sequence
  derived and/or modified sequence
MVPAWLWLLCVSVPQALPKAQPAELSVEVPENYGGNFPLYLTKLPLPREGAEGQIVLSGDSGKATEGPFAMDPDSGFLLVTRALDREEQAEYQLQVTLEMQDGHVLWGPQPVLVHVKDENDQVPHFSQAIYRARLSRGTRPGIPFLFLEASDRDEPGTANSDLRFHILSQAPAQPSPDMFQLEPRLGALALSPKGSTSLDHALERTYQLLVQVKDMGDQASGHQATATVEVSIIESTWVSLEPIHLAENLKVLYPHHMAQVHWSGGDVHYHLESHPPGPFEVNAEGNLYVTRELDREAQAEYLLQVRAQNSHGEDYAAPLELHVLVMDENDNVPICPPRDPTVSIPELSPPGTEVTRLSAEDADAPGSPNSHVVYQLLSPEPEDGVEGRAFQVDPTSGSVTLGVLPLRAGQNILLLVLAMDLAGAEGGFSSTCEVEVAVTDINDHAPEFITSQIGPISLPEDVEPGTLVAMLTAIDADLEPAFRLMDFAIERGDTEGTFGLDWEPDSGHVRLRLCKNLSYEAAPSHEVVVVVQSVAKLVGPGPGPGATATVTVLVERVMPPPKLDQESYEASVPISAPAGSFLLTIQPSDPISRTLRFSLVNDSEGWLCIEKFSGEVHTAQSLQGAQPGDTYTVLVEAQDTALTLAPVPSQYLCTPRQDHGLIVSGPSKDPDLASGHGPYSFTLGPNPTVQRDWRLQTLNGSHAYLTLALHWVEPREHIIPVVVSHNAQMWQLLVRVIVCRCNVEGQCMRKVGRMKGMPTKLSAVGILVGTLVAIGIFLILIFTHWTMSRKKDPDQPADSVPLKATV

SEQ ID NO: 81586 - DNA, 2424 bp, Artificial Sequence
  derived and/or modified sequence
atggttcctgcctggctatggctgctgtgtgtgtccgtcccgcaagccttacctaaggcacagccagctgagctgtcagtggaagtgccagaaaattacggcggtaatttcccactgtatctgactaaactaccattgcccagggagggtgctgagggccagattgtcctgagcggcgattccgggaaggctaccgaggggcccttcgctatggaccccgattcgggattcttgctggtgacacgcgctctggatagggaggaacaggcagagtaccagcttcaggttactctagaaatgcaggatggacacgtgttatggggtccacagcccgtcctggtgcacgtcaaggacgaaaatgaccaagtgcctcacttcagccaagctatttacagggcccgcctttcacgaggcacaagacccggtattcccttcttgttcctagaggccagcgaccgagacgagccagggaccgctaactccgatctccgatttcatattctgtcacaggccccagcccaaccatcaccggatatgtttcagctagaacccagattaggcgccctggctctctcaccgaaggggtcaaccagtcttgaccacgcattagaaaggacctatcagctcctggtgcaagtgaaagatatgggtgaccaggctagcgggcaccaggcaacggctaccgtcgaggtctccataatcgagtcgacatgggtcagcctggagcccattcatctggccgagaatctaaaggtcctttatccccaccatatggcccaggtgcactggtccggcggggacgttcattatcatctggagtctcatcctcctgggccatttgaagtaaatgcagaaggcaatctctacgtgactcgagaacttgaccgggaggcacaggcagagtacttgctgcaggtcagggctcagaacagtcacggagaggactatgctgcaccattagagttgcacgtcctggtcatggatgagaacgacaacgtcccaatttgtcctcccagagaccctaccgtgtctatcccagagctctctccccctggaacagaagtgacaagactgagcgccgaggatgccgatgccccaggaagcccaaattcccacgtggtctaccaacttcttagccctgagcctgaagacggcgtggaaggtagagctttccaggtagatccaacttctggctccgtcactttgggggtcctccccctccgtgctgggcagaatatcttactgctggtactcgccatggaccttgcaggtgcggagggagggtttagctctacatgtgaggtggaggtagctgtgacagatatcaatgaccatgcccccgagttcattacttcacagattggaccaatctccctcccggaggacgtcgagcccggcaccctggtagccatgttgacggccattgacgcagacctggagcccgcctttagactgatggattttgccatcgagaggggggacactgagggcacattcggcctagactgggaacccgatagtggccatgttcgcctgagactgtgcaagaatctgagctacgaggccgcaccgtcccacgaggttgtggtggtggtccagtccgtggctaagcttgttgggcctggtcccggtcctggagcaactgccactgttaccgtacttgtcgaacgcgtcatgcccccacccaagctggatcaggagtcatatgaagcctcagtccccatctctgccccagctggcagtttcctgcttacaatacagcccagcgacccgatctcacgaacccttcgtttcagtctggttaatgacagtgagggatggctgtgcatcgaaaagttctccggagaagttcacacagcccagtctctgcagggggcccaacctggggacacttataccgtcctcgtcgaagctcaggacactgccctgacactggcccccgtgccgtctcaatacctctgtaccccccgacaagatcatggattaattgtatccgggcctagtaaggaccctgacttagcctccggacatggcccatacagtttcaccctgggaccaaatccaaccgtacagcgcgattggagactccagaccctgaacgggagccacgcgtaccttacccttgccctgcactgggttgaacctagagagcatataattcccgttgttgtgtcgcataatgcacaaatgtggcagcttttggtgcgcgtaatcgtatgtcgatgcaatgtggagggccagtgtatgagaaaagttgggaggatgaaaggtatgccaaccaaactttccgccgttggaatattggttggcactctggtagcgatcggaattttccttatcctgatctttacgcactggactatgagtagaaaaaaggatccagaccagcctgcagacagcgtacccctgaaggcaaccgtttag

SEQ ID NO: 81587 - DNA, 2424 bp, Artificial Sequence
  derived and/or modified sequence
atggtgcctgcctggctgtggctgctgtgtgtgtctgtgccccaggccctgcccaaggcccagcctgctgagctgtctgtggaggtgcctgaaaattatggaggcaacttccccctgtacctgaccaagctgcccctgccccgggagggcgctgagggccagatcgtgctgagcggggacagcggcaaggccacagagggcccctttgccatggaccctgattctggcttcctgctggtgacccgggccctggaccgggaggagcaggccgagtaccagctgcaggtgaccctggagatgcaggacggccacgtgctgtggggcccccagcctgtgctggtgcacgtgaaggatgaaaatgaccaggtgccccacttcagccaggccatctaccgggcccggctgagccggggcaccaggcctggcatccccttcctgttcctggaggccagtgacagagatgagcccggcacagccaacagcgacctgcgcttccacatcctgagccaggccccagcccagcccagcccagacatgttccagctggagccccggctgggcgccctggccctgagccccaagggcagcaccagcctggaccacgccctggagaggacctaccagctgctggtgcaggtgaaggacatgggagaccaggccagcggccaccaggccacagccaccgtggaggtgtccatcatcgagagcacctgggtgtccctggagcccatccacctggccgagaacctgaaggtgctgtacccccaccacatggcccaggtgcactggagcggaggagatgtgcactaccacctggagagccaccccccaggcccctttgaggtgaatgctgagggcaacctgtatgtgacccgggagctggaccgggaggcccaggccgagtacctgctgcaggtgcgggcccagaacagccacggggaggactatgctgcccccctggagctgcacgtgctggtgatggatgaaaatgacaacgtgcccatctgccccccccgggaccccaccgtgtccatccctgagctgagccccccaggcacagaggtgacccggctgtctgcagaagatgctgatgcccctggcagccccaacagccacgtggtgtaccagctgctgagccctgagccagaagatggagtggagggccgggccttccaggtggaccccaccagcggctctgtgaccctgggcgtgctgcccctgcgggccggccagaacatcctgctgctggtgctggccatggacctggccggggctgagggcggcttcagcagcacctgtgaggtggaggtggccgtgacagacatcaatgaccacgcccctgagttcatcaccagccagatcggccccatcagcctgcctgaagatgtggagcccggcaccctggtggccatgctgacagccattgatgctgacctggagcccgccttccggctgatggactttgccatcgagcggggggacacagagggcaccttcggcctggactgggagccagattctggccacgtgcggctgcggctgtgcaagaacctgtcctatgaggccgcccccagccatgaggtggtggtggtggtgcagagcgtggccaagctggtgggccctggccctggccctggggccacagccaccgtgacagtgctggtggagcgggtgatgcccccacccaagctggaccaggagagctatgaggcctctgtgcccatcagcgccccagctggcagcttcctgctgaccatccagcccagcgaccccatcagcaggaccctgcgcttcagcctggtgaatgacagcgagggctggctgtgcatcgagaagttcagcggggaggtgcacacagcccagagcctgcagggcgcccagcccggggacacctacacagtgctggtggaggcccaggacacagccctgaccctggcccctgtgcccagccagtacctgtgcaccccccggcaggaccacggcctgattgtgtctggccccagcaaggaccctgacctggccagcggccacggcccctacagcttcaccctgggccccaaccccaccgtgcagagggactggaggctgcagaccctgaatggcagccacgcctacctgaccctggccctgcactgggtggagccccgggagcacatcatccctgtggtggtgagccacaatgcccagatgtggcagctgctggtgcgggtcatcgtgtgccgctgcaatgtggagggccagtgcatgaggaaggtgggccgcatgaagggcatgcccaccaagctgtctgctgtgggcatcctggtgggcaccctggtggccatcggcatcttcctgatcctgatcttcacccactggaccatgagcaggaagaaggaccctgaccagcctgctgacagcgtgcccctgaaggccaccgtgtag

SEQ ID NO: 81588 - DNA, 2424 bp, Artificial Sequence
  derived and/or modified sequence
atggtgcccgcctggctgtggctgctgtgcgtgagcgtgccccaggccctgccaaaagcccagccagctgaactctcagtggaagtgcccgaaaactacggagggaacttccctttgtaccttaccaagttgcccttacctagagagggagcagagggccagattgtgctatcaggtgattctggtaaagcaaccgaaggtcctttcgccatggatcctgactctggatttttactggtaactcgagccctggaccgtgaagagcaggccgagtaccagctgcaggtaacactggagatgcaggacggacatgtgctgtggggtccgcagcccgttctggtgcacgtgaaggacgagaacgaccaggtgccccatttctcccaagcaatctatagggctagattgtccaggggtaccaggcctggtatccctttcttatttcttgaggctagtgaccgggatgaaccaggaactgccaattctgacttacgattccatatcttgtctcaggcccctgcccagccttcgccggatatgtttcagcttgaacctcggctgggagctctggccctttccccaaagggttctacctctctggaccacgctctagaaaggacttaccagctcctggtgcaggtgaaagacatgggcgatcaggcctccggacaccaggccacagcaaccgtagaggtgagcatcatcgaatctacctgggtctccctagaacccattcacttggcagagaatttaaaagtcctgtaccctcaccacatggcgcaggtccattggtcaggaggggatgtgcactaccaccttgaatcccatcccccaggaccatttgaggtgaacgctgaaggcaacctttatgtgacgcgtgaactggacagagaggcacaagctgagtatctgctacaagtccgcgcgcagaatagtcacggagaggattacgccgcacccctcgaactgcacgtgctggtaatggatgaaaatgacaacgtgccaatttgcccccctagagatcccacggtgtctattcctgagctgagtccgccaggcactgaagtgacaaggctctctgctgaggacgccgacgcccccggcagtcccaacagccatgtggtgtaccagctcttatcccctgagccggaggacggagttgagggcagggcattccaagttgatcctacctccggctccgtgacactgggggtgttgcccctgcgtgcaggccagaacatcttactccttgtgctggcgatggatctcgctggggctgagggaggtttctcaagcacctgtgaggtggaggttgctgtgactgatattaacgaccacgctccggaatttatcacatctcagatcggtccaatcagtttgcctgaggacgtggaacccggcactcttgtcgctatgcttacagctattgacgcagatttggagccagcctttaggctgatggactttgccatagagaggggtgacactgaggggacgtttggactcgattgggagccagacagcggccacgtgcgtctgcgcctatgtaaaaatttgtcctacgaagccgctccatcccacgaagtagttgttgtcgttcaaagcgtcgcaaagttagtgggtccaggcccgggccccggagccactgccaccgtgaccgtcctcgtggagcgagtgatgcccccccccaagttagaccaagagagctatgaagcgagcgtacctatctcagccccggccggcagctttctcctgaccatccagccgtctgatcccatctcacgtactttgcggtttagcctcgttaatgatagtgagggttggctctgcatcgagaagttcagcggcgaggtgcatacagcccaatccttacagggagcgcaaccaggcgacacctataccgtgctggtggaggcacaggacaccgccctgacgttggctcctgtaccaagtcagtatttgtgtaccccaaggcaggaccacggactcattgtctcaggccccagcaaagacccagacctcgctagtgggcatgggccgtattcattcaccctgggccccaacccgacggttcagagagactggcgactacagacgctgaatggaagccatgcttatctgactctcgccctacactgggtggagccacgggaacacattattccagtcgtcgtttcccataatgcccagatgtggcagctgctggtcagggtgattgtatgccggtgcaacgttgaggggcaatgcatgaggaaagtgggccgaatgaagggcatgcccacaaaactcagcgccgtgggcatcctagtggggactttggtcgcaatcggaatcttcctcatactcatctttacccattggacaatgtcacgtaaaaaagatcctgatcaaccagctgacagtgtacccctcaaggcgactgtttag

SEQ ID NO: 81589 - DNA, 2424 bp, Artificial Sequence
  derived and/or modified sequence
atggtgcctgcctggttatggcttctgtgtgtctcagtgcctcaggccctgcccaaggcccaaccggcagaattatccgtcgaggtgcctgagaattacgggggaaacttcccattatacctcacaaagttgccgcttccaagagaaggggcagagggccagatcgtactgtcaggtgactccggcaaggcaaccgaagggccatttgctatggatcccgacagcgggttcctgctggttacgcgcgcactggaccgggaggaacaggccgagtaccagcttcaggtgaccctcgagatgcaggatggacacgtcctctggggcccacagcccgtgctggtgcacgtgaaggacgagaatgaccaggttccacacttctcccaggccatctatcgagctaggttatcaaggggaacacgtccgggaattccgtttctgtttctggaagcctctgacagagatgagcccggtaccgccaatagcgatttgaggtttcacattttgtctcaggccccagcccagccctccccggacatgttccagctagagcctcggctgggagcgctggcactgtctcccaaggggagtacgagtctggatcatgcattggaaaggacataccagctgttagtgcaagtcaaagacatgggcgaccaggcgtctggtcaccaggccaccgctactgtggaagtgtccattatcgagtcaacgtgggtgtctcttgagcctatccatctcgccgagaacctgaaagtgctgtatccacaccatatggcacaggtgcactggagcggaggcgacgttcattatcatctggagagccaccctcctggcccttttgaagtgaacgccgagggtaacctttatgtgacaagggagctcgatcgcgaagcccaggcagagtacctactgcaggtccgtgcccaaaactcacacggggaagactacgcggctccccttgagctgcacgtgctggtcatggatgagaatgacaacgtccctatatgtccaccccgagaccctaccgtctcgatcccagagctgagcccaccaggtacagaagtgacgagattgtctgctgaggacgccgatgctcccggatctccaaatagtcatgtggtgtaccagctgctgtccccggagcctgaagatggggtggaaggtagagcctttcaggtcgatccgacttcaggttcggtcacactgggagtcttacccctcagagccggacaaaatatcctgttacttgtgctcgccatggaccttgctggagctgaggggggatttagttccacctgtgaggtcgaggttgctgtgactgacatcaacgatcacgccccagagttcattactagtcagatcgggccaattagtttgccagaggacgtagaacctgggactcttgtcgccatgcttacagcaatcgacgctgacctagaacccgcattcaggttgatggatttcgccatcgaacgaggcgatactgaaggtaccttcggactggattgggaaccagatagcggccacgtgagactcaggctgtgcaagaatctctcttacgaggcagctccctcccacgaagtagtggtggtggtgcagtccgttgcaaagttggtggggccaggcccaggcccaggcgctaccgccacggttacagttttggtggagcgtgtgatgcccccacctaagcttgatcaggaaagctatgaggcttcagtgcctatttccgcgccagcaggtagttttctgctcactatccagccttcagaccctatttcgaggacattgcggttttccctggtgaatgactccgagggctggctttgcattgagaagttttccggggaggtgcatacggcccagtccctgcagggcgctcaaccaggcgacacttacacggtgttagtcgaggcccaggatactgcactgaccttggcgccagttccgagccaatacctttgcacacctagacaggaccacggattgatcgtgtccggacccagcaaagatcctgacttggcctctggccatgggccatatagcttcaccttggggccaaacccaaccgtacagagagactggcgcctccagaccttaaatggatcccatgcctaccttactctggcactgcactgggttgagccgcgtgagcatattataccagtggtagtttcccacaacgcacaaatgtggcaactcttggtgcgggtaatagtgtgccgttgtaacgttgagggtcagtgcatgaggaaggtggggagaatgaagggcatgccaacaaagcttagcgcagttgggatactggtgggtacgctggtggctatcggaatttttctgatactgatattcacacactggacaatgtccaggaaaaaagaccccgatcagcccgctgattctgtccctctgaaggcaacagtgtag

SEQ ID NO: 81590 - DNA, 2821 bp, Artificial Sequence
  derived and/or modified sequence
gctcaagtgccctgccttgccccacccagcccagcctggccagagccccctggagaaggagctctcttcttgcttggcagctggaccaagggagccagtcttgggcgctggagggcctgtcctgaccatggtccctgcctggctgtggctgctttgtgtctccgtcccccaggctctccccaaggcccagcctgcagagctgtctgtggaagttccagaaaactatggtggaaatttccctttatacctgaccaagttgccgctgccccgtgagggggctgaaggccagatcgtgctgtcaggggactcaggcaaggcaactgagggcccatttgctatggatccagattctggcttcctgctggtgaccagggccctggaccgagaggagcaggcagagtaccagctacaggtcaccctggagatgcaggatggacatgtcttgtggggtccacagcctgtgcttgtgcacgtgaaggatgagaatgaccaggtgccccatttctctcaagccatctacagagctcggctgagccggggtaccaggcctggcatccccttcctcttccttgaggcttcagaccgggatgagccaggcacagccaactcggatcttcgattccacatcctgagccaggctccagcccagccttccccagacatgttccagctggagcctcggctgggggctctggccctcagccccaaggggagcaccagccttgaccacgccctggagaggacctaccagctgttggtacaggtcaaggacatgggtgaccaggcctcaggccaccaggccactgccaccgtggaagtctccatcatagagagcacctgggtgtccctagagcctatccacctggcagagaatctcaaagtcctatacccgcaccacatggcccaggtacactggagtgggggtgatgtgcactatcacctggagagccatcccccgggaccctttgaagtgaatgcagagggaaacctctacgtgaccagagagctggacagagaagcccaggctgagtacctgctccaggtgcgggctcagaattcccatggcgaggactatgcggcccctctggagctgcacgtgctggtgatggatgagaatgacaacgtgcctatctgccctccccgtgaccccacagtcagcatccctgagctcagtccaccaggtactgaagtgactagactgtcagcagaggatgcagatgcccccggctcccccaattcccacgttgtgtatcagctcctgagccctgagcctgaggatggggtagaggggagagccttccaggtggaccccacttcaggcagtgtgacgctgggggtgctcccactccgagcaggccagaacatcctgcttctggtgctggccatggacctggcaggcgcagagggtggcttcagcagcacgtgtgaagtcgaagtcgcagtcacagatatcaatgatcacgcccctgagttcatcacttcccagattgggcctataagcctccctgaggatgtggagcccgggactctggtggccatgctaacagccattgatgctgacctcgagcccgccttccgcctcatggattttgccattgagaggggagacacagaagggacttttggcctggattgggagccagactctgggcatgttagactcagactctgcaagaacctcagttatgaggcagctccaagtcatgaggtggtggtggtggtgcagagtgtggcgaagctggtggggccaggcccaggccctggagccaccgccacggtgactgtgctagtggagagagtgatgccaccccccaagttggaccaggagagctacgaggccagtgtccccatcagtgccccagccggctctttcctgctgaccatccagccctccgaccccatcagccgaaccctcaggttctccctagtcaatgactcagagggctggctctgcattgagaaattctccggggaggtgcacaccgcccagtccctgcagggcgcccagcctggggacacctacacggtgcttgtggaggcccaggatacagccctgactcttgcccctgtgccctcccaatacctctgcacaccccgccaagaccatggcttgatcgtgagtggacccagcaaggaccccgatctggccagtgggcacggtccctacagcttcacccttggtcccaaccccacggtgcaacgggattggcgcctccagactctcaatggttcccatgcctacctcaccttggccctgcattgggtggagccacgtgaacacataatccccgtggtggtcagccacaatgcccagatgtggcagctcctggttcgagtgatcgtgtgtcgctgcaacgtggaggggcagtgcatgcgcaaggtgggccgcatgaagggcatgcccacgaagctgtcggcagtgggcatccttgtaggcaccctggtagcaataggaatcttcctcatcctcattttcacccactggaccatgtcaaggaagaaggacccggatcaaccagcagacagcgtgcccctgaaggcgactgtctgaatggcccaggcagctctagctgggagcttggcctctggctccatctgagtcccctgggagagagcccagcacccaagatccagcaggggacaggacagagtagaagcccctccatctgccctggggtggaggcaccatcaccatcaccaggcatgtctgcagagcctggacaccaactttatggactgcccatgggagtgctccaaatgtcagggtgtttgcccaataataaagccccagagaactgggctgggccctatgggattggta

SEQ ID NO: 81591 - DNA, 2424 bp, Artificial Sequence
  derived and/or modified sequence
atggtgcccgcctggctgtggctgctgtgcgtgagcgtgccccaggccctgcccaaggcccagcccgccgagctgagcgtggaggtgcccgagaactacggcggcaacttccccctgtacctgaccaagctgcccctgcccagagagggcgccgagggccagatcgtgctgagcggcgacagcggcaaggccaccgagggccccttcgccatggaccccgacagcggcttcctgctggtgaccagagccctggacagagaggagcaggccgagtaccagctgcaggtgaccctggagatgcaggacggccacgtgctgtggggcccccagcccgtgctggtgcacgtgaaggacgagaacgaccaggtgccccacttcagccaggccatctacagagccagactgagcagaggcaccagacccggcatccccttcctgttcctggaggccagcgacagagacgagcccggcaccgccaacagcgacctgagattccacatcctgagccaggcccccgcccagcccagccccgacatgttccagctggagcccagactgggcgccctggccctgagccccaagggcagcaccagcctggaccacgccctggagagaacctaccagctgctggtgcaggtgaaggacatgggcgaccaggccagcggccaccaggccaccgccaccgtggaggtgagcatcatcgagagcacctgggtgagcctggagcccatccacctggccgagaacctgaaggtgctgtacccccaccacatggcccaggtgcactggagcggcggcgacgtgcactaccacctggagagccacccccccggccccttcgaggtgaacgccgagggcaacctgtacgtgaccagagagctggacagagaggcccaggccgagtacctgctgcaggtgagagcccagaacagccacggcgaggactacgccgcccccctggagctgcacgtgctggtgatggacgagaacgacaacgtgcccatctgcccccccagagaccccaccgtgagcatccccgagctgagcccccccggcaccgaggtgaccagactgagcgccgaggacgccgacgcccccggcagccccaacagccacgtggtgtaccagctgctgagccccgagcccgaggacggcgtggagggcagagccttccaggtggaccccaccagcggcagcgtgaccctgggcgtgctgcccctgagagccggccagaacatcctgctgctggtgctggccatggacctggccggcgccgagggcggcttcagcagcacctgcgaggtggaggtggccgtgaccgacatcaacgaccacgcccccgagttcatcaccagccagatcggccccatcagcctgcccgaggacgtggagcccggcaccctggtggccatgctgaccgccatcgacgccgacctggagcccgccttcagactgatggacttcgccatcgagagaggcgacaccgagggcaccttcggcctggactgggagcccgacagcggccacgtgagactgagactgtgcaagaacctgagctacgaggccgcccccagccacgaggtggtggtggtggtgcagagcgtggccaagctggtgggccccggccccggccccggcgccaccgccaccgtgaccgtgctggtggagagagtgatgcccccccccaagctggaccaggagagctacgaggccagcgtgcccatcagcgcccccgccggcagcttcctgctgaccatccagcccagcgaccccatcagcagaaccctgagattcagcctggtgaacgacagcgagggctggctgtgcatcgagaagttcagcggcgaggtgcacaccgcccagagcctgcagggcgcccagcccggcgacacctacaccgtgctggtggaggcccaggacaccgccctgaccctggcccccgtgcccagccagtacctgtgcacccccagacaggaccacggcctgatcgtgagcggccccagcaaggaccccgacctggccagcggccacggcccctacagcttcaccctgggccccaaccccaccgtgcagagagactggagactgcagaccctgaacggcagccacgcctacctgaccctggccctgcactgggtggagcccagagagcacatcatccccgtggtggtgagccacaacgcccagatgtggcagctgctggtgagagtgatcgtgtgcagatgcaacgtggagggccagtgcatgagaaaggtgggcagaatgaagggcatgcccaccaagctgagcgccgtgggcatcctggtgggcaccctggtggccatcggcatcttcctgatcctgatcttcacccactggaccatgagcagaaagaaggaccccgaccagcccgccgacagcgtgcccctgaaggccaccgtgtag

SEQ ID NO: 81592 - protein, 790 aa, Artificial Sequence
  derived and/or modified sequence
MVPAWLWLLCVSVPQALPKAQPAELSVEVPENYGGNFPLYLTKLPLPREGAEGQIVLSGDSGKATEGPFAMDPDSGFLLVTRALDREEQAEYQLQVTLEMQDGHVLWGPQPVLVHVKDENDQVPHFSQAIYRARLSRGTRPGIPFLFLEASDRDEPGTANSDLRFHILSQAPAQPSPDMFQLEPRLGALALSPKGSTSLDHALERTYQLLVQVKDMGDQASGHQATATVEVSIIESTWVSLEPIHLAENLKVLYPHHMAQVHWSGGDVHYHLESHPPGPFEVNAEGNLYVTRELDREAQAEYLLQVRAQNSHGEDYAAPLELHVLVMDENDNVPICPPRDPTVSIPELSPPGTEVTRLSAEDADAPGSPNSHVVYQLLSPEPEDGVEGRAFQVDPTSGSVTLGVLPLRAGQNILLLVLAMDLAGAEGGFSSTCEVEVAVTDINDHAPEFITSQIGPISLPEDVEPGTLVAMLTAIDADLEPAFRLMDFAIERGDTEGTFGLDWEPDSGHVRLRLCKNLSYEAAPSHEVVVVVQSVAKLVGPGPGPGATATVTVLVERVMPPPKLDQESYEASVPISAPAGSFLLTIQPSDPISRTLRFSLVNDSEGWLCIEKFSGEVHTAQSLQGAQPGDTYTVLVEAQDTDHGLIVSGPSKDPDLASGHGPYSFTLGPNPTVQRDWRLQTLNGSHAYLTLALHWVEPREHIIPVVVSHNAQMWQLLVRVIVCRCNVEGQCMRKVGRMKGMPTKLSAVGILVGTLVAIGIFLILIFTHWTMSRKKDPDQPADSVPLKATV

SEQ ID NO: 81593 - DNA, 2373 bp, Artificial Sequence
  derived and/or modified sequence
atggtcccagcctggttatggctcctgtgcgttagcgttccccaggcactgcctaaggcacagcctgcagagctatccgtcgaagtgcctgaaaattacggcggcaatttccccctgtacctaaccaaacttcccctaccccgggagggagctgaggggcaaatcgtactcagtggagattcgggaaaggccaccgagggtccttttgctatggatcctgatagcggcttcctcctggtgacccgggccttggatcgcgaggagcaagctgagtaccagctgcaggtgaccttggaaatgcaggacggccatgtgctgtggggaccccaacccgtgctggtacatgtaaaggacgaaaatgaccaggtcccacactttagtcaggcgatttatcgtgcaaggttgtccaggggaaccagacctggcatccctttcctgtttttggaggcgtctgatcgtgacgaacctggaaccgccaactccgacttgcggtttcatattctgtcacaagccccagctcagcccagcccggacatgttccagcttgagccccgacttggggctctggctctctctccaaaggggagcactagcttggatcatgccttagagcgcacttaccagctacttgtacaggtcaaagacatgggtgatcaggcatccggccaccaggccactgcaactgtggaagtttccatcattgagtcaacttgggtgagcttggagccgatacacctcgccgaaaacttgaaggtgctctatccacaccacatggctcaggttcattggagcggaggggacgttcactatcacttggagtctcatcctcccggaccatttgaagtcaatgccgaaggcaacctgtacgttacccgagaactagacagagaagcgcaggctgagtacttgctgcaggtgcgggcacaaaattcacacggcgaggattatgcggcacccctggagttgcatgtgctcgttatggacgaaaatgacaatgtgcctatctgtccccctagggatcccaccgtttccattccagagttgtcccctccaggcacggaggtgacaaggttgtccgcggaagacgccgacgcacctggctcgccaaatagccatgttgtgtatcaactcctgagccccgaacctgaggacggggtggaaggtcgtgctttccaggtggaccctacctctggatcagttaccctcggggtgctccccctgcgtgccgggcagaacatcctccttttagtgctcgccatggatctggccggagcagagggcggcttcagttctacctgcgaggttgaggtggccgtaacagatatcaacgaccatgcccctgaattcatcacttcacagattggaccgatcagcctgccggaagatgtcgagccaggcacgctcgttgccatgttgacagcgattgacgcagatttagaacccgcattccgcctgatggattttgctattgaacggggcgacacagagggcaccttcggccttgattgggagccagactcaggccatgtccggctacgcctgtgtaaaaatctgtcttatgaggccgctccaagtcatgaagtggtcgtggtggtgcagagtgtcgctaaactggtgggccccggaccaggacccggggccaccgcaaccgtaaccgtgttggtcgagcgggtgatgcctccacctaaactggaccaggagagctatgaggcaagcgttcccatctccgctccagcaggatcattcttgttaaccattcagccatctgatcctattagtcggacacttcgattttcacttgtcaacgactctgaaggatggctgtgtattgagaagttcagcggcgaagtacatactgcccaatctttacagggggcacagccaggagatacctacactgtgctggtagaggctcaggacactgaccacggactgatagtttcgggtcccagcaaggatccagacttggcctccggtcacggcccatatagcttcacactagggcctaatcccaccgtgcaacgggactggagactgcaaaccctcaatgggtctcatgcttacctcaccctagctctgcactgggtcgagcctcgagagcatataatcccggtagtagtgagtcacaacgctcagatgtggcagttgctggttagagtgattgtatgtaggtgtaacgttgagggccaatgcatgcgcaaggtggggcgaatgaagggcatgccaactaagctgtcggctgttgggatcctggtgggcacactcgtcgccatcgggatcttcctgatattgatctttacacattggaccatgtctaggaaaaaggacccagatcagcccgctgactctgtacctctcaaagcgacagtttag

SEQ ID NO: 81594 - DNA, 2373 bp, Artificial Sequence
  derived and/or modified sequence
atggtgcctgcctggctgtggctgctgtgtgtgtctgtgccccaggccctgcccaaggcccagcctgctgagctgtctgtggaggtgcctgaaaattatggaggcaacttccccctgtacctgaccaagctgcccctgccccgggagggcgctgagggccagatcgtgctgagcggggacagcggcaaggccacagagggcccctttgccatggaccctgattctggcttcctgctggtgacccgggccctggaccgggaggagcaggccgagtaccagctgcaggtgaccctggagatgcaggacggccacgtgctgtggggcccccagcctgtgctggtgcacgtgaaggatgaaaatgaccaggtgccccacttcagccaggccatctaccgggcccggctgagccggggcaccaggcctggcatccccttcctgttcctggaggccagtgacagagatgagcccggcacagccaacagcgacctgcgcttccacatcctgagccaggccccagcccagcccagcccagacatgttccagctggagccccggctgggcgccctggccctgagccccaagggcagcaccagcctggaccacgccctggagaggacctaccagctgctggtgcaggtgaaggacatgggagaccaggccagcggccaccaggccacagccaccgtggaggtgtccatcatcgagagcacctgggtgtccctggagcccatccacctggccgagaacctgaaggtgctgtacccccaccacatggcccaggtgcactggagcggaggagatgtgcactaccacctggagagccaccccccaggcccctttgaggtgaatgctgagggcaacctgtatgtgacccgggagctggaccgggaggcccaggccgagtacctgctgcaggtgcgggcccagaacagccacggggaggactatgctgcccccctggagctgcacgtgctggtgatggatgaaaatgacaacgtgcccatctgccccccccgggaccccaccgtgtccatccctgagctgagccccccaggcacagaggtgacccggctgtctgcagaagatgctgatgcccctggcagccccaacagccacgtggtgtaccagctgctgagccctgagccagaagatggagtggagggccgggccttccaggtggaccccaccagcggctctgtgaccctgggcgtgctgcccctgcgggccggccagaacatcctgctgctggtgctggccatggacctggccggggctgagggcggcttcagcagcacctgtgaggtggaggtggccgtgacagacatcaatgaccacgcccctgagttcatcaccagccagatcggccccatcagcctgcctgaagatgtggagcccggcaccctggtggccatgctgacagccattgatgctgacctggagcccgccttccggctgatggactttgccatcgagcggggggacacagagggcaccttcggcctggactgggagccagattctggccacgtgcggctgcggctgtgcaagaacctgtcctatgaggccgcccccagccatgaggtggtggtggtggtgcagagcgtggccaagctggtgggccctggccctggccctggggccacagccaccgtgacagtgctggtggagcgggtgatgcccccacccaagctggaccaggagagctatgaggcctctgtgcccatcagcgccccagctggcagcttcctgctgaccatccagcccagcgaccccatcagcaggaccctgcgcttcagcctggtgaatgacagcgagggctggctgtgcatcgagaagttcagcggggaggtgcacacagcccagagcctgcagggcgcccagcccggggacacctacacagtgctggtggaggcccaggacacagaccacggcctcatcgtgtctggccccagcaaggaccctgacctggccagcggccacggcccctacagcttcaccctgggccccaaccccaccgtgcagagggactggaggctgcagaccctgaatggcagccacgcctacctgaccctggccctgcactgggtggagccccgggagcacatcatccctgtggtggtgagccacaatgcccagatgtggcagctgctggtgcgggtgattgtgtgccgctgcaatgtggagggccagtgcatgaggaaggtgggccgcatgaagggcatgcccaccaagctgtctgctgtgggcatcctggtgggcaccctggtggccatcggcatcttcctgatcctgatcttcacccactggaccatgagcaggaagaaggaccctgaccagcctgctgacagcgtgcccctgaaggccaccgtgtag

SEQ ID NO: 81595 - DNA, 2373 bp, Artificial Sequence
  derived and/or modified sequence
atggtgcccgcctggctgtggctgctgtgcgtgagcgtgccccaggcactgcccaaggcccagcctgccgaattatcggtcgaagtcccggaaaactacgggggcaatttcccgctatacctgactaaactgccactccccagagaaggagcggagggccagatcgtattgtcgggagactccggcaaagcgaccgagggaccatttgcaatggaccccgactccggttttcttttagtgactcgtgcgctggatcgtgaagagcaggctgagtatcagttgcaggtgactcttgaaatgcaggacggacatgtcctgtggggaccacagcctgtgctggtgcacgtcaaagatgaaaacgaccaagttccccacttcagccaggccatttaccgggcgagattaagtcgtgggacccggccgggtattccttttctgtttctggaagcttccgatcgcgatgaaccaggtacggctaacagcgatctgcgtttccacatcctaagccaggccccagcccaacccagtccagacatgttccaactggagccccgcctgggcgctttagccctcagtcccaagggtagtacttctctggaccacgcacttgagcgtacttaccaactactcgtgcaagtgaaggatatgggcgaccaggcctccggtcatcaagcgacagcaaccgttgaggtgagcatcatcgaaagcacatgggtttccctggaacctattcacctggctgagaatcttaaggtcctctatccacatcatatggcgcaggtgcattggagtggtggcgacgtgcactaccatctagaaagccacccgcccggcccgttcgaggtgaatgcggaagggaacctatacgtgacaagggagttagatcgagaggctcaggcagagtacctccttcaggtgcgggcccaaaatagccatggcgaggactacgctgcccctctcgagttacatgtgctggtgatggacgagaatgacaatgttcctatttgtcccccaagagatccaaccgtctcaatccctgagttgtcaccaccgggaaccgaagtcacccggctttcagcagaggatgcagacgctcccgggagtccgaatagtcatgttgtctaccagctcttaagtccggagcccgaagatggcgtggagggcagggcctttcaggttgaccctacctcaggatcagtcacgcttggcgtgttacctctgcgcgcaggtcagaacattcttctgctcgttttggctatggacctggcgggagccgaaggagggtttagcagcacctgcgaagtcgaggttgctgtcacagacattaatgatcatgcccctgagttcatcactagccagatcggccccatttctttgccagaggatgtagagcccggaaccctagttgctatgctcactgcaatcgacgccgacctcgagcctgcttttcgactaatggactttgccattgagcggggtgatacggaggggacttttggccttgactgggaaccagacagcggacatgtcagactgcgcttatgcaagaacctgagttatgaggccgctccgtcacacgaggtcgtcgtggtcgtgcaatcagttgccaagctcgtaggaccagggccaggccccggagccaccgccacagttaccgtcctcgtagaaagggtcatgcccccccctaaacttgatcaagagagttacgaggcttccgtaccaatatccgcaccagcaggctcctttctgctgaccatacaaccgtccgatcccatctctagaacactacgatttagccttgtcaacgacagtgaggggtggctttgcattgaaaagttcagtggcgaagtgcacaccgcccaaagtttacagggggcccagcccggagacacctacacagtccttgtcgaggcccaggacaccgatcatggcctcatcgtcagtgggccaagcaaagaccctgacctggctagcggccacggtccttactcctttaccctggggccaaaccccaccgtccagcgggattggcgcctgcagacattaaacgggagccacgcatacctgactttggcgttacattgggtcgagccccgagagcatatcatccctgtcgtcgtttcccataacgcccagatgtggcagttattagttagagttatagtgtgcagatgcaatgttgagggccagtgcatgcggaaggttggccgcatgaaaggcatgccaactaaactcagtgctgtcggcattctcgttggaaccctggttgctatcggtatctttctgatcctaatatttactcattggaccatgagcaggaaaaaggaccccgaccaacccgcagattcagtcccactcaaggcgaccgtctag

SEQ ID NO: 81596 - DNA, 2373 bp, Artificial Sequence
  derived and/or modified sequence
atggtcccggcttggctctggctgctttgtgtttcggttccacaggcactgccgaaggcccagcccgcagaactctcagttgaagtgccagagaattacggtgggaacttcccactgtatctgaccaagttacctctgcccagggagggcgcagagggccagatcgttctgagtggagacagcgggaaagctaccgagggtccatttgccatggacccagacagcgggtttttgcttgttacacgcgctttggacagggaggagcaggcagagtaccagttgcaggtgacattggaaatgcaggacggtcacgtactatggggaccacagcctgttctggtccatgttaaggatgagaatgatcaagtcccacatttttcccaggccatctatagggctaggctgtccagggggacacgaccaggtatcccttttctgtttctggaagcgagtgacagggatgaacctgggacagcaaatagcgatttacgcttccacatcctcagtcaagctcccgcacagccaagtccagacatgttccagctcgaacccagacttggcgctctggcgctgtcaccaaagggaagtacttctttagaccatgcacttgaaaggacttaccagctgctggtgcaggtgaaagatatgggtgaccaagcatccggacaccaggcaacagctacagtggaggtctccattatcgagtccacctgggtctccctcgagccaatccatcttgcagagaaccttaaagtcctgtatcctcaccatatggcgcaagttcactggtcaggcggagacgtgcactaccatctggaatcccaccctcccggtccttttgaagtgaatgcagagggaaacctttacgtgactagggaattggaccgagaggctcaggcagagtaccttcttcaagtgcgggctcagaacagccacggggaagactacgctgctcctctggagctacatgtactggtgatggacgagaacgacaacgtccctatctgccccccacgagatccgacagtctctatccctgagctctccccacctggtactgaggtgacgaggttgagtgcggaagacgctgatgcccctggaagccccaattcacacgtcgtgtatcagctcttgtcccccgagcctgaggacggagttgaaggaagggccttccaggttgaccccacttccgggtccgtcacccttggagtgttgccactgagagccggacagaacattttactgctcgtcctcgccatggacctcgccggagctgagggtggattctcttctacatgtgaagtagaggtcgctgtcactgatataaacgaccatgcccctgagttcatcaccagccagattgggccaatctctctcccggaggacgttgagcctggtactctggtggcaatgctaacagccatagacgctgacctagaacctgcctttcggctgatggacttcgctattgaaagaggggacaccgaaggaacattcggactggactgggagccggattccggccatgtccgccttcgcctctgcaagaatctttcatatgaggccgctccaagtcacgaggtcgttgtagtcgttcagagtgtagcgaaattggtgggtccaggtccaggcccaggggctactgccactgttacggttcttgtggagcgtgtcatgccgccacccaagctagatcaagaaagttatgaggctagtgtgcccatctcggccccagccggttcatttttgctgacaattcaaccatccgaccccatcagtcgaacactgcggtttagcctcgttaatgactccgaagggtggctgtgcatagagaagttttccggtgaagtccataccgcgcagtccctccagggcgctcagcctggagacacctacacagtgctcgtggaggcccaagataccgaccacggccttatcgtttccggccctagtaaggaccccgatctggcttccgggcacgggccttattcctttaccctgggacccaaccccaccgtgcagcgggactggcggcttcagacccttaacgggtcacatgcctatttgacgctcgcattacattgggtcgagccacgcgagcacattatccctgtagtggtgtctcacaacgctcagatgtggcagctccttgtaagggtgatcgtgtgcagatgtaatgtggaaggtcagtgtatgcgtaaagtcgggaggatgaagggcatgcccactaaactgagtgcggtgggaatccttgtcggaactcttgtggcgataggcatcttcctgatcctgatctttacgcattggactatgtcacgcaagaaggaccctgaccagccggctgatagcgtcccactgaaagccacagtctag

SEQ ID NO: 81597 - DNA, 2694 bp, Artificial Sequence
  derived and/or modified sequence
ttgcttggcagctggaccaagggagccagtcttgggcgctggagggcctgtcctgaccatggtccctgcctggctgtggctgctttgtgtctccgtcccccaggctctccccaaggcccagcctgcagagctgtctgtggaagttccagaaaactatggtggaaatttccctttatacctgaccaagttgccgctgccccgtgagggggctgaaggccagatcgtgctgtcaggggactcaggcaaggcaactgagggcccatttgctatggatccagattctggcttcctgctggtgaccagggccctggaccgagaggagcaggcagagtaccagctacaggtcaccctggagatgcaggatggacatgtcttgtggggtccacagcctgtgcttgtgcacgtgaaggatgagaatgaccaggtgccccatttctctcaagccatctacagagctcggctgagccggggtaccaggcctggcatccccttcctcttccttgaggcttcagaccgggatgagccaggcacagccaactcggatcttcgattccacatcctgagccaggctccagcccagccttccccagacatgttccagctggagcctcggctgggggctctggccctcagccccaaggggagcaccagccttgaccacgccctggagaggacctaccagctgttggtacaggtcaaggacatgggtgaccaggcctcaggccaccaggccactgccaccgtggaagtctccatcatagagagcacctgggtgtccctagagcctatccacctggcagagaatctcaaagtcctatacccgcaccacatggcccaggtacactggagtgggggtgatgtgcactatcacctggagagccatcccccgggaccctttgaagtgaatgcagagggaaacctctacgtgaccagagagctggacagagaagcccaggctgagtacctgctccaggtgcgggctcagaattcccatggcgaggactatgcggcccctctggagctgcacgtgctggtgatggatgagaatgacaacgtgcctatctgccctccccgtgaccccacagtcagcatccctgagctcagtccaccaggtactgaagtgactagactgtcagcagaggatgcagatgcccccggctcccccaattcccacgttgtgtatcagctcctgagccctgagcctgaggatggggtagaggggagagccttccaggtggaccccacttcaggcagtgtgacgctgggggtgctcccactccgagcaggccagaacatcctgcttctggtgctggccatggacctggcaggcgcagagggtggcttcagcagcacgtgtgaagtcgaagtcgcagtcacagatatcaatgatcacgcccctgagttcatcacttcccagattgggcctataagcctccctgaggatgtggagcccgggactctggtggccatgctaacagccattgatgctgacctcgagcccgccttccgcctcatggattttgccattgagaggggagacacagaagggacttttggcctggattgggagccagactctgggcatgttagactcagactctgcaagaacctcagttatgaggcagctccaagtcatgaggtggtggtggtggtgcagagtgtggcgaagctggtggggccaggcccaggccctggagccaccgccacggtgactgtgctagtggagagagtgatgccaccccccaagttggaccaggagagctacgaggccagtgtccccatcagtgccccagccggctctttcctgctgaccatccagccctccgaccccatcagccgaaccctcaggttctccctagtcaatgactcagagggctggctctgcattgagaaattctccggggaggtgcacaccgcccagtccctgcagggcgcccagcctggggacacctacacggtgcttgtggaggcccaggatacagaccatggcttgatcgtgagtggacccagcaaggaccccgatctggccagtgggcacggtccctacagcttcacccttggtcccaaccccacggtgcaacgggattggcgcctccagactctcaatggttcccatgcctacctcaccttggccctgcattgggtggagccacgtgaacacataatccccgtggtggtcagccacaatgcccagatgtggcagctcctggttcgagtgatcgtgtgtcgctgcaacgtggaggggcagtgcatgcgcaaggtgggccgcatgaagggcatgcccacgaagctgtcggcagtgggcatccttgtaggcaccctggtagcaataggaatcttcctcatcctcattttcacccactggaccatgtcaaggaagaaggacccggatcaaccagcagacagcgtgcccctgaaggcgactgtctgaatggcccaggcagctctagctgggagcttggcctctggctccatctgagtcccctgggagagagcccagcacccaagatccagcaggggacaggacagagtagaagcccctccatctgccctggggtggaggcaccatcaccatcaccaggcatgtctgcagagcctggacaccaactttatggactgcccatgggagtgctccaaatgtcagggtgtttgcccaataataaagccccagagaactgggctgggccctatggg

SEQ ID NO: 81598 - DNA, 2373 bp, Artificial Sequence
  derived and/or modified sequence
atggtgcccgcctggctgtggctgctgtgcgtgagcgtgccccaggccctgcccaaggcccagcccgccgagctgagcgtggaggtgcccgagaactacggcggcaacttccccctgtacctgaccaagctgcccctgcccagagagggcgccgagggccagatcgtgctgagcggcgacagcggcaaggccaccgagggccccttcgccatggaccccgacagcggcttcctgctggtgaccagagccctggacagagaggagcaggccgagtaccagctgcaggtgaccctggagatgcaggacggccacgtgctgtggggcccccagcccgtgctggtgcacgtgaaggacgagaacgaccaggtgccccacttcagccaggccatctacagagccagactgagcagaggcaccagacccggcatccccttcctgttcctggaggccagcgacagagacgagcccggcaccgccaacagcgacctgagattccacatcctgagccaggcccccgcccagcccagccccgacatgttccagctggagcccagactgggcgccctggccctgagccccaagggcagcaccagcctggaccacgccctggagagaacctaccagctgctggtgcaggtgaaggacatgggcgaccaggccagcggccaccaggccaccgccaccgtggaggtgagcatcatcgagagcacctgggtgagcctggagcccatccacctggccgagaacctgaaggtgctgtacccccaccacatggcccaggtgcactggagcggcggcgacgtgcactaccacctggagagccacccccccggccccttcgaggtgaacgccgagggcaacctgtacgtgaccagagagctggacagagaggcccaggccgagtacctgctgcaggtgagagcccagaacagccacggcgaggactacgccgcccccctggagctgcacgtgctggtgatggacgagaacgacaacgtgcccatctgcccccccagagaccccaccgtgagcatccccgagctgagcccccccggcaccgaggtgaccagactgagcgccgaggacgccgacgcccccggcagccccaacagccacgtggtgtaccagctgctgagccccgagcccgaggacggcgtggagggcagagccttccaggtggaccccaccagcggcagcgtgaccctgggcgtgctgcccctgagagccggccagaacatcctgctgctggtgctggccatggacctggccggcgccgagggcggcttcagcagcacctgcgaggtggaggtggccgtgaccgacatcaacgaccacgcccccgagttcatcaccagccagatcggccccatcagcctgcccgaggacgtggagcccggcaccctggtggccatgctgaccgccatcgacgccgacctggagcccgccttcagactgatggacttcgccatcgagagaggcgacaccgagggcaccttcggcctggactgggagcccgacagcggccacgtgagactgagactgtgcaagaacctgagctacgaggccgcccccagccacgaggtggtggtggtggtgcagagcgtggccaagctggtgggccccggccccggccccggcgccaccgccaccgtgaccgtgctggtggagagagtgatgcccccccccaagctggaccaggagagctacgaggccagcgtgcccatcagcgcccccgccggcagcttcctgctgaccatccagcccagcgaccccatcagcagaaccctgagattcagcctggtgaacgacagcgagggctggctgtgcatcgagaagttcagcggcgaggtgcacaccgcccagagcctgcagggcgcccagcccggcgacacctacaccgtgctggtggaggcccaggacaccgaccacggcctgatcgtgagcggccccagcaaggaccccgacctggccagcggccacggcccctacagcttcaccctgggccccaaccccaccgtgcagagagactggagactgcagaccctgaacggcagccacgcctacctgaccctggccctgcactgggtggagcccagagagcacatcatccccgtggtggtgagccacaacgcccagatgtggcagctgctggtgagagtgatcgtgtgcagatgcaacgtggagggccagtgcatgagaaaggtgggcagaatgaagggcatgcccaccaagctgagcgccgtgggcatcctggtgggcaccctggtggccatcggcatcttcctgatcctgatcttcacccactggaccatgagcagaaagaaggaccccgaccagcccgccgacagcgtgcccctgaaggccaccgtgtag

SEQ ID NO: 81599 - protein, 732 aa, Artificial Sequence
  derived and/or modified sequence
MVPAWLWLLCVSVPQALPKAQPAELSVEVPENYGGNFPLYLTKLPLPREGAEGQIVLSGDSGKATEGPFAMDPDSGFLLVTRALDREEQAEYQLQVTLEMQDGHVLWGPQPVLVHVKDENDQASGHQATATVEVSIIESTWVSLEPIHLAENLKVLYPHHMAQVHWSGGDVHYHLESHPPGPFEVNAEGNLYVTRELDREAQAEYLLQVRAQNSHGEDYAAPLELHVLVMDENDNVPICPPRDPTVSIPELSPPGTEVTRLSAEDADAPGSPNSHVVYQLLSPEPEDGVEGRAFQVDPTSGSVTLGVLPLRAGQNILLLVLAMDLAGAEGGFSSTCEVEVAVTDINDHAPEFITSQIGPISLPEDVEPGTLVAMLTAIDADLEPAFRLMDFAIERGDTEGTFGLDWEPDSGHVRLRLCKNLSYEAAPSHEVVVVVQSVAKLVGPGPGPGATATVTVLVERVMPPPKLDQESYEASVPISAPAGSFLLTIQPSDPISRTLRFSLVNDSEGWLCIEKFSGEVHTAQSLQGAQPGDTYTVLVEAQDTDEPRLSASAPLVIHFLKAPPAPALTLAPVPSQYLCTPRQDHGLIVSGPSKDPDLASGHGPYSFTLGPNPTVQRDWRLQTLNGSHAYLTLALHWVEPREHIIPVVVSHNAQMWQLLVRVIVCRCNVEGQCMRKVGRMKGMPTKLSAVGILVGTLVAIGIFLILIFTHWTMSRKKDPDQPADSVPLKATV

SEQ ID NO: 81600 - DNA, 2199 bp, Artificial Sequence
  derived and/or modified sequence
atggtgcccgcttggctgtggctgctgtgcgtttctgtgccacaagcgctcccaaaggcccaacctgccgagctctccgtggaagtgccggagaactacggaggcaactttcctctgtatctcacaaagctgccgttgccaagggagggagccgaaggccagattgtcctcagcggagactcgggcaaagccacagagggcccatttgctatggatcccgactctggatttctcctggtcacacgcgccctagatagggaagaacaggccgagtatcagctgcaagtgaccctggaaatgcaggatgggcatgtactctggggccctcagccagtgttggtgcatgtgaaggatgaaaacgaccaggcttccggacatcaagctacagccactgtggaggtgagcatcattgagtctacatgggtgtcactggagcccatccatcttgcagaaaacctgaaggtgctctacccacaccacatggcccaggtccattggagtgggggcgatgtacattaccatctggaaagccacccacccggccccttcgaggtgaacgcggaggggaacctttacgtcactcgcgagctggaccgcgaggcacaggcagaatatctgctacaggtcagggcccagaatagccacggggaggactatgccgcccccttggagctgcacgttctagtaatggacgaaaatgataacgtgcccatctgcccaccacgcgatccaaccgtgagcattcctgagctttccccccccgggacagaagtcactcgcctatcagcagaagacgccgacgccccgggcagcccaaattcacatgtagtgtatcaactgttaagtcccgagccagaggatggagtggaaggcagagcgtttcaggtggatccaacttccggtagcgtcaccctgggggtgctcccactgagagctggacaaaatatcctgctgttagtgctcgccatggatctagctggggcagaggggggcttctcatctacctgcgaggtagaggtggcagttaccgacatcaatgatcacgctccagaatttatcacatctcagatcggacccatctccctcccagaggatgtggagcccgggaccctggtagccatgttaaccgcgattgatgccgatctcgaaccggcgttcaggctgatggacttcgccatagaacgaggcgacactgagggaacctttggtctggactgggagcccgactcaggacacgtgcgcctgaggctgtgtaagaacctgagctacgaggcagccccctcacacgaagtagtcgttgtggttcaatctgtggccaagctggtggggcctggccccggccctggagcaaccgcaaccgtgactgtgctggtggagagagtcatgcctccaccaaaactcgaccaagaaagctacgaggcctccgttcccatcagcgctcctgccgggtctttcctgttaacaatacaacccagtgatcctatctctcggacactgcgttttagcctcgtcaatgattccgagggttggctctgcatcgaaaagttttcaggggaggtgcacacggctcagtccctacagggggcacaaccaggagatacatataccgtgctggttgaagcccaggacaccgatgagcctagactcagcgcttcagcccccctggtgatccacttccttaaagccccgcccgccccagccctgaccctggcccctgtaccgtctcaatacttgtgcactcctcgtcaggaccacggactgatcgtgtcgggcccttcaaaagacccagacctggcctccggccatggtccctattcattcacgctcggtcctaatccaaccgtacagcgggactggaggcttcagactttaaacgggtcccatgcttacctcacactcgccctccactgggtcgaacctcgggagcatattattcctgtggtggtgtcgcacaatgcacagatgtggcaactgctagtgagggtaattgtctgcagatgcaatgtcgagggccagtgtatgcgaaaagtggggcgtatgaagggaatgcctacaaaactcagcgccgtgggcatccttgtgggaacgcttgtggccattggaatcttcctgattctgattttcacccattggacaatgagcaggaaaaaggacccagaccaacccgccgattcggtgccactcaaggccactgtgtag

SEQ ID NO: 81601 - DNA, 2199 bp, Artificial Sequence
  derived and/or modified sequence
atggtgcctgcctggctgtggctgctgtgtgtgtctgtgccccaggccctgcccaaggcccagcctgctgagctgtctgtggaggtgcctgaaaattatggaggcaacttccccctgtacctgaccaagctgcccctgccccgggagggcgctgagggccagatcgtgctgagcggggacagcggcaaggccacagagggcccctttgccatggaccctgattctggcttcctgctggtgacccgggccctggaccgggaggagcaggccgagtaccagctgcaggtgaccctggagatgcaggacggccacgtgctgtggggcccccagcctgtgctggtgcacgtgaaggatgaaaatgaccaggccagcggccaccaggccacagccaccgtggaggtgtccatcatcgagagcacctgggtgtccctggagcccatccacctggccgagaacctgaaggtgctgtacccccaccacatggcccaggtgcactggagcggaggagatgtgcactaccacctggagagccaccccccaggcccctttgaggtgaatgctgagggcaacctgtatgtgacccgggagctggaccgggaggcccaggccgagtacctgctgcaggtgcgggcccagaacagccatggagaagattatgctgcccccctggagctgcacgtgctggtgatggatgaaaatgacaacgtgcccatctgccccccccgggaccccaccgtgtccatccctgagctgagccccccaggcacagaggtgacccggctgtctgcagaagatgctgatgcccctggcagccccaacagccacgtggtgtaccagctgctgagccctgagccagaagatggagtggagggccgggccttccaggtggaccccaccagcggctctgtgaccctgggcgtgctgcccctgcgggccggccagaacatcctgctgctggtgctggccatggacctggccggggctgagggcggcttcagcagcacctgtgaggtggaggtggccgtgacagacatcaatgaccacgcccctgagttcatcaccagccagatcggccccatcagcctgcctgaagatgtggagcccggcaccctggtggccatgctgacagccattgatgctgacctggagcccgccttccggctgatggactttgccatcgagcggggggacacagagggcaccttcggcctggactgggagccagacagcggccacgtgcggctgcggctgtgcaagaacctgtcctatgaagctgcccccagccatgaggtggtggtggtggtgcagagcgtggccaagctggtgggccctggccctggccctggggccacagccaccgtgacagtgctggtggagcgggtgatgcccccacccaagctggaccaggagagctatgaggcctctgtgcccatcagcgccccagctggcagcttcctgctgaccatccagcccagcgaccccatcagcaggaccctgcgcttcagcctggtgaatgattctgagggctggctgtgcatcgagaagttctctggagaggtgcacacagcccagagcctgcagggcgcccagcccggggacacctacacagtgctggtggaggcccaggacacagatgagccccggctgagcgccagcgcccccctggtgatccacttcctgaaggcccccccagccccagccctgaccctggcccctgtgcccagccagtacctgtgcaccccccggcaggaccacggcctcatcgtgtctggccccagcaaggaccctgacctggccagcggccacggcccctacagcttcaccctgggccccaaccccaccgtgcagagggactggaggctgcagaccctgaatggcagccacgcctacctgaccctggccctgcactgggtggagccccgggagcacatcatccctgtggtggtgagccacaatgcccagatgtggcagctgctggtgcgggtgattgtgtgccgctgcaatgtggagggccagtgcatgaggaaggtgggccgcatgaagggcatgcccaccaagctgtctgctgtgggcatcctggtgggcaccctggtggccatcggcatcttcctgatcctgatcttcacccactggaccatgagcaggaagaaggaccctgaccagcctgctgacagcgtgcccctgaaggccaccgtgtag

SEQ ID NO: 81602 - DNA, 2199 bp, Artificial Sequence
  derived and/or modified sequence
atggtgcccgcctggctgtggctgctgtgcgtgagcgtgccccaggctctgcccaaagctcagcctgcagagctgtctgtggaggtccctgaaaattatgggggcaacttccccctttatctcaccaagttgccacttccacgggaaggcgcagagggccaaatagtgttaagtggcgattctggcaaagccacagagggaccattcgcgatggatcctgactctggctttctgctggtaacacgcgccctggatagggaggagcaggctgaatatcagcttcaggtgactttagagatgcaggacggccacgttttatgggggccacaacccgtgctagtgcatgtcaaggatgaaaatgaccaagcatccggacaccaggcgaccgccaccgtggaagtctccattatagagtctacgtgggtttcgttagagccgatccacctggctgagaacctcaaagtactctacccccaccatatggcccaggttcactggagtgggggtgacgtgcactaccacctcgagtcacacccacctggaccctttgaagttaatgctgaagggaatctgtacgtcactcgggagctcgacagggaagcccaggccgaatacctcctccaagtgcgggcccagaattctcacggcgaggattacgctgcacctctcgagttgcatgtcctcgtgatggatgagaatgataatgtcccaatatgcccgccaagggatcctaccgtcagcatccctgagttgtcgccgccgggaacagaggtgacacgcctgtccgcggaggacgccgacgcccccggatcacctaactcacacgtcgtatatcagttactctccccagagccagaggatggggttgaagggcgagcatttcaggtagatcctacctcgggaagtgtgactctcggcgtgctgcctcttagagcaggccagaacattctgctgttggtgcttgcaatggacttggccggcgccgagggcgggttttcctccacatgcgaagtggaagtcgccgtgacggacattaatgatcatgcccccgaattcatcacaagtcagattggccccattagcctgcccgaggacgtcgagcctgggactctggtggcgatgctaactgcaatagacgctgatttggagcccgccttcagattaatggatttcgccatcgagaggggtgacaccgagggcacgttcggcctggactgggagcccgattccgggcatgtgaggctgaggctgtgtaaaaacctaagttatgaagctgctccctcccacgaggtcgtcgttgttgtacaatcagttgcaaaacttgtcgggcctggaccggggcctggagcaaccgccacagtgacggttttagttgagcgggtgatgccaccacccaaactggaccaagagtcctatgaagcaagcgtgcctatttctgctcccgccggaagtttcctcttgacaattcagccatctgatccgatctcacggacattgcggttctccctggtaaacgatagcgagggctggctttgcatcgaaaaattctccggggaagttcatactgcccagtcattacaaggggcccaacctggagatacatataccgtgctggtggaggctcaggataccgacgaaccccgtctgagcgccagcgcccctctggtcatccatttcctgaaggctcccccagctcctgccttaactctggctcctgtcccaagccagtacctctgtacaccgagacaagaccatgggcttatcgtgtccggcccctccaaggatcctgacctcgcctccggacacggaccctattctttcaccctgggccctaatccaacggtgcagcgcgactggaggttgcagacattgaacggcagccatgcttacctgacgctcgctctgcattgggtggagccacgggaacacattatcccagtagtcgtgtctcacaatgcccaaatgtggcagctgctagtcagggtaatcgtgtgcaggtgcaacgttgaagggcagtgtatgcgtaaggtgggacggatgaaaggtatgcccaccaaactgtcagctgtgggtatcctagtgggaaccctggtggccattgggatctttctgatccttatcttcacacattggacaatgtcaagaaaaaaggatcccgatcagcctgctgacagcgttcccctcaaagcgacagtttag

SEQ ID NO: 81603 - DNA, 2199 bp, Artificial Sequence
  derived and/or modified sequence
atggttccggcttggctctggctcctgtgcgtgagtgtccctcaggcactccctaaagcccagccagccgagctcagcgtggaggtgcctgagaactacggaggtaactttcccttgtacttaaccaaactaccactgcctcgagagggagccgagggtcagatagtgctgtcaggagactccggcaaagccaccgaagggcctttcgctatggatccagactccggttttctattggtcacccgcgctcttgatagggaagagcaggctgagtaccaactgcaggtcacactcgagatgcaggacggccatgtgctctgggggccacagcctgttttggtccatgtcaaagacgagaatgaccaagcctctggccaccaggcaaccgctactgttgaggtatctatcattgagtccacctgggttagtctggagccgatccatttagccgagaatctgaaggtgttgtatccacatcacatggcccaggtgcattggtcaggaggtgatgtgcattatcatctcgagtcgcaccccccaggaccgtttgaagttaacgctgaaggcaatctgtacgttaccagagaattggaccgcgaagcgcaagctgaatatttgctgcaggttcgcgctcaaaactcacatggcgaggattacgccgctcccttggaacttcacgttttagtaatggacgaaaatgacaatgtgccaatttgtcctccgagagaccccaccgtcagcatccctgagctgtctcccccaggcacggaggtgacccggctatccgcagaagatgcggacgctcccggttccccgaacagtcacgtcgtatatcagctgctatcccctgagcccgaagatggtgtagagggtagggcctttcaggtggatcccacctccggctctgtgactctaggtgtgctgcctttacgggctggacagaatatattattgctggtactggcaatggacttagctggagcggaaggcggatttagttcaacatgtgaagtggaagtggccgtcaccgatattaatgaccacgcccctgagttcatcacaagccagattggacctatttcgctacctgaggacgtcgaacccggaacattagtggctatgctgaccgctatcgacgctgatctggagccggctttccgcctcatggatttcgctatcgagcggggagatacggaaggaacttttggactggattgggaacctgactccgggcatgtacggctccggttgtgtaaaaacctcagctacgaggcagcccctagccatgaggttgtggtggtagtgcagtctgtcgccaaactcgtgggccctggacccggacccggagccacagcaaccgtgacggtgctcgtggagcgtgtgatgcccccacctaagctcgaccaggaaagctacgaagcaagcgtgccaatttctgcacccgctggcagcttcctgctgacaatccagcctagtgacccaatctctcggactctgcggttttctctcgttaacgactcggaaggttggctctgcatcgaaaagttctccggggaagtgcacactgcgcagtctctgcagggcgctcagcccggtgatacttatacagtgctcgtcgaggcccaggacactgatgagcctaggctgtcagcgtccgctcctcttgtgattcactttctcaaggctcctccggctcctgcgctcaccctcgcccctgtgccctcgcagtacctgtgcactccgagacaggaccacgggctgatagtgtccgggccaagcaaagacccagaccttgcttcaggccacggaccttactcatttactcttggacccaacccaaccgttcagcgcgactggcgacttcagactctgaacggcagccatgcctatcttacgctggcactccattgggtggagcctcgcgaacatatcataccagtagtggtaagccacaatgcccaaatgtggcaactgcttgtccgtgttatagtgtgccggtgtaatgtggaaggacaatgcatgcggaaggtagggagaatgaagggaatgccaactaagctctcagctgtgggtattctggtgggaaccctcgtggctattgggatcttccttattctgatctttacacactggactatgtcaaggaagaaagaccccgatcagccagccgactctgtgccactaaaagcaactgtgtag

SEQ ID NO: 81604 - DNA, 2526 bp, Artificial Sequence
  derived and/or modified sequence
ttgcttggcagctggaccaagggagccagtcttgggcgctggagggcctgtcctgaccatggtccctgcctggctgtggctgctttgtgtctccgtcccccaggctctccccaaggcccagcctgcagagctgtctgtggaagttccagaaaactatggtggaaatttccctttatacctgaccaagttgccgctgccccgtgagggggctgaaggccagatcgtgctgtcaggggactcaggcaaggcaactgagggcccatttgctatggatccagattctggcttcctgctggtgaccagggccctggaccgagaggagcaggcagagtaccagctacaggtcaccctggagatgcaggatggacatgtcttgtggggtccacagcctgtgcttgtgcacgtgaaggatgagaatgaccaggcctcaggccaccaggccactgccaccgtggaagtctccatcatagagagcacctgggtgtccctagagcctatccacctggcagagaatctcaaagtcctatacccgcaccacatggcccaggtacactggagtgggggtgatgtgcactatcacctggagagccatcccccgggaccctttgaagtgaatgcagagggaaacctctacgtgaccagagagctggacagagaagcccaggctgagtacctgctccaggtgcgggctcagaattcccatggcgaggactatgcggcccctctggagctgcacgtgctggtgatggatgagaatgacaacgtgcctatctgccctccccgtgaccccacagtcagcatccctgagctcagtccaccaggtactgaagtgactagactgtcagcagaggatgcagatgcccccggctcccccaattcccacgttgtgtatcagctcctgagccctgagcctgaggatggggtagaggggagagccttccaggtggaccccacttcaggcagtgtgacgctgggggtgctcccactccgagcaggccagaacatcctgcttctggtgctggccatggacctggcaggcgcagagggtggcttcagcagcacgtgtgaagtcgaagtcgcagtcacagatatcaatgatcacgcccctgagttcatcacttcccagattgggcctataagcctccctgaggatgtggagcccgggactctggtggccatgctaacagccattgatgctgacctcgagcccgccttccgcctcatggattttgccattgagaggggagacacagaagggacttttggcctggattgggagccagactctgggcatgttagactcagactctgcaagaacctcagttatgaggcagctccaagtcatgaggtggtggtggtggtgcagagtgtggcgaagctggtggggccaggcccaggccctggagccaccgccacggtgactgtgctagtggagagagtgatgccaccccccaagttggaccaggagagctacgaggccagtgtccccatcagtgccccagccggctctttcctgctgaccatccagccctccgaccccatcagccgaaccctcaggttctccctagtcaatgactcagagggctggctctgcattgagaaattctccggggaggtgcacaccgcccagtccctgcagggcgcccagcctggggacacctacacggtgcttgtggaggcccaggatacagatgagccgagactgagcgcttctgcacccctggtgatccacttcctaaaggcccctcctgccccagccctgactcttgcccctgtgccctcccaatacctctgcacaccccgccaagaccatggcttgatcgtgagtggacccagcaaggaccccgatctggccagtgggcacggtccctacagcttcacccttggtcccaaccccacggtgcaacgggattggcgcctccagactctcaatggttcccatgcctacctcaccttggccctgcattgggtggagccacgtgaacacataatccccgtggtggtcagccacaatgcccagatgtggcagctcctggttcgagtgatcgtgtgtcgctgcaacgtggaggggcagtgcatgcgcaaggtgggccgcatgaagggcatgcccacgaagctgtcggcagtgggcatccttgtaggcaccctggtagcaataggaatcttcctcatcctcattttcacccactggaccatgtcaaggaagaaggacccggatcaaccagcagacagcgtgcccctgaaggcgactgtctgaatggcccaggcagctctagctgggagcttggcctctggctccatctgagtcccctgggagagagcccagcacccaagatccagcaggggacaggacagagtagaagcccctccatctgccctggggtggaggcaccatcaccatcaccaggcatgtctgcagagcctggacaccaactttatggactgcccatgggagtgctccaaatgtcagggtgtttgcccaataataaagccccagagaactgggctgggccctatgggattggt

SEQ ID NO: 81605 - DNA, 2199 bp, Artificial Sequence
  derived and/or modified sequence
atggtgcccgcctggctgtggctgctgtgcgtgagcgtgccccaggccctgcccaaggcccagcccgccgagctgagcgtggaggtgcccgagaactacggcggcaacttccccctgtacctgaccaagctgcccctgcccagagagggcgccgagggccagatcgtgctgagcggcgacagcggcaaggccaccgagggccccttcgccatggaccccgacagcggcttcctgctggtgaccagagccctggacagagaggagcaggccgagtaccagctgcaggtgaccctggagatgcaggacggccacgtgctgtggggcccccagcccgtgctggtgcacgtgaaggacgagaacgaccaggccagcggccaccaggccaccgccaccgtggaggtgagcatcatcgagagcacctgggtgagcctggagcccatccacctggccgagaacctgaaggtgctgtacccccaccacatggcccaggtgcactggagcggcggcgacgtgcactaccacctggagagccacccccccggccccttcgaggtgaacgccgagggcaacctgtacgtgaccagagagctggacagagaggcccaggccgagtacctgctgcaggtgagagcccagaacagccacggcgaggactacgccgcccccctggagctgcacgtgctggtgatggacgagaacgacaacgtgcccatctgcccccccagagaccccaccgtgagcatccccgagctgagcccccccggcaccgaggtgaccagactgagcgccgaggacgccgacgcccccggcagccccaacagccacgtggtgtaccagctgctgagccccgagcccgaggacggcgtggagggcagagccttccaggtggaccccaccagcggcagcgtgaccctgggcgtgctgcccctgagagccggccagaacatcctgctgctggtgctggccatggacctggccggcgccgagggcggcttcagcagcacctgcgaggtggaggtggccgtgaccgacatcaacgaccacgcccccgagttcatcaccagccagatcggccccatcagcctgcccgaggacgtggagcccggcaccctggtggccatgctgaccgccatcgacgccgacctggagcccgccttcagactgatggacttcgccatcgagagaggcgacaccgagggcaccttcggcctggactgggagcccgacagcggccacgtgagactgagactgtgcaagaacctgagctacgaggccgcccccagccacgaggtggtggtggtggtgcagagcgtggccaagctggtgggccccggccccggccccggcgccaccgccaccgtgaccgtgctggtggagagagtgatgcccccccccaagctggaccaggagagctacgaggccagcgtgcccatcagcgcccccgccggcagcttcctgctgaccatccagcccagcgaccccatcagcagaaccctgagattcagcctggtgaacgacagcgagggctggctgtgcatcgagaagttcagcggcgaggtgcacaccgcccagagcctgcagggcgcccagcccggcgacacctacaccgtgctggtggaggcccaggacaccgacgagcccagactgagcgccagcgcccccctggtgatccacttcctgaaggccccccccgcccccgccctgaccctggcccccgtgcccagccagtacctgtgcacccccagacaggaccacggcctgatcgtgagcggccccagcaaggaccccgacctggccagcggccacggcccctacagcttcaccctgggccccaaccccaccgtgcagagagactggagactgcagaccctgaacggcagccacgcctacctgaccctggccctgcactgggtggagcccagagagcacatcatccccgtggtggtgagccacaacgcccagatgtggcagctgctggtgagagtgatcgtgtgcagatgcaacgtggagggccagtgcatgagaaaggtgggcagaatgaagggcatgcccaccaagctgagcgccgtgggcatcctggtgggcaccctggtggccatcggcatcttcctgatcctgatcttcacccactggaccatgagcagaaagaaggaccccgaccagcccgccgacagcgtgcccctgaaggccaccgtgtag

SEQ ID NO: 81606 - protein, 1148 aa, Artificial Sequence
  derived and/or modified sequence
MDIRKFFGVIPSGKKLVSETVKKNEKTKSDEETLKAKKGIKEIKVNSSRKEDDFKQKQPSKKKRIIYDSDSESEETLQVKNAKKPPEKLPVSSKPGKISRQDPVTYISETDEEDDFMCKKAASKSKENGRSTNSHLGTSNMKKNEENTKTKNKPLSPIKLTPTSVLDYFGTGSVQRSNKKMVASKRKELSQNTDESGLNDEAIAKQLQLDEDAELERQLHEDEEFARTLAMLDEEPKTKKARKDTEAGETFSSVQANLSKAEKHKYPHKVKTAQVSDERKSYSPRKQSKYESSKESQQHSKSSADKIGEVSSPKASSKLAIMKRKEESSYKEIEPVASKRKENAIKLKGETKTPKKTKSSPAKKESVSPEDSEKKRTNYQAYRSYLNREGPKALGSKEIPKGAENCLEGLIFVITGVLESIERDEAKSLIERYGGKVTGNVSKKTNYLVMGRDSGQSKSDKAAALGTKIIDEDGLLNLIRTMPGKKSKYEIAVETEMKKESKLERTPQKNVQGKRKISPSKKESESKKSRPTSKRDSLAKTIKKETDVFWKSLDFKEQVAEETSGDSKARNLADDSSENKVENLLWVDKYKPTSLKTIIGQQGDQSCANKLLRWLRNWQKSSSEDKKHAAKFGKFSGKDDGSSFKAALLSGPPGVGKTTTASLVCQELGYSYVELNASDTRSKSSLKAIVAESLNNTSIKGFYSNGAASSVSTKHALIMDEVDGMAGNEDRGGIQELIGLIKHTKIPIICMCNDRNHPKIRSLVHYCFDLRFQRPRVEQIKGAMMSIAFKEGLKIPPPAMNEIILGANQDIRQVLHNLSMWCARSKALTYDQAKADSHRAKKDIKMGPFDVARKVFAAGEETAHMSLVDKSDLFFHDYSIAPLFVQENYIHVKPVAAGGDMKKHLMLLSRAADSICDGDLVDSQIRSKQNWSLLPAQAIYASVLPGELMRGYMTQFPTFPSWLGKHSSTGKHDRIVQDLALHMSLRTYSSKRTVNMDYLSLLRDALVQPLTSQGVDGVQDVVALMDTYYLMKEDFENIMEISSWGGKPSPFSKLDPKVKAAFTRAYNKEAHLTPYSLQAIKASRHSTSPSLDSEYNEELNEDDSQSDEKDQDAIETDAMIKKKTKSSKPSKPEKDKEPRKGKGKSSKK

SEQ ID NO: 81607 - DNA, 3447 bp, Artificial Sequence
  derived and/or modified sequence
atggacatcagaaagttcttcggcgtgatccccagcggcaagaagctggtgagcgagaccgtgaagaagaacgagaagaccaagagcgacgaggagaccctgaaggccaagaagggcatcaaggagatcaaggtgaacagcagcagaaaggaggacgacttcaagcagaagcagcccagcaagaagaagagaatcatctacgacagcgacagcgagagcgaggagaccctgcaggtgaagaacgccaagaagccccccgagaagctgcccgtgagcagcaagcccggcaagatcagcagacaggaccccgtgacctacatcagcgagaccgacgaggaggacgacttcatgtgcaagaaggccgccagcaagagcaaggagaacggcagaagcaccaacagccacctgggcaccagcaacatgaagaagaacgaggagaacaccaagaccaagaacaagcccctgagccccatcaagctgacccccaccagcgtgctggactacttcggcaccggcagcgtgcagagaagcaacaagaagatggtggccagcaagagaaaggagctgagccagaacaccgacgagagcggcctgaacgacgaggccatcgccaagcagctgcagctggacgaggacgccgagctggagagacagctgcacgaggacgaggagttcgccagaaccctggccatgctggacgaggagcccaagaccaagaaggccagaaaggacaccgaggccggcgagaccttcagcagcgtgcaggccaacctgagcaaggccgagaagcacaagtacccccacaaggtgaagaccgcccaggtgagcgacgagagaaagagctacagccccagaaagcagagcaagtacgagagcagcaaggagagccagcagcacagcaagagcagcgccgacaagatcggcgaggtgagcagccccaaggccagcagcaagctggccatcatgaagagaaaggaggagagcagctacaaggagatcgagcccgtggccagcaagagaaaggagaacgccatcaagctgaagggcgagaccaagacccccaagaagaccaagagcagccccgccaagaaggagagcgtgagccccgaggacagcgagaagaagagaaccaactaccaggcctacagaagctacctgaacagagagggccccaaggccctgggcagcaaggagatccccaagggcgccgagaactgcctggagggcctgatcttcgtgatcaccggcgtgctggagagcatcgagagagacgaggccaagagcctgatcgagagatacggcggcaaggtgaccggcaacgtgagcaagaagaccaactacctggtgatgggcagagacagcggccagagcaagagcgacaaggccgccgccctgggcaccaagatcatcgacgaggacggcctgctgaacctgatcagaaccatgcccggcaagaagagcaagtacgagatcgccgtggagaccgagatgaagaaggagagcaagctggagagaaccccccagaagaacgtgcagggcaagagaaagatcagccccagcaagaaggagagcgagagcaagaagagcagacccaccagcaagagagacagcctggccaagaccatcaagaaggagaccgacgtgttctggaagagcctggacttcaaggagcaggtggccgaggagaccagcggcgacagcaaggccagaaacctggccgacgacagcagcgagaacaaggtggagaacctgctgtgggtggacaagtacaagcccaccagcctgaagaccatcatcggccagcagggcgaccagagctgcgccaacaagctgctgagatggctgagaaactggcagaagagcagcagcgaggacaagaagcacgccgccaagttcggcaagttcagcggcaaggacgacggcagcagcttcaaggccgccctgctgagcggcccccccggcgtgggcaagaccaccaccgccagcctggtgtgccaggagctgggctacagctacgtggagctgaacgccagcgacaccagaagcaagagcagcctgaaggccatcgtggccgagagcctgaacaacaccagcatcaagggcttctacagcaacggcgccgccagcagcgtgagcaccaagcacgccctgatcatggacgaggtggacggcatggccggcaacgaggacagaggcggcatccaggagctgatcggcctgatcaagcacaccaagatccccatcatctgcatgtgcaacgacagaaaccaccccaagatcagaagcctggtgcactactgcttcgacctgagattccagagacccagagtggagcagatcaagggcgccatgatgagcatcgccttcaaggagggcctgaagatccccccccccgccatgaacgagatcatcctgggcgccaaccaggacatcagacaggtgctgcacaacctgagcatgtggtgcgccagaagcaaggccctgacctacgaccaggccaaggccgacagccacagagccaagaaggacatcaagatgggccccttcgacgtggccagaaaggtgttcgccgccggcgaggagaccgcccacatgagcctggtggacaagagcgacctgttcttccacgactacagcatcgcccccctgttcgtgcaggagaactacatccacgtgaagcccgtggccgccggcggcgacatgaagaagcacctgatgctgctgagcagagccgccgacagcatctgcgacggcgacctggtggacagccagatcagaagcaagcagaactggagcctgctgcccgcccaggccatctacgccagcgtgctgcccggcgagctgatgagaggctacatgacccagttccccaccttccccagctggctgggcaagcacagcagcaccggcaagcacgacagaatcgtgcaggacctggccctgcacatgagcctgagaacctacagcagcaagagaaccgtgaacatggactacctgagcctgctgagagacgccctggtgcagcccctgaccagccagggcgtggacggcgtgcaggacgtggtggccctgatggacacctactacctgatgaaggaggacttcgagaacatcatggagatcagcagctggggcggcaagcccagccccttcagcaagctggaccccaaggtgaaggccgccttcaccagagcctacaacaaggaggcccacctgaccccctacagcctgcaggccatcaaggccagcagacacagcaccagccccagcctggacagcgagtacaacgaggagctgaacgaggacgacagccagagcgacgagaaggaccaggacgccatcgagaccgacgccatgatcaagaagaagaccaagagcagcaagcccagcaagcccgagaaggacaaggagcccagaaagggcaagggcaagagcagcaagaagtag

SEQ ID NO: 81608 - DNA, 3447 bp, Artificial Sequence
  derived and/or modified sequence
atggatattagaaaatttttcggagtcatcccatccggcaagaaactcgtcagtgaaactgtgaaaaaaaacgagaagacaaagagcgacgaggagactctgaaagccaaaaagggtatcaaggagatcaaggtgaacagcagccgtaaagaggatgattttaagcagaaacaaccctcaaagaagaaacgaattatctatgatagcgattccgagtcagaagagacactccaggtgaaaaacgctaaaaagcctcccgagaaactgccagtctctagcaaacccggtaagataagtcggcaggacccagtgacttacatttccgaaactgacgaggaagatgattttatgtgcaagaaggcagcatccaagtctaaggagaacgggcgtagtacaaactcacatctaggaacatccaacatgaagaaaaacgaagagaacactaagaccaaaaataaacctttgagccccatcaagctgacacccacaagcgtgctggattactttggcacaggttctgtccagcgctccaacaagaaaatggtcgcttctaagcgcaaggagctgtctcaaaacaccgatgagtcaggcctcaatgacgaagccatcgccaagcagctacagttggacgaagatgctgagcttgagaggcagctacatgaggacgaggagtttgccagaaccctcgctatgctagatgaggagcctaagacaaagaaggcacggaaggatactgaggcaggagaaaccttctcctccgtgcaggccaacttgtcaaaggccgagaagcacaagtacccacataaggttaagactgctcaggtatccgacgagaggaagagctactctcccagaaagcagtccaagtacgaatcctcaaaggaatctcagcagcatagcaaaagctcggcagacaagattggagaagtgtcatctcctaaggcaagctctaaactggccatcatgaaaaggaaggaagagagttcttataaggagatagagcctgtggcttcaaagaggaaggaaaacgcgatcaagttgaagggagagaccaaaacgccaaagaagaccaagtcttcgcctgccaaaaaagagagcgtgagtccagaagactccgagaagaagcggactaattatcaggcctatcgctcctatttgaacagagagggacctaaggctttggggtccaaggagatccctaaaggcgcagagaactgcctggaaggtttaatcttcgtcatcaccggagtgctggagagcatcgagcgcgatgaggccaaatccctgatcgagcgttacggggggaaagtgacaggaaatgttagcaagaagacgaattaccttgtcatgggtcgcgattctgggcagtctaagtcggataaagcggctgccctcggtacaaaaattatcgacgaagacggactgctgaatctgatccgaaccatgcccgggaagaagagtaaatacgagatcgccgtcgaaacggagatgaagaaggagagtaagctggagcgaaccccccagaaaaatgtgcagggcaagcgcaagattagcccaagcaagaaggaaagcgaaagcaagaagtcgagacccacatcaaaaagagattcactcgccaagacaatcaagaaggagactgatgtattttggaaatctcttgattttaaggagcaggtggccgaagaaacttctggcgattccaaggctaggaacctcgctgacgactcaagcgaaaataaggtggagaacttgctttgggtggacaagtacaagccaactagcctcaaaaccatcatcggccagcaaggcgatcagagctgcgccaataagctcctcagatggctgagaaattggcaaaaatccagctctgaagacaagaaacacgcagctaagttcgggaaattttcagggaaagatgatgggtcttcttttaaggctgcactgctgtcaggcccccccggggtaggcaagacgaccaccgcttccttggtctgtcaggagctgggatactcctacgttgaattgaatgcatccgacacaagatctaagtcaagcctgaaggctatcgttgcagagagcctcaataatacatctatcaagggattttattcaaatggcgccgccagttctgtcagtactaagcacgctttaatcatggatgaagtcgatggcatggccgggaacgaggaccgcgggggcatccaagaactcattgggctgatcaagcacaccaagataccaattatatgcatgtgtaatgaccgcaatcaccccaagattcgctctctggtccattactgctttgacctgcggttccagcggccgcgtgttgaacaaatcaagggggccatgatgagcatcgcattcaaggaggggctaaaaatccctcctcccgctatgaatgaaatcatactgggcgctaaccaggacatccggcaggtgctacacaacctctccatgtggtgtgccaggtctaaggcactaacttacgaccaagccaaggctgattcccacagggccaaaaaggacattaagatgggcccctttgacgttgccaggaaggtgtttgctgcaggcgaggaaaccgcccacatgagtctagtggacaagtcagatctgtttttccatgattactctattgcacctctgttcgttcaggagaattatatccatgtgaagcccgtcgcggctggtggtgacatgaagaagcacctgatgctcctgtcacgggccgcagactccatttgcgatggagacctcgtggactcacaaattaggagcaaacagaattggtctctgcttccagctcaggctatctatgcatcagtgctgcccggtgagctgatgcggggatatatgactcagttccccacgttcccttcttggcttggcaagcacagttcaactggcaaacatgataggatagtgcaggaccttgccctgcacatgtctctgagaacgtactcatcaaagcggaccgtcaatatggactatctgtctctcttgagagacgcactcgtgcagccgttaacttctcagggtgtagatggcgtccaggacgttgtagcactgatggatacatactatctgatgaaggaagacttcgaaaatatcatggagatttcatcatggggcggaaagccatcccctttttcaaagttggatcctaaggttaaggctgcattcacacgggcctacaacaaggaagcacacctgactccatactcactgcaagccatcaaagcctcccggcactctacatccccctccctggactcagagtacaacgaagagctcaatgaggacgactcacagagtgatgagaaagaccaggatgcaatcgagaccgacgccatgatcaaaaaaaagacgaaatcctcgaagccgtcgaagccggaaaaggataaagagccccgtaaaggtaaggggaagagcagtaaaaagtag

SEQ ID NO: 81609 - DNA, 3447 bp, Artificial Sequence
  derived and/or modified sequence
atggacatcaggaagttctttggagtcatccccagcggcaagaagctggtgtctgagaccgtgaagaagaatgagaagaccaagagtgatgaggagaccctgaaggccaagaagggcatcaaggagatcaaggtgaacagcagcaggaaagaagatgacttcaagcagaagcagcccagcaagaagaagaggatcatctatgacagcgacagcgagagcgaggagaccctgcaggtgaagaatgccaagaagcccccagagaagctgcctgtgagcagcaagccaggcaagatcagccggcaggaccctgtgacctacatcagcgagacagatgaagaagatgacttcatgtgcaagaaggccgccagcaagagcaaagaaaatggccgcagcaccaacagccacctgggcaccagcaacatgaagaagaatgaggagaacaccaagaccaagaacaagcccctgagccccatcaagctgacccccacctctgtgctggactactttggaactggatctgtgcagaggagcaacaagaagatggtggccagcaagaggaaggagctgagccagaacacagatgagagcggcctgaatgatgaggccatcgccaagcagctgcagctggatgaagatgctgagctggagcggcagctgcatgaagatgaggagtttgcccggaccctggccatgctggatgaggagcccaagaccaagaaggccaggaaggacacagaagctggggagaccttcagctctgtgcaggccaacctgagcaaggccgagaagcacaagtacccccacaaggtgaagacagcccaggtgtctgatgagaggaagagctacagccccaggaagcagagcaaatatgagagcagcaaggagagccagcagcacagcaagagcagcgctgacaagattggagaggtgagcagccccaaggccagcagcaagctggccatcatgaagaggaaggaggagagcagctacaaggagattgagcctgtggccagcaagaggaaagaaaatgccatcaagctgaagggggagaccaagacccccaagaagaccaagagcagccctgccaagaaggagagcgtgtccccagaggacagcgagaagaagaggaccaactaccaggcctaccgcagctacctgaaccgggagggccccaaggccctgggcagcaaggagatccccaagggagctgagaactgcctggagggcctcatcttcgtcatcactggagtgctggagagcattgaaagagatgaggccaagagcctcatcgagagatatggaggcaaggtgactggaaatgtgtccaagaagaccaactacctggtgatgggccgggacagcggccagagcaagagtgacaaggctgctgccctgggcaccaagatcattgatgaagatggcctgctgaacctgatccgcaccatgcctgggaagaagagcaaatatgaaattgctgtggagacagagatgaagaaggagagcaagctggagaggaccccccagaagaatgtgcagggcaagaggaagatcagccccagcaagaaggagagcgagagcaagaagagccggcccaccagcaagagggacagcctggccaagaccatcaagaaggagacagatgtgttctggaagagcctggacttcaaggagcaggtggccgaggagaccagcggggacagcaaggccaggaacctggctgatgacagcagcgagaacaaggtggagaacctgctgtgggtggacaagtacaagcccaccagcctgaagaccatcatcggccagcagggcgaccagagctgtgccaacaagctgctgcgctggctgaggaactggcagaagagcagcagcgaggacaagaagcatgctgccaagtttgggaagttcagcggcaaggatgatggcagcagcttcaaggccgccctgctgagcggccccccaggagtgggcaagaccaccacagccagcctggtgtgccaggagctgggctacagctatgtggagctgaatgccagtgacaccaggagcaagagcagcctgaaggccatcgtggccgagagcctgaacaacaccagcatcaagggcttctacagcaatggagctgccagctctgtgtccaccaagcacgccctgatcatggatgaggtggatggcatggctggaaatgaagatcggggcggcatccaggagctgattggcctcatcaagcacaccaagatccccatcatctgcatgtgcaatgacaggaaccaccccaagatccgcagcctggtgcactactgctttgacctgcgcttccagaggccccgggtggagcagatcaagggggccatgatgagcatcgccttcaaggagggcctgaagatccccccaccagccatgaatgagatcatcctgggcgccaaccaggacatccggcaggtgctgcacaacctgtccatgtggtgtgcccggagcaaggccctgacctatgaccaggccaaggctgacagccaccgggccaagaaggacatcaagatgggcccctttgatgtggccaggaaggtgtttgctgctggggaggagacagcccacatgagcctggtggacaagagtgacctcttcttccatgactacagcatcgcccccctgtttgtgcaggagaactacatccacgtgaagcctgtggccgccggcggggacatgaagaagcacctgatgctgctgagcagagctgctgacagcatctgtgatggagacctggtggacagccagatccgcagcaagcagaactggagcctgctgcctgcccaggccatctatgcctctgtgctgcctggagagctgatgaggggctacatgacccagttccccaccttccccagctggctgggcaagcacagcagcacaggcaagcatgacagaattgtgcaggacctggccctgcacatgagcctgcggacctacagcagcaagaggacagtgaacatggactacctgagcctgctgagagatgccctggtgcagcccctgaccagccagggcgtggatggagtgcaggatgtggtggccctgatggacacctactacctgatgaaggaggactttgagaacatcatggagatcagctcctggggcggcaagcccagccccttcagcaagctggaccccaaggtgaaggccgccttcacccgggcctacaacaaggaggcccacctgaccccctacagcctgcaggccatcaaggccagccgccacagcaccagccccagcctggacagcgagtacaatgaggagctgaatgaagatgacagccagagtgatgagaaggaccaggatgccatcgagacagatgccatgatcaagaagaagaccaagagcagcaagcccagcaagccagagaaggacaaggagcccaggaagggcaagggcaagagcagcaagaagtag

SEQ ID NO: 81610 - DNA, 3447 bp, Artificial Sequence
  derived and/or modified sequence
atggacatccggaagttcttcggcgtgatccccagcggcaagaagctggtttcagagactgtgaagaaaaatgagaagactaaatcagacgaagaaactctgaaagcgaaaaaaggtattaaagaaattaaagtgaactcctccagaaaggaggacgattttaaacaaaagcaaccctccaagaaaaagaggattatctacgatagcgattctgagagtgaggaaactctccaggtgaagaatgcaaagaagcctcccgaaaagctgccagtgtcatccaaacctggaaaaattagtaggcaggatcctgtcacttacatctccgagaccgacgaggaggacgattttatgtgcaaaaaagccgccagcaaaagtaaggagaacggccggtcaactaactcgcatctcggaacgtcaaatatgaaaaaaaacgaagagaacacaaaaactaaaaataagcccctatcaccgatcaaactcacgccaaccagcgtgcttgattacttcggcacaggaagcgtgcaacgctctaataaaaaaatggtggcaagcaagcggaaggaactctctcagaataccgacgagagcgggcttaacgacgaagccattgcaaaacagttgcagctggatgaagatgcagaactcgaacgacagctgcacgaggacgaagagtttgccagaacacttgccatgctggatgaggagcccaaaaccaagaaagctaggaaagacaccgaggccggagaaactttcagctctgtgcaggccaacttatcgaaggccgagaaacacaaatatccccacaaagtcaagacggctcaggtgtcagatgagcgcaagtcttactccccccggaagcagagcaagtacgaatcatccaaagaaagtcagcagcacagcaaaagtagcgccgataagatcggtgaagtatctagtcctaaggcttcctccaagttagctatcatgaaacgaaaagaagagtcctcctacaaggagatcgagccagttgcttccaagcggaaagagaacgcaattaaactcaaaggagaaactaaaacacctaagaaaaccaaaagctctcccgcaaagaaggaaagcgtgtccccagaggacagtgagaagaaaaggacgaactaccaggcttatcgctcctatctgaatcgagaggggccgaaagccctgggctccaaggaaatacctaagggagccgaaaactgtttagagggtcttatttttgtgattacaggcgtgctcgagagtatcgaaagggatgaggcaaagagtcttatcgagcggtatggagggaaggtcaccggcaatgtaagtaaaaaaacaaattatctagtcatgggaagggactctgggcagtcaaagtccgacaaagctgccgcactggggaccaagattatcgacgaagatggcctcctcaatttgattaggaccatgcccgggaagaagagcaagtacgaaatcgctgtagaaacagaaatgaaaaaagagtcaaagctggaacgcaccccccagaaaaacgtccaagggaagcgcaaaattagcccatctaaaaaagaatccgagtcaaagaaatcccgcccaacgtcaaaacgcgatagtttggctaagactatcaaaaaggagacagacgtgttctggaagtcattggacttcaaagagcaggtggctgaggaaacctcaggggatagtaaggcacggaacctcgcagatgatagctctgagaataaggtcgaaaatctactctgggtcgacaaatataagccaacaagtctgaaaaccattatcggacagcagggtgatcaaagttgtgctaataagttactgagatggttacggaactggcagaagtcatcttccgaggataagaaacacgctgccaaattcggtaagttctctgggaaggatgatggctcttccttcaaggctgcccttctgagcgggcctcctggagtcggaaaaaccacgacggccagtctcgtctgtcaagaacttggctacagttacgtggaattaaatgcttcagatacgcgctctaagtccagcctcaaagccatagtcgcagagagcctcaataatacctcgataaaggggttttatagcaacggcgctgcaagttctgttagtacaaagcacgccctcattatggacgaggtggacgggatggccggcaatgaggacagagggggcatccaggagctgatcggccttatcaaacacacgaaaatccccataatctgcatgtgtaatgataggaaccaccctaaaatccggtccctcgtccattactgttttgacttacgctttcagaggccaagggttgagcagattaaaggcgccatgatgtcaattgccttcaaggaaggactgaagattccaccacctgccatgaacgagatcattttgggggccaatcaggacatcaggcaggtccttcataatttgtcaatgtggtgtgctagaagcaaggcactgacctacgaccaagctaaagccgacagccatcgcgcaaaaaaggacatcaagatgggtcccttcgatgtggcaaggaaagtcttcgctgcaggggaagaaaccgcacatatgagcctcgttgacaagtcggacctattttttcacgattattctattgcccctctgtttgtgcaggagaactatattcacgttaaacctgtggccgcggggggggatatgaaaaagcacctgatgttactttcccgcgcagcagacagcatctgtgatggtgacctggtcgattctcagattagatctaagcagaattggagccttctacctgcccaagccatctatgcctcagtgttgccaggcgaactcatgcggggatatatgactcagttcccaactttccccagctggcttgggaaacactcaagcaccggcaagcacgatcgcattgttcaggacctcgctctgcatatgagcctccggacatattcgtctaagagaacagttaatatggactatctctctttgctcagggacgcgctggtgcagccattgacaagccagggcgtcgacggagtccaagatgtggtggctctaatggacacgtattacctgatgaaggaggattttgaaaatattatggaaattagcagttggggtggcaaaccttccccattttctaagctagacccaaaggtaaaggccgctttcacccgggcctacaacaaagaggcccacttaacaccctactctctccaggcaataaaggcctctcggcatagtacatcaccctcgctcgactctgagtataatgaggaactgaatgaggacgacagtcagagcgatgagaaggatcaggatgctatcgaaacagatgctatgatcaaaaagaagactaagtcatcgaaaccgagcaagcccgagaaggataaggaaccgcgaaaaggaaaaggcaaatcgagcaagaaatag

SEQ ID NO: 81611 - DNA, 3447 bp, Artificial Sequence
  derived and/or modified sequence
atggatatccgcaagttttttggcgtcattccctccgggaaaaaacttgtgtctgaaactgttaagaaaaatgaaaaaaccaaatctgatgaggaaaccctgaaagcaaaaaaagggatcaaagagataaaagtcaactcatccaggaaggaagacgacttcaagcagaagcagcccagcaaaaaaaagaggatcatatatgactcagattctgaaagtgaggagacactccaggtgaagaatgctaagaagcctcccgagaagttaccagtatcctctaaacctgggaagatttctcgccaagacccggtgacctacataagtgagacggatgaggaagacgatttcatgtgtaaaaaggccgcatccaaatccaaagagaatggaaggtccaccaattcccatttggggacctcaaacatgaagaaaaacgaggagaatacaaagaccaagaataagcctctgagtccaattaagcttacaccaacatctgtactggactattttggtacaggatccgtgcagagaagcaataagaagatggtggcctccaagcggaaggagctcagccaaaatactgacgagagcggtctcaatgatgaggccatcgcaaaacaattacagctcgatgaggacgcagaattggaacggcagctgcacgaagacgaggaatttgccagaacgctagccatgctggacgaggagccgaaaacgaagaaggccagaaaggacacggaggcgggagaaacattctcttctgtccaagccaacttgtcaaaagctgaaaaacacaaataccctcacaaagtgaaaaccgctcaggttagcgatgagaggaagtcgtactctccacgcaagcagtcaaagtacgaatcctccaaggagagccagcagcacagcaaatcaagtgcagataaaatcggagaggtgtcgtcaccaaaggctagttccaaattggcgatcatgaagcgcaaagaagagtcttcctacaaggagatagaacctgtggcaagtaaacgaaaagagaacgccatcaagcttaagggcgagactaaaacacctaagaagaccaaaagcagccccgcaaaaaaggagtcagtctcacccgaagatagcgaaaaaaagaggacaaattaccaggcataccgctcctatttgaacagagagggcccaaaagcgttaggctccaaagaaatcccaaagggcgcagaaaattgcctagaaggccttattttcgtgatcaccggggtcctggaatctatagagcgtgacgaagcaaagtcccttatagagcgatatgggggaaaagttaccggcaacgtgtccaagaagacaaattacctcgttatgggccgagatagtggccaatccaaaagcgacaaagctgcagcactaggaacaaagatcattgacgaagacgggttgctgaatctgatccgcaccatgcctggcaaaaagtctaagtacgagattgccgttgagacagaaatgaagaaagagtccaagctggaaagaacccctcagaaaaacgtgcagggtaaaaggaagatttccccgagtaaaaaagagtccgagagcaagaaaagtaggccaacctcgaaacgggactcccttgctaagactataaagaaggaaactgatgttttttggaagtccctggatttcaaagaacaggtggccgaggagacgagcggcgactccaaagcccgaaacctggctgatgattcaagcgagaataaagtggagaaccttctgtgggtggacaaatacaaacccacttcactaaagaccataataggacagcagggcgatcagtcctgtgcaaacaaactcctccggtggttgagaaattggcagaaatcaagcagtgaggacaaaaaacatgcggctaaattcggcaaattctctgggaaggacgacggctcaagctttaaggctgctcttttgagcggcccaccaggggttggcaagaccacgactgctagcctggtttgtcaggaactgggatattcttatgtcgagttgaatgcttcagataccagatctaaatcgagtcttaaagccatcgttgcagagtccttaaataatactagcatcaagggtttctattctaacggggctgccagcagcgtgtccactaagcatgctctgatcatggatgaggtggacggcatggccggaaacgaagatcggggaggaatacaggagctgattgggcttatcaagcacacaaagattcctatcatatgcatgtgcaacgaccggaatcaccctaaaatcaggagccttgtgcattactgcttcgatctcaggtttcaacgacctagggtagaacaaatcaaaggcgcaatgatgtctatcgcttttaaagaggggctgaagatacctcccccagcaatgaacgaaatcatcctcggcgcaaaccaggatattagacaggtgctgcataatctatcaatgtggtgtgctcgatccaaagctttgacatacgaccaggcaaaggcagactctcatcgcgcaaagaaagatattaagatgggaccttttgacgtagctcggaaagtatttgccgcaggcgaggagactgcacacatgtcactcgtggataagagcgacctctttttccatgactactccatcgcacctctgtttgtccaggagaactacatccacgtgaagccggtcgctgcaggcggagatatgaagaaacacttgatgttactgtctcgcgctgctgactctatatgtgacggcgacctcgtagactcacagattcggtctaagcaaaattggtcgttgctgccagcccaggccatctatgcttccgtactgcccggagagctgatgcgaggctacatgacacagtttcctacctttccttcttggttaggcaagcatagctccacaggaaagcacgatagaatcgtgcaggacttggcactacacatgagccttcggacctactcttcaaagaggaccgtcaatatggactacctttcattgctgagagacgcactggtccagcccctcacatctcaaggagtggatggcgttcaggacgttgtagccctcatggacacctactaccttatgaaagaggacttcgagaacatcatggaaattagctcttgggggggaaaacctagccctttttcaaagctggatccaaaggtaaaagccgcatttacccgagcatacaacaaagaggcacaccttactccttactccctgcaggcgatcaaagcgtcacgacattccaccagccccagcctggattctgagtacaacgaagagcttaatgaggacgactcacagtcagacgagaaagatcaagatgctatcgagaccgatgccatgattaaaaagaaaactaagtcttcaaagccatccaaaccagagaaggataaggagccgaggaagggcaaaggtaagtcctctaaaaagtag

SEQ ID NO: 81612 - DNA, 4886 bp, Artificial Sequence
  derived and/or modified sequence
accgcgcgccactgtcttcgccttcttgcacttcgcgggagaagttgttggcgcgaatggatcctgagcctcgataacagattcctcaaccggcccacccgccagccagccagcgccttcatcctggggctgcgatggacattcggaaattctttggagtaataccaagtggaaagaaacttgtaagtgaaacagtaaagaagaatgagaaaacaaagtctgatgaagaaactttaaaagcaaagaaaggaataaaggaaatcaaggtaaatagctcccgtaaagaggatgacttcaaacaaaagcaaccaagcaagaaaaagaggatcatctatgattcagattcagagtcagaggagacgttgcaggtaaaaaatgccaaaaagccaccagaaaaactgccagtatcttctaaacctggtaaaatttcacggcaggatcctgttacatacatttcagaaacagatgaagaagatgactttatgtgtaagaaggcggcctctaaatcaaaagagaatggaagatctacaaatagtcatcttggaacatcaaacatgaaaaagaatgaagaaaacactaagaccaagaataagcctttatcaccaataaaacttacacccacatcagtacttgattattttggaactggaagtgtccaaagatctaataagaagatggtggcaagcaaaagaaaagagctttcacaaaatacagatgagtctggattaaatgatgaagccatcgccaagcaattacagcttgatgaagatgcggagctggagaggcagttgcatgaagatgaagagtttgccagaacattagccatgttggatgaagaacccaagaccaaaaaggctcgaaaggacacagaagcgggagaaacgttttcatctgtccaagccaatttaagtaaagcagaaaaacataaatatcctcataaagtaaaaacagcacaagtttcagatgaaagaaagagctacagtcctaggaagcaaagtaaatatgaaagttcaaaagaatctcagcaacattccaagtcatcagctgacaaaataggagaagtctcttctcccaaggccagttctaagctggcaattatgaaaagaaaagaagagagctcttataaagaaatagagcctgtggcctcaaaaagaaaagaaaatgccattaaattgaaaggagagacaaaaactcctaagaaaaccaaaagttctccagctaaaaaagagtctgtaagtcctgaagattctgaaaagaaacgcactaattatcaagcttatcgaagctacttaaatcgagaaggtcccaaggctctgggctccaaagaaataccaaagggagctgaaaattgcttggaaggccttatatttgtaatcacaggcgtgctggagtctattgaacgagatgaggccaagtctctaattgaacgttatgggggaaaagtaacaggaaatgtcagcaagaaaacaaattatcttgtcatgggtcgtgatagtggacagtccaagagtgataaggccgcagccttggggacaaaaattattgatgaagatggcctgttgaatctgattcggactatgccaggcaagaaatccaagtatgaaatagcagttgaaactgagatgaagaaagagtccaaactggagagaacaccccaaaaaaatgtccaaggaaaaagaaaaattagtccatctaaaaaggaatcagaatctaaaaagagcaggccgacttccaaaagggacagtttggcaaagacaataaaaaaggaaacagatgtgttttggaaaagcctggatttcaaggagcaggtggctgaggagacaagtggtgacagcaaggctaggaatttggctgatgacagcagtgaaaacaaagtggaaaatttgctctgggtggataaatataagccaacctcgctcaagaccataattggacagcaaggtgaccagagctgtgccaacaaactcctacgctggctccgaaactggcaaaagagttcttccgaagataaaaaacacgcagcaaagtttggtaaattttccggcaaagatgatggctctagttttaaagcagcgttgctgtcaggccctcctggtgttggcaaaaccaccacagcttccctggtgtgtcaggagttgggatacagctacgtggaactgaatgcaagtgacacccggagtaagagcagtttgaaggcgattgttgctgagtcactgaacaataccagcatcaaaggcttttattcaaatggagcagcctcttcagtaagcacgaaacatgctctcatcatggatgaagtagatggcatggcaggcaatgaggataggggaggaattcaggaattaattggcctgataaaacatactaaaattcccattatttgtatgtgcaatgatagaaatcatcccaagattcgctctctggttcattattgttttgatcttcgttttcaaagacctcgggttgaacagattaagggtgctatgatgtctattgcatttaaagaaggtttaaagattccccctccagctatgaatgaaataattttgggagccaatcaagatatcagacaggttttacataatctgagtatgtggtgtgcacgaagtaaagcattaacctatgaccaggccaaagctgattctcacagagccaaaaaggatatcaaaatgggcccatttgatgttgcccggaaagtgtttgcagctggagaggagactgctcacatgtcacttgtggacaagtcagatctcttttttcatgattattcaatagcacccctcttcgtccaggaaaattacatacacgtgaagcctgtagcagcagggggtgacatgaaaaagcacctgatgcttttaagcagagcagcagacagcatatgcgatggtgacctagtggacagccagatccggagtaagcaaaactggagtcttctgcctgcgcaggccatttatgccagtgttcttcctggagagttgatgagggggtacatgacccagtttcccaccttcccaagctggctggggaagcactcgtctacaggcaaacatgatcgtattgttcaggacctggccttgcatatgagtctcagaacttactccagcaaaaggactgtaaacatggattatctgtcgcttctaagggatgcacttgtacagcccttgacctcacaaggagtagacggagtacaggatgttgttgcacttatggacacatattatttgatgaaagaagactttgagaatatcatggaaatcagcagctggggtggcaaacctagtcccttttcaaagctggatcccaaggtgaaagcagccttcacaagagcttacaataaggaagcccaccttactccatactcacttcaagctataaaggcatctagacacagcacaagcccatccctggattcggaatacaatgaagaattaaatgaagatgactctcaatctgatgagaaagaccaagatgctatagaaactgatgccatgatcaagaaaaagacaaaatcttcaaagccttcaaaaccagaaaaagataaggagcccagaaaaggaaaaggaaaaagttcgaagaaatgaaaccatttttcactagcgacagccactttttactctccctcctgaccagtccagctggtctagagaaagccttgttttttcccagagcaaccatgttttagcataatgggatgacctggtgtcccattataaataaagggtggtatggctagaagggtatgagcagtaggcttatgtacacctcttatagaggttgataggactgcttgggtcctccactgtcctctgtcaatctagttagacgtgcttctgaatgactgtagaattggaactagaaactacacctgggctttggagtcagattttagttaacaataatgagcctgggagcagtagtactaaggcgtcttttgtaggcttaagaatttatcctaatggcctttataggaccaatgctgattttttttaaaggcagttcctattatgtggtgaaattttgtaaataaatgattatacaaaacagtcaccacctagaactgggtattctttgtacattgtcagatatctttcaaagtataaattaggaataaaaatgttccacatgatatgtgtacaaattctttttaagattgtcatcttgtacagcaaaatattatgttggtatattacttccttattaatttgcaaatgattggattaaaaaagctcactgtattccttactaacctgttgtgtgaaacataacattggcagtcgaggagtcagaactcggattcccagcctcactccctctgtgtgtgttgaccacgtctctgctgtgaataggatttcatgcagtggtctgttatggggctttgcagcgtggggggctgcagaagattctcagacattcttatccttctggagtctcaacccatcaggttcagaccagtaggaaccaggctgggtcaggctcttaatttcactatggtgggggacaaaatgaacactggcttttgttcactttgcccctgagagatctagtcctgtcctgtgatggcttccacaaaccctgttggaagtttgggttattcctataactgtatgtgttgagtggccgtgaggctatggacctagcctggaatttagatgtctagctattttttaatcttgttggtaaatgctcagaggtctgtgctacctctgtgaggtatatactaaaatgaatgtaaaataaggatcgtattccctgctttaaggaactggtagtcttgtttgggtgatgagacaaagttcttgagacatttaaactgtatttaccagtgtgaaaaatgtcatttatggagattaattcattatggaaataaaacattgcctaagcccttg

SEQ ID NO: 81613 - protein, 392 aa, Artificial Sequence
  derived and/or modified sequence
MGLGTLSPRMLVWLVASGIVFYGELWVCAGLDYDYTFDGNEEDKTETIDYKDPCKAAVFWGDIALDDEDLNIFQIDRTIDLTQNPFGNLGHTTGGLGDHAMSKKRGALYQLIDRIRRIGFGLEQNNTVKGKVPLQFSGQNEKNRVPRAATSRTERIWPGGVIPYVIGGNFTGSQRAMFKQAMRHWEKHTCVTFIERSDEESYIVFTYRPCGCCSYVGRRGNGPQAISIGKNCDKFGIVVHELGHVIGFWHEHTRPDRDNHVTIIRENIQPGQEYNFLKMEPGEVNSLGERYDFDSIMHYARNTFSRGMFLDTILPSRDDNGIRPAIGQRTRLSKGDIAQARKLYRCPACGETLQESNGNLSSPGFPNGYPSYTHCIWRVSVTPGEKVVFSLC

SEQ ID NO: 81614 - DNA, 1179 bp, Artificial Sequence
  derived and/or modified sequence
atgggcctgggcaccctgagccccagaatgctggtgtggctggtggccagcggcatcgtgttctacggcgagctgtgggtgtgcgccggcctggactacgactacaccttcgacggcaacgaggaggacaagaccgagaccatcgactacaaggacccctgcaaggccgccgtgttctggggcgacatcgccctggacgacgaggacctgaacatcttccagatcgacagaaccatcgacctgacccagaaccccttcggcaacctgggccacaccaccggcggcctgggcgaccacgccatgagcaagaagagaggcgccctgtaccagctgatcgacagaatcagaagaatcggcttcggcctggagcagaacaacaccgtgaagggcaaggtgcccctgcagttcagcggccagaacgagaagaacagagtgcccagagccgccaccagcagaaccgagagaatctggcccggcggcgtgatcccctacgtgatcggcggcaacttcaccggcagccagagagccatgttcaagcaggccatgagacactgggagaagcacacctgcgtgaccttcatcgagagaagcgacgaggagagctacatcgtgttcacctacagaccctgcggctgctgcagctacgtgggcagaagaggcaacggcccccaggccatcagcatcggcaagaactgcgacaagttcggcatcgtggtgcacgagctgggccacgtgatcggcttctggcacgagcacaccagacccgacagagacaaccacgtgaccatcatcagagagaacatccagcccggccaggagtacaacttcctgaagatggagcccggcgaggtgaacagcctgggcgagagatacgacttcgacagcatcatgcactacgccagaaacaccttcagcagaggcatgttcctggacaccatcctgcccagcagagacgacaacggcatcagacccgccatcggccagagaaccagactgagcaagggcgacatcgcccaggccagaaagctgtacagatgccccgcctgcggcgagaccctgcaggagagcaacggcaacctgagcagccccggcttccccaacggctaccccagctacacccactgcatctggagagtgagcgtgacccccggcgagaaggtggtgttcagcctgtgctag

SEQ ID NO: 81615 - DNA, 1179 bp, Artificial Sequence
  derived and/or modified sequence
atgggtttgggcacactttccccgaggatgctggtgtggctcgtggcgtcaggtatagttttttacggcgaactatgggtctgcgctgggttggactacgactatacctttgacggaaacgaggaggataaaacagaaacaatagactacaaagatccatgtaaagccgccgtgttttggggcgatatcgcgctggacgacgaggatcttaacatctttcagatcgaccgcacaatagatcttactcagaatccttttgggaacctgggtcacaccacagggggcctgggcgaccatgctatgtcaaaaaagcgcggcgccctgtaccagctgatagatcggattaggaggattgggtttggcctggagcagaacaatactgtcaaaggcaaagtgcccctgcagtttagcggccaaaacgagaagaaccgggtgccccgcgccgcaacatcaaggacggaaaggatttggcccgggggcgtgattccctacgttattgggggtaactttacgggttcccagcgggctatgtttaagcaagccatgcggcactgggaaaagcatacctgtgtgaccttcattgaaagatccgatgaagagtcctatattgtgttcacttatcggccctgcggctgctgttcatacgtgggccggagagggaatgggcctcaggccatcagtattgggaaaaactgcgataagttcgggattgtggtccatgaattaggtcacgtcatcggcttctggcacgaacacaccaggcccgaccgggacaatcatgtcacaattattcgtgagaatatccagcccgggcaggaatacaacttcctgaagatggagcccggtgaggtaaattcccttggggagaggtacgacttcgacagtatcatgcactacgctcgcaataccttttctaggggaatgtttctcgatacaatcttgcctagcagagacgataatgggattcgccccgcgattggccagagaacccggctgagcaaaggcgacattgcccaagcccgcaaactctacagatgccctgcttgtggagagaccctccaggagagcaacggaaacctgtcgtctccaggctttccaaatgggtacccatcgtacacacactgtatctggagagtctccgtgacaccaggagaaaaggtagtgtttagcctctgctag

SEQ ID NO: 81616 - DNA, 1179 bp, Artificial Sequence
  derived and/or modified sequence
atgggcctgggcaccctgagccccaggatgctggtgtggctggtggccagcggcatcgtgttctacggggagctgtgggtgtgtgccggcctggactatgactacacctttgatggaaatgaggaggacaagacagagaccatcgactacaaggacccctgcaaggctgctgtgttctggggagacatcgccctggatgatgaggacctgaacatcttccagattgacaggaccatcgacctgacccagaaccccttcggcaacctgggccacaccactggaggcctgggggaccacgccatgagcaagaagagaggagccctgtaccagctgattgaccgcatccgccgcatcggcttcggcctggagcagaacaacacagtgaagggcaaggtgcccctgcagttcagcggccagaatgagaagaacagagtgccccgggccgccaccagcaggacagagcgcatctggccaggcggcgtcatcccctacgtgattggaggcaacttcaccggcagccagagggccatgttcaagcaggccatgaggcactgggagaagcacacctgtgtgaccttcatcgagaggagtgatgaggagagctacatcgtgttcacctaccggccctgtggctgctgcagctatgtgggcagaagaggaaatggcccccaggccatcagcatcggcaagaactgtgacaagtttggaattgtggtgcatgagctgggccacgtgattggcttctggcatgagcacaccaggccagaccgggacaaccacgtgaccatcatccgggagaacatccagcccggccaggagtacaacttcctgaagatggagcctggagaggtgaacagcctgggggagagatatgactttgacagcatcatgcactacgccaggaacaccttcagccggggcatgttcctggacaccatcctgcccagcagagatgacaatggcatccggcctgccatcggccagaggacccggctgagcaagggggacatcgcccaggccaggaagctgtaccgctgcccagcctgtggggagaccctgcaggagagcaatggaaacctgagcagccctggcttccccaacggctaccccagctacacccactgcatctggagggtgtctgtgaccccaggagagaaggtggtgttcagcctgtgctag

SEQ ID NO: 81617 - DNA, 1179 bp, Artificial Sequence
  derived and/or modified sequence
atgggcctgggcaccctgagcccccggatgctggtgtggctggtggcatccggaattgttttttatggcgagctttgggtctgcgcaggcctggattatgactacacattcgatggcaatgaagaggacaaaacggagaccatagactataaagacccgtgtaaggcagcagtcttctggggggatatagccctggatgacgaagacttaaatatattccagatagatcggacaattgatttgactcagaacccattcggcaaccttggacataccaccggcggcctaggcgaccatgccatgagcaaaaagagaggggccctgtatcagctgatcgaccgcattcggcggatcgggttcggactggagcagaataacacagtgaaaggaaaagtgccccttcagttctctggccagaatgaaaagaacagagtccctagagctgccacgagtcgcacggagagaatatggcccggaggtgtgatcccttacgtcattggagggaatttcactggttcccagcgtgccatgttcaagcaggccatgcggcactgggaaaagcacacctgcgttacttttattgagagatcagatgaggaatcctatatcgtgttcacttatcgcccatgcggctgctgtagctatgtgggaaggaggggaaatggccctcaggccatttccataggcaaaaattgcgataaatttgggatcgtggttcacgagctaggccatgtgataggcttttggcatgaacacacgcgccccgatagggataaccacgtcactattattcgggagaacatccaaccggggcaggagtacaattttttaaagatggagcccggagaagtaaactctttgggggaacgctatgatttcgattccattatgcattacgcacgtaataccttcagtaggggtatgtttctggatacaatcctgccctcgagagacgacaatggtattagacccgcaattggacaaagaactaggctgagcaagggggacatcgcacaagcaaggaagctgtatcgctgccctgcttgtggagaaacgctgcaggagagcaatggaaacctttcaagccctgggtttccaaatggttaccctagttacactcactgtatttggagagtgtctgtaacccccggtgagaaggtcgtgttttctctatgttag

SEQ ID NO: 81618 - DNA, 1179 bp, Artificial Sequence
  derived and/or modified sequence
atgggccttggcacactgagccctcgcatgctggtgtggcttgtggcaagtggcattgtattttacggcgagttatgggtttgtgccggacttgattacgactacaccttcgacggcaatgaagaggacaagaccgagacaattgactataaggatccttgcaaggcagctgtcttttggggcgatattgcattagacgacgaggacctaaacatttttcaaattgatcgcactatcgaccttacacagaatccttttggtaacctggggcacaccacaggcggactgggcgatcacgctatgagcaagaagcgaggggctctatatcagctgatagataggattcggagaatcggtttcggcttggagcagaataacaccgtcaaaggcaaggttccactgcaattctctggtcagaacgagaagaatcgagtccccagggctgccacatcccgcactgagaggatctggcccggaggggtcatcccatacgtaattggcggtaatttcaccggaagccagagggccatgttcaaacaggccatgcggcattgggagaagcatacgtgcgttacattcattgagaggagtgacgaagaatcgtatatcgttttcacttacaggccatgtggctgctgtagctacgtcggtaggaggggaaacggtccgcaagccatttcaataggaaagaactgtgataagttcggcattgtagttcacgaattagggcacgtcattggattctggcacgaacatacacgacccgacagggacaaccacgtgacgattattagggaaaacattcagcctggccaggagtacaacttcctgaaaatggagccgggtgaagttaatagccttggtgaacgctacgacttcgatagcatcatgcactacgcacgaaatacttttagcagaggtatgtttcttgacactatactcccgagcagagatgataacgggattaggccagcaattggacagaggacccggttgagtaagggagacattgcccaggcaagaaaactgtacaggtgccctgcctgtggagagactctacaggagagcaatggtaacctatcttccccaggcttcccaaatggatacccaagctatacccattgtatatggagggtgtcagtcactcccggagagaaagtagtcttctcactctgctag

SEQ ID NO: 81619 - DNA, 1829 bp, Artificial Sequence
  derived and/or modified sequence
tcccggcggcatccacatgtttccggacacctgagcaccccggtcccgccgaggagcctccgggtggggagaagagcaccggtgcccctagccccgcacatcagcgcggaccgcggctgcctaacctctgggtcccgtcccctccttttcctccgggggaggaggatggggttgggaacgctttccccgaggatgctcgtgtggctggtggcctcggggattgttttctacggggagctatgggtctgcgctggcctcgattatgattacacttttgatgggaacgaagaggataaaacagagactatagattacaaggacccgtgtaaagccgctgtattttggggcgatattgccttagatgatgaagacttaaatatctttcaaatagataggacaattgaccttacgcagaacccctttggaaaccttggacataccacaggtggacttggagaccatgctatgtcaaagaagcgaggggccctctaccaacttatagacaggataagaagaattggctttggcttggagcaaaacaacacagttaagggaaaagtacctctacaattctcagggcaaaatgagaaaaatcgagttcccagagccgctacatcaagaacggaaagaatatggcctggaggcgttattccttatgttataggaggaaacttcactggcagccagagagccatgttcaagcaggccatgaggcactgggaaaagcacacatgtgtgactttcatagaaagaagtgatgaagagagttacattgtattcacctataggccttgtggatgctgctcctatgtaggtcggcgaggaaatggacctcaggcaatctctatcggcaagaactgtgataaatttgggattgttgttcatgaattgggtcatgtgataggcttttggcatgaacacacaagaccagatcgagataaccacgtaactatcataagagaaaacatccagccaggtcaagagtacaattttctgaagatggagcctggagaagtaaactcacttggagaaagatatgatttcgacagtatcatgcactatgccaggaacaccttctcaagggggatgtttctggataccattctcccctcccgtgatgataatggcatacgtcctgcaattggtcagcgaacccgtctaagcaaaggagatatcgcacaggcaagaaagctgtatagatgtccagcatgtggagaaactctacaagaatccaatggcaacctttcctctccaggatttcccaatggctacccttcttacacacactgcatctggagagtttctgtgaccccaggggagaaggttgtattttcactctgttgattgtgtcttctgatgaacacaaattataaagtttgatgtcataccacttgtctacttttagttttattgcctgtgcttttggtgtcatagccaagaaatcatggccatatgtaatgacatgaagtttttaccctgtgttttcttctatgagttctatagttttacagtcttatatgtaggtttttaatcaatattgtgttaatagaaaccattcttgtacatgtggatatccagtttcttcaacaccatttgttaaagatttactaaatgtttttattcagcattcctgctcatgtttctgacttctattatggcttattttggtcctgcctatagcttacattatagattattttttaaattagcgtttttgtttttttctgtttgaaaatgtggattttttacatgaatttataaaactatagtttcactggatatagttggctgcacatttaactttgttttaaataaaagcttgcaaaaat

SEQ ID NO: 81620 - DNA, 2463 bp, Artificial Sequence
  derived and/or modified sequence
ggccggctggaggagctgaggttccgagtgcggccgctgctgggctggcgggcgggcagagcacggcaccctggcagcagggcccacgccacggggccatgggcagctcgagccaggcaggctgctgcccacgcttactgccagggtgaccccagccctggggcccagccacaaccaccctggcttcatgccaggggctgctctggttgccagtcggccagcctcgggggtgcagcctgggctgggactgctgctggggtgcaggtgaggcagtggccgggccctcaggccccagggcaggcaggctgcagggagccaagtcctccatggcggccccagccgggaaggcgagcaggacaggggctctgcggcccagggcccagaaaggccgggtgaggcgggccgtgcgcatctccagcctcgtggcccaggaggtcctgtccctgggcgccgacgtgctgcctgagtacaagctgcaggcaccgcgcatccaccgctggaccatcctgcattacagccccttcaaggccgtgtgggactggctcatcctgctgctggtcatctacacggctgtcttcacaccctactcggctgccttcctgctgaaggagacggaagaaggcccgcctgctaccgagtgtggctacgcctgccagccgctggctgtggtggacctcatcgtggacatcatgttcattgtggacatcctcatcaacttccgcaccacctacgtcaatgccaacgaggaggtggtcagccaccccggccgcatcgccgtccactacttcaagggctggttcctcatcgacatggtggccgccatccccttcgacctgctcatcttcggctctggctctgaggagctgatcgggctgctgaagactgcgcggctgctgcggctggtgcgcgtggcgcggaagctggatcgctactcagagtacggcgcggccgtgctgttcttgctcatgtgcacctttgcgctcatcgcgcactggctagcctgcatctggtacgccatcggcaacatggagcagccacacatggactcacgcatcggctggctgcacaacctgggcgaccagataggcaaaccctacaacagcagcggcctgggcggcccctccatcaaggacaagtatgtgacggcgctctacttcaccttcagcagcctcaccagtgtgggcttcggcaacgtctctcccaacaccaactcagagaagatcttctccatctgcgtcatgctcattggctccctcatgtatgctagcatcttcggcaacgtgtcggccatcatccagcggctgtactcgggcacagcccgctaccacacacagatgctgcgggtgcgggagttcatccgcttccaccagatccccaatcccctgcgccagcgcctcgaggagtacttccagcacgcctggtcctacaccaacggcatcgacatgaacgcggtgctgaagggcttccctgagtgcctgcaggctgacatctgcctgcacctgaaccgctcactgctgcagcactgcaaacccttccgaggggccaccaagggctgccttcgggccctggccatgaagttcaagaccacacatgcaccgccaggggacacactggtgcatgctggggacctgctcaccgccctgtacttcatctcccggggctccatcgagatcctgcggggcgacgtcgtcgtggccatcctgggtatggggtggggggcgggcactggactggaaatgccctctgcagcctcaagaggtgcgagccttctgaatatgcagtcactggggctgtggacctgggactgcctgcagggtcactgggctcctttaattcacctaaactcaggccctccaagcggggccatggagaggagccccacgtggggtgaggctgctgaactctggggttcccacattctccttcccttcaggatccgccacaaacagacactttttgcttccttaaagtaggatcaaatctagatcctctagcctgggcagtagaggaagaaatgctagcctggaagctcggcatttggtttcactaagggccatgtggttccctgcagcctcatgcctggccccttgacacatccaaagcaaagggagtcctgccccctccccccacttcctttctaccctgcctgtgcacagtgggtgggttggtgtgtctggacactgaggacttcctccccctttgcctgtccttccctcggccctgtgtgcctcagggcagatatagcaagctctttcgaccatagttgatggtaggacattttagactttgtttctcagctctgtacaaacacaaatacacacccccacaaaactaaaatcaaagtttcactacataacactgggccttactgcatgtggttcattctagcatttctgttctgtgctgtgctaagctatactactgtatgttctttcagtaaaaaaaaaaaaaaaaaaaaaaaaa

SEQ ID NO: 81621 - DNA, 1182 bp, Artificial Sequence
  derived and/or modified sequence
atggcggcccccgcaggaaaagcatcacgtactggagctttgcggccccgggcccagaagggtagggtccgccgcgccgtcaggatcagcagcctggtggctcaagaggtcttatctctcggagcggacgtgctccctgaatacaaactgcaagcccccagaatccatagatggaccatcctccattacagtccttttaaggcagtgtgggactggttaatcctgctgctcgtgatttataccgcagtgttcactccatactccgcagcattcctgctgaaagagaccgaagagggacctccggcaaccgagtgtggttacgcatgccagcccctcgcagtggtcgacctcattgtggatatcatgttcattgtagacattctcatcaattttaggacaacctacgtaaacgcgaatgaagaagtggtgagtcaccctggccgcatagcagtgcactattttaaaggctggtttcttatcgatatggttgccgccattccatttgatctactgatctttggttccggcagcgaggagttgattgggttactgaaaacggctcggctcttgcggctagtgcgggtggcacgaaagctagatcgttacagtgaatatggggctgcggttttgtttctactaatgtgcacatttgccctcattgctcattggctggcctgtatctggtatgctatcggaaatatggaacaaccccatatggactcccgcatcggatggcttcacaacctcggcgaccagattgggaaaccttacaactcaagcgggcttgggggtccatcaatcaaggacaaatatgtgaccgccctctactttacgttctcttcattaacatccgtgggattcggcaacgtatcaccaaatactaactccgagaagatattcagcatatgtgttatgctgattggctctctgatgtatgcctcaatcttcggtaacgtttcagcaatcatccagcgcctttacagcggcactgcgcggtaccatactcagatgctgcgcgtaagagagtttattcgcttccaccagatccctaaccctctgcgccaatgttgcgatcacccaggagcttggccccactttcatattcccgcggtggcacgacagcctcccccgcatcctcatcttggcctcgctttcagcggatttcccgtccatggagtttag

SEQ ID NO: 81622 - DNA, 1182 bp, Artificial Sequence
  derived and/or modified sequence
atggccgccccagctgggaaggccagcaggactggagccctgcggccccgggcccagaagggccgggtgcggcgggctgtgcgcatcagcagcctggtggcccaggaggtgctgagcctgggcgcagatgtgctgcctgagtacaagctgcaggccccccgcatccaccgctggaccatcctgcactacagccccttcaaggctgtgtgggactggctgatcctgctgctggtgatctacacagctgtgttcaccccctacagcgctgccttcctgctgaaggagacagaggagggccccccagccacagaatgtggctacgcctgccagcccctggccgtggtggacctgattgtggacatcatgttcatcgtggacatcctgatcaacttccgcaccacctacgtgaatgccaatgaggaggtggtgagccaccctggaagaattgctgtgcactacttcaagggctggttcctgattgacatggtggccgccatcccctttgacctgctgatctttggaagtggcagcgaggagctgattggcctgctgaagacagcccggctgctgcggctggtgcgggtggccaggaagctggaccgctacagtgaatatggagctgctgtgctcttcctgctgatgtgcacctttgccctgattgcccactggctggcctgcatctggtacgccatcggcaacatggagcagccccacatggacagcagaattggctggctgcacaacctgggggaccagatcggcaagccctacaacagcagcggcctgggcggccccagcatcaaggacaagtatgtgacagccctgtacttcaccttcagcagcctgacctctgtgggctttggaaatgtgagccccaacaccaacagcgagaagatcttcagcatctgtgtgatgctgattggcagcctgatgtatgccagcatctttggaaatgtgtctgccatcatccagaggctgtacagcggcacagcccgctaccacacccagatgctgcgggtgcgggagttcatccgcttccaccagatccccaaccccctgcggcagtgctgtgaccaccctggggcctggccccacttccacatcccagctgtggcccggcagcccccaccccacccccacctgggcctggccttcagcggcttccctgtgcatggagtgtag

SEQ ID NO: 81623 - DNA, 1182 bp, Artificial Sequence
  derived and/or modified sequence
atggccgcccccgccggcaaggccagccggaccggcgccctgcggcctcgagcgcaaaagggtagggtccgccgtgctgtgcgcataagctcgctcgtggcccaggaagttctgagtctgggagctgatgtgttacctgaatataaactacaagcaccaagaatccacagatggaccatcttgcattatagtccatttaaggctgtctgggactggctgatacttctgctggtgatatatacagcggtgtttactccttacagcgcagcgtttctgctgaaggagactgaggagggaccgcccgccacagaatgtggttacgcctgccagcccctcgctgtcgtggacctgattgtagatatcatgtttattgtggatatcctgatcaattttagaacaacttacgtcaacgctaatgaagaagtggtgagtcacccaggcagaatcgctgtgcattactttaaaggctggtttctcattgacatggtggccgctatcccattcgatctgctcatttttggctcaggatccgaggagctcattggccttttgaagactgcacgccttctgcgtttagtgcgcgtggcccggaagttagaccgctatagtgagtatggcgccgccgtcctctttttactgatgtgtaccttcgccctgatcgcgcattggctggcatgtatttggtacgctataggcaatatggagcaaccacatatggattcaagaataggctggctccataacctgggcgatcagataggcaagccttacaacagctctggcttgggagggccctctattaaggataaatatgttaccgctctgtattttacattctcgtccttaacatccgtgggcttcggtaacgtttctcctaacaccaacagcgaaaagatttttagcatctgcgttatgctcattggctctctgatgtatgcctctattttcgggaacgtgtcagctataatccagcggttatacagtggtactgcccgctatcacacccagatgctaagggtcagagagttcatcaggttccaccaaatcccaaatcctctgagacagtgttgtgatcatcccggagcgtggcctcactttcatatccccgctgtcgctaggcagcctcctcctcacccccatctgggcctagcctttagcgggttccccgtccacggcgtctag

SEQ ID NO: 81624 - DNA, 1754 bp, Artificial Sequence
  derived and/or modified sequence
ggagctgaggttccgagtgcggccgctgctgggctggcgggcgggcagagcacggcaccctggcagcagggcccacgccacggggccatgggcagctcgagccaggcaggctgctgcccacgcttactgccagggtgaccccagccctggggcccagccacaaccaccctggcttcatgccaggggctgctctggttgccagtcggccagcctcgggggtgcagcctgggctgggactgctgctggggtgcaggtgaggcagtggccgggccctcaggccccagggcaggcaggctgcagggagccaagtcctccatggcggccccagccgggaaggcgagcaggacaggggctctgcggcccagggcccagaaaggccgggtgaggcgggccgtgcgcatctccagcctcgtggcccaggaggtcctgtccctgggcgccgacgtgctgcctgagtacaagctgcaggcaccgcgcatccaccgctggaccatcctgcattacagccccttcaaggccgtgtgggactggctcatcctgctgctggtcatctacacggctgtcttcacaccctactcggctgccttcctgctgaaggagacggaagaaggcccgcctgctaccgagtgtggctacgcctgccagccgctggctgtggtggacctcatcgtggacatcatgttcattgtggacatcctcatcaacttccgcaccacctacgtcaatgccaacgaggaggtggtcagccaccccggccgcatcgccgtccactacttcaagggctggttcctcatcgacatggtggccgccatccccttcgacctgctcatcttcggctctggctctgaggagctgatcgggctgctgaagactgcgcggctgctgcggctggtgcgcgtggcgcggaagctggatcgctactcagagtacggcgcggccgtgctgttcttgctcatgtgcacctttgcgctcatcgcgcactggctagcctgcatctggtacgccatcggcaacatggagcagccacacatggactcacgcatcggctggctgcacaacctgggcgaccagataggcaaaccctacaacagcagcggcctgggcggcccctccatcaaggacaagtatgtgacggcgctctacttcaccttcagcagcctcaccagtgtgggcttcggcaacgtctctcccaacaccaactcagagaagatcttctccatctgcgtcatgctcattggctccctcatgtatgctagcatcttcggcaacgtgtcggccatcatccagcggctgtactcgggcacagcccgctaccacacacagatgctgcgggtgcgggagttcatccgcttccaccagatccccaatcccctgcgccagtgctgtgaccaccccggggcctggccccacttccacatccccgctgttgcccgtcagccccctccccaccctcaccttggactcgctttctcaggtttcccagttcatggcgtgtgaggagctgcccccgggggccccagagcttccccaagaaggccccacacgacgcctctccctaccgggccagctgggggccctcacctcccagcccctgcacagacacggctcggacccgggcagttagtggggctgcccagtgtggacacgtggctcacccagggatcaaggcgctgctgggccgctccccttggaggccctgctcaggaggccctgaccgtggaaggggagaggaactcgaaagcacagctcctccc

SEQ ID NO: 81625 - DNA, 1182 bp, Artificial Sequence
  derived and/or modified sequence
atggccgcaccggctggaaaagcaagccggactggcgcactgcgacccagggctcagaaggggcgagtccggagagctgtgaggatttcaagcctggtcgcccaagaagtactgtcccttggagctgatgtcttacccgagtacaagcttcaagctccaaggatccacaggtggactatattacattactcaccattcaaggccgtgtgggactggcttatactgctgctagtgatctacaccgcagtcttcacaccttattcagccgctttcctgctgaaagaaactgaggagggccctccagctacagagtgcggatacgcgtgtcagcctctggccgtcgtggatttgattgtggatatcatgttcattgtggacatacttatcaatttcagaacgacctacgtaaatgccaacgaagaggtggtttcccaccctgggagaatcgcagtgcactactttaaaggttggtttctgatagacatggtggccgctattccttttgaccttctgatttttggaagtggatctgaagagctgatcggactcctgaagactgccagacttctacgactggtgcgcgtggctcgcaaactggatcggtacagtgaatacggagccgcagtcctttttctgctaatgtgtacttttgccctcatcgcccactggctcgcctgtatttggtacgcgatcggcaacatggagcagccccacatggattcaaggatcggatggctgcacaacttgggagaccagatcgggaagccatataatagctccggccttggtgggccttctataaaggataaatacgttacagctctgtactttactttttcctccctgacctctgttgggttcggaaacgtcagtccgaatacaaactctgagaaaatcttttccatctgtgtgatgctcataggaagtctcatgtatgcgagcatttttgggaacgtgagcgctattatccaaagactgtattccgggaccgccaggtaccatactcagatgttacgggtcagagagttcatccggttccaccagatccctaaccctctgaggcagtgctgcgaccatcccggagcttggccgcacttccacataccagccgtggccagacaaccgccaccacacccccacctcggcctggccttttccggtttccctgttcacggagtttag

SEQ ID NO: 81626 - DNA, 1182 bp, Artificial Sequence
  derived and/or modified sequence
atggccgcccccgccggcaaggccagcagaaccggcgccctgagacccagagcccagaagggcagagtgagaagagccgtgagaatcagcagcctggtggcccaggaggtgctgagcctgggcgccgacgtgctgcccgagtacaagctgcaggcccccagaatccacagatggaccatcctgcactacagccccttcaaggccgtgtgggactggctgatcctgctgctggtgatctacaccgccgtgttcaccccctacagcgccgccttcctgctgaaggagaccgaggagggcccccccgccaccgagtgcggctacgcctgccagcccctggccgtggtggacctgatcgtggacatcatgttcatcgtggacatcctgatcaacttcagaaccacctacgtgaacgccaacgaggaggtggtgagccaccccggcagaatcgccgtgcactacttcaagggctggttcctgatcgacatggtggccgccatccccttcgacctgctgatcttcggcagcggcagcgaggagctgatcggcctgctgaagaccgccagactgctgagactggtgagagtggccagaaagctggacagatacagcgagtacggcgccgccgtgctgttcctgctgatgtgcaccttcgccctgatcgcccactggctggcctgcatctggtacgccatcggcaacatggagcagccccacatggacagcagaatcggctggctgcacaacctgggcgaccagatcggcaagccctacaacagcagcggcctgggcggccccagcatcaaggacaagtacgtgaccgccctgtacttcaccttcagcagcctgaccagcgtgggcttcggcaacgtgagccccaacaccaacagcgagaagatcttcagcatctgcgtgatgctgatcggcagcctgatgtacgccagcatcttcggcaacgtgagcgccatcatccagagactgtacagcggcaccgccagataccacacccagatgctgagagtgagagagttcatcagattccaccagatccccaaccccctgagacagtgctgcgaccaccccggcgcctggccccacttccacatccccgccgtggccagacagccccccccccacccccacctgggcctggccttcagcggcttccccgtgcacggcgtgtag

SEQ ID NO: 81627 - protein, 931 aa, Artificial Sequence
  derived and/or modified sequence
MKKMSRNVLLQMEEEEDDDDGDIGDVPASRRPFLTPHTHLPSSLVLENLGQTIVPDLGSLESQHDFRTPEFEEFNGKPDSLFFNDGQRRIDFVLVYEDESRKETNKKGTNEKQRRKRQAYESNLICHGLQLEATRSVLDDKLVFVKVHAPWEVLCTYAEIMHIKLPLKPNDLKNRSSAFGTLNWFTKVLSVDESIIKPEQEFFTAPFEKNRMNDFYIVDRDAFFNPATRSRIVYFILSRVKYQVINNVSKFGINRLVNSGIYKAAFPLHDCKFRRQSEDPSCPNERYLLYREWAHPRSIYKKQPLDLIRKYYGEKIGIYFAWLGYYTQMLLLAAVVGVACFLYGYLNQDNCTWSKEVCHPDIGGKIIMCPQCDRLCPFWKLNITCESSKKLCIFDSFGTLVFAVFMGVWVTLFLEFWKRRQAELEYEWDTVELQQEEQARPEYEARCTHVVINEITQEEERIPFTAWGKCIRITLCASAVFFWILLIIASVIGIIVYRLSVFIVFSAKLPKNINGTDPIQKYLTPQTATSITASIISFIIIMILNTIYEKVAIMITNFELPRTQTDYENSLTMKMFLFQFVNYYSSCFYIAFFKGKFVGYPGDPVYWLGKYRNEECDPGGCLLELTTQLTIIMGGKAIWNNIQEVLLPWIMNLIGRFHRVSGSEKITPRWEQDYHLQPMGKLGLFYEYLEMIIQFGFVTLFVASFPLAPLLALVNNILEIRVDAWKLTTQFRRLVPEKAQDIGAWQPIMQGIAILAVVTNAMIIAFTSDMIPRLVYYWSFSVPPYGDHTSYTMEGYINNTLSIFKVADFKNKSKGNPYSDLGNHTTCRYRDFRYPPGHPQEYKHNIYYWHVIAAKLAFIIVMEHVIYSVKFFISYAIPDVSKRTKSKIQREKYLTQKLLHENHLKDMTKNMGVIAERMIEAVDNNLRPKSE

SEQ ID NO: 81628 - DNA, 87 bp, Artificial Sequence
  derived and/or modified sequence
acacaacaaccaagaaacaaccccattaagaagtgggaaaaatacatgaataaacacatctcaaaagaagacaaacaagtggctaac

SEQ ID NO: 81629 - DNA, 2796 bp, Artificial Sequence
  derived and/or modified sequence
atgaagaagatgtcccggaatgtgctgctccaaatggaggaggaggaggacgacgatgatggagacatcggcgacgtgcctgcatccaggagaccatttctgacccctcacacacatctgccaagcagcctggtccttgagaatttagggcagaccattgtgccagatcttgggagtctagagagccagcatgattttcggacgcctgaattcgaggagttcaacggcaaacctgacagcctcttctttaatgacgggcaacgccgcatagacttcgtgctggtctacgaagatgagtctcgtaaagaaacaaacaagaagggaacaaatgaaaagcagaggaggaaacgacaggcctatgagagtaacttgatttgtcatggactacagttagaggcaacacggagcgtcctcgacgacaaactcgtgttcgtcaaagtccatgccccatgggaggttctgtgtacgtacgcagaaatcatgcacatcaaactaccgctcaagccgaacgacttgaagaaccggtctagcgcctttggcacccttaattggttcactaaagtgcttagtgtcgatgagagtatcatcaaacccgagcaggagtttttcaccgcccccttcgaaaagaacagaatgaacgacttttatatagtggatcgagacgccttcttcaaccccgcgacaaggtcacggattgtgtacttcattctgtcccgggtaaagtaccaggttatcaataatgtctctaaattcggaattaatcgccttgtgaactccggaatttataaagctgccttccctctgcatgattgtaagttccgacgccaatccgaggatccctcatgcccgaacgagcggtacttgctgtatcgggaatgggctcatccccggtctatttacaagaaacagcctctggacctgatacggaagtattatggcgagaagatcgggatttacttcgcatggttaggctattatacccagatgctcctcctggcagctgtggttggagtggcctgtttcctctatggctacctgaaccaagacaattgcacatggagtaaagaagtgtgtcatcccgacatcggaggcaagatcattatgtgcccgcagtgcgaccgattgtgtccattctggaagctcaacattacctgcgaaagttccaagaagctctgcatattcgactccttcgggactctcgtgtttgctgttttcatgggcgtgtgggtgactcttttcctggagttctggaagcgacgtcaggccgagctcgaatatgaatgggatactgtggaactccagcaggaagagcaggcaaggcccgagtatgaggcaagatgcacccatgtggtaataaacgagatcactcaggaagaagagcgaatcccctttacggcttggggcaagtgtatccgcatcaccctttgtgcctcagccgttttcttctggatcctgctgatcattgcttcggttataggaattattgtctaccgcctttcagtgttcattgttttctccgccaagcttcccaagaacattaacggcactgaccctatccagaagtacctgaccccgcagacagccacatccataaccgccagcattatttcttttattatcatcatgatcttgaatacaatttacgagaaggtagctattatgatcaccaactttgaattacctcgtactcagaccgattacgagaattcactgaccatgaaaatgtttctgttccaatttgtgaattactatagttcatgcttctatatagccttttttaaaggcaaatttgtgggatatcctggagaccccgtgtattggctagggaagtaccgcaacgaggagtgcgatccagggggctgtcttctcgaacttaccacccagctcactattattatgggaggtaaagcaatttggaataatatccaggaagtattactgccatggataatgaacttaatcggccgcttccatcgagtttcgggtagcgaaaaaatcacacctcgttgggagcaggattaccatttacagcctatgggaaaattgggtttattctatgagtacttagaaatgatcattcagttcgggtttgtcaccctcttcgtcgcatcattcccattggcccctttgttggccttggtgaacaacattctggaaattcgagtcgatgcctggaagctgaccacacagttcagaaggctcgtgccagagaaggctcaagatatcggggcgtggcaaccaatcatgcaaggcattgctatcctggcagttgttacgaatgccatgattatcgctttcacctccgacatgattcccaggcttgtttactactggagtttctcggttcccccatacggcgaccacacaagctacactatggaagggtacatcaataataccctgtctattttcaaggttgcagatttcaagaacaaatccaaagggaacccatacagtgacttagggaaccacactacctgccgatatcgggactttaggtacccccctggccacccccaagagtacaaacacaacatttattactggcacgtgattgccgccaagctagctttcataattgtcatggaacacgtgatatacagcgtaaaattcttcatttcttacgcaatccccgatgtgtccaagcggaccaagtccaagattcagcgcgaaaaatatttaacgcagaaacttctgcacgaaaatcacctgaaggacatgacgaaaaacatgggcgttatagccgagcggatgatagaggccgtcgacaacaatctgcgcccaaagtcagagtag

SEQ ID NO: 81630 - DNA, 2796 bp, Artificial Sequence
  derived and/or modified sequence
atgaagaagatgagcagaaatgtgctgctgcagatggaggaggaggaggatgatgatgatggagacattggagatgtgcctgccagccggcggcccttcctgaccccccacacccacctgcccagcagcctggtgctggagaacctgggccagaccatcgtgcctgacctgggcagcctggagagccagcacgacttccgcaccccagagtttgaggagttcaacgggaagccagacagcctcttcttcaatgatggccagaggagaattgactttgtgctggtgtatgaagatgagagcaggaaggagaccaacaagaagggcaccaatgagaagcagaggaggaagaggcaggcctatgagagcaacctgatctgccacggcctgcagctggaggccaccaggtctgtgctggatgacaagctggtgtttgtgaaggtgcacgccccctgggaggtgctgtgcacctacgccgagatcatgcacatcaagctgcccctgaagcccaatgacctgaagaacagaagcagcgccttcggcaccctgaactggttcaccaaggtgctgtctgtggatgagagcatcatcaagccagagcaggagttcttcaccgccccctttgagaagaacaggatgaatgacttctacatcgtggacagagatgccttcttcaacccagccaccaggagccgcatcgtgtacttcatcctgagccgggtgaagtaccaggtgatcaacaacgtgtccaagtttggcatcaaccggctggtgaacagcggcatctacaaggccgccttccccctgcatgactgcaagttccggcggcagagcgaggaccccagctgccccaatgaaagatacctgctgtaccgggagtgggcccaccccaggagcatctacaagaagcagcccctggacctgatcaggaagtactacggggagaagattggcatctactttgcctggctgggctactacacccagatgctgctgctggccgctgtggtgggcgtggcctgcttcctgtatggctacctgaaccaggacaactgcacctggagcaaggaggtgtgccacccagacatcggcggcaagatcatcatgtgcccccagtgtgaccggctgtgccccttctggaagctgaacatcacctgtgagagcagcaagaagctgtgcatctttgacagctttggcaccctggtgtttgctgtgttcatgggcgtgtgggtgaccctcttcctggagttctggaagaggcggcaggccgagctggagtatgagtgggacacagtggagctgcagcaggaggagcaggcccggccagaatatgaggcccgctgcacccacgtggtgatcaatgagatcacccaggaggaggagcgcatccccttcaccgcctggggcaagtgcatccgcatcaccctgtgtgccagcgctgtgttcttctggatcctgctgatcatcgccagcgtcatcggcatcatcgtgtaccgcctgagcgtcttcatcgtgttcagcgccaagctgcccaagaacatcaatggaacagaccccatccagaagtacctgaccccccagacagccaccagcatcacagccagcatcatctccttcatcatcatcatgatcctgaacaccatctatgagaaggtggccatcatgatcaccaactttgagctgcccaggacccagacagattatgagaacagcctgaccatgaagatgttcctgttccagtttgtgaactactacagcagctgcttctacatcgccttcttcaagggcaagtttgtgggctacccaggggaccctgtgtactggctgggcaagtacagaaatgaagaatgtgaccccggcggctgcctgctggagctgaccacccagctgaccatcatcatgggcggcaaggccatctggaacaacatccaggaggtgctgctgccctggatcatgaacctgattggccgcttccaccgggtgtctggcagcgagaagatcaccccccgctgggagcaggactaccacctgcagcccatgggcaagctgggcctcttctatgagtacctggagatgatcatccagtttggatttgtgaccctgtttgtggccagcttccccctggcccccctgctggccctggtgaacaacatcctggagatccgggtggatgcctggaagctgaccacccagttccggcggctggtgcctgagaaggcccaggacatcggggcctggcagcccatcatgcagggcatcgccatcctggccgtggtgaccaatgccatgatcatcgccttcaccagtgacatgatcccccggctggtgtactactggagcttctctgtgcccccctatggagaccacaccagctacaccatggagggctacatcaacaacaccctgagcatcttcaaggtggccgacttcaagaacaagagcaagggcaacccctacagcgacctgggcaaccacaccacctgccgctacagagacttccgctacccacctggccacccccaggagtacaagcacaacatctactactggcacgtgattgctgccaagctggccttcatcatcgtgatggagcacgtgatctacagcgtgaagttcttcatctcctatgccatcccagatgtgtccaagaggaccaagagcaagatccagcgggagaagtacctgacccagaagctgctgcacgagaaccacctgaaggacatgaccaagaacatgggcgtgattgctgagaggatgattgaagctgtggacaacaacctgcggcccaagtctgagtag

SEQ ID NO: 81631 - DNA, 2796 bp, Artificial Sequence
  derived and/or modified sequence
atgaagaagatgagccggaacgtgctgctgcagatggaggaggaggaggacgatgacgatggtgacattggcgatgtacctgcttcaaggcgaccttttttgaccccgcacacccacctgcccagttccttggtgcttgaaaacttgggtcagacaatcgtgccggacctcggaagcctcgagagccagcatgacttcagaacaccagagtttgaagaattcaatgggaagcccgatagcctcttttttaacgacggtcaacgtaggatcgatttcgtgctggtgtacgaggatgagtcaaggaaggaaactaataaaaaaggaactaacgaaaagcagcgccgcaaacgacaagcgtacgagagtaatctgatttgccacggactgcagcttgaggcaacacgcagcgttttggacgacaagctggtcttcgtgaaagtgcacgccccctgggaagtgctttgcacctacgctgagatcatgcatatcaaactgcccttaaaacccaacgacttaaaaaacaggtctagcgctttcggaactttgaattggttcaccaaggttctttccgtggatgaatctattattaagccggaacaggagtttttcaccgcaccctttgagaagaatagaatgaatgacttctatattgtggaccgggatgcattcttcaatccagcaacccggtcaagaatagtgtatttcatcctgtccagggtcaaataccaggttataaataatgtgagcaagttcgggatcaatagactcgtgaacagcggaatatacaaagcggcattcccattacacgattgcaaattcagacgccagtcagaggatcctagttgcccgaacgaacggtacttactgtatcgagagtgggctcacccgaggtcgatatacaagaaacagcccctcgacctgattaggaaatattatggggagaagattggtatttacttcgcatggctggggtattacacccagatgttactgctcgccgcagttgttggagtcgcgtgctttctgtacggttaccttaaccaggacaattgcacttggtcaaaagaggtgtgtcatcctgacattggaggaaaaattatcatgtgtccccagtgcgaccgtttgtgtcctttttggaaacttaacatcacctgcgagagtagtaagaagctatgcattttcgactccttcggtaccctggtcttcgcagttttcatgggggtgtgggtgactttattccttgaattttggaaacggagacaggccgagctcgagtatgaatgggatacagttgagctccagcaggaagaacaggccaggcctgagtatgaggcacgatgcacacacgtcgtgattaatgagattactcaagaggaagaacggattccctttactgcttggggtaagtgcattcgcattaccctgtgcgcctcggctgtgttcttttggattctgctaatcattgccagcgtgatcgggataatcgtctaccgcctatctgtcttcattgtcttctcagcaaagctccctaagaacattaacggtaccgatcctatccagaagtaccttacccctcagacggccacttctatcaccgcaagcatcatctcctttatcataattatgattctcaatactatctacgagaaggtcgccattatgattacaaatttcgaacttccaaggacacagacagattacgagaactcactcacgatgaagatgttcctgttccagttcgtgaactattattccagctgcttttacatcgcatttttcaaaggtaagtttgtcggatatccgggggacccagtctattggttgggcaaatacaggaacgaagaatgtgaccccggcgggtgtctcttagaactgacaacccagctgacaatcattatgggcggcaaggccatctggaacaacatccaggaagtgctcctgccttggataatgaacctaatcggacgcttccaccgcgtatcagggtccgaaaagatcaccccccgttgggaacaggattaccatctgcagccaatgggaaaattgggtctgttttacgagtacctggaaatgattatccagtttggtttcgtgacgctttttgtggcctcctttccattggccccactgctcgccctcgtgaataatatcctcgagattagagtggacgcgtggaaactaaccacccagtttcgccgtcttgtgccggaaaaggcccaagatattggagcctggcagcccataatgcagggtattgccatccttgctgtggtgaccaacgccatgattattgcctttacctccgacatgattcccagacttgtttattactggagcttcagcgtcccaccatacggcgatcacacatcatacaccatggagggatacattaataatacactgagcatcttcaaagtcgcagattttaagaacaaatctaaggggaatccttatagcgatctcggaaatcacacgacatgtcggtacagggatttcagataccctcctggccacccacaagaatacaagcacaacatctattactggcacgtgattgccgccaagttggccttcattattgtcatggaacacgtcatttatagtgtgaagttcttcatctcctacgccatccccgacgtcagcaagcgcacgaaaagcaagattcagagagagaaatatctcactcaaaagttgcttcacgagaatcatctcaaagatatgacaaaaaacatgggggtaatcgccgaaaggatgattgaggctgtcgataataaccttcggcctaagagcgagtag

SEQ ID NO: 81632 - DNA, 2796 bp, Artificial Sequence
  derived and/or modified sequence
atgaaaaagatgagtcgtaacgtgctcctgcaaatggaggaggaggaagacgatgacgacggagatattggagatgttcctgccagcagacggccattccttacgcctcacactcacttgccaagcagtctggtccttgagaatctaggccagactatcgtgcctgacctagggtctctggaaagccagcatgattttcgtacccctgaattcgaggaattcaatggaaagcccgacagcttgtttttcaacgatgggcagaggagaatcgacttcgtgctggtgtatgaggacgagagtcggaaggaaactaacaaaaaaggcaccaacgagaaacaaaggcggaagcgtcaggcttatgagagtaacctgatctgtcacggattgcagctggaagccacacggagtgttctcgacgacaagttggttttcgtcaaggtgcacgcgccatgggaagtcctgtgcacctacgccgaaatcatgcacattaagcttccactgaagcctaatgatctcaaaaaccgtagtagtgcttttggcaccctgaactggttcaccaaagtactgagtgtagacgagagcatcattaagcctgagcaggagttcttcactgccccattcgaaaaaaacaggatgaacgacttttacatcgtggatcgagatgccttttttaatcctgccacaagatcgcggattgtgtattttatcttaagcagagttaagtatcaggtaataaacaacgtatcaaagtttggaattaatcgtctggtcaacagtggaatctataaagcggctttcccattgcacgattgcaagttcagaaggcaatccgaagatccaagttgccctaacgagcggtacctactgtacagagagtgggcacacccacggagcatttacaaaaagcaaccactggacctgattagaaaatactacggggagaagatcggcatttattttgcatggctaggctattatacccaaatgttgcttctcgctgccgttgtcggcgtggcatgtttcctgtatggttatcttaatcaggacaactgcacttggtctaaggaggtgtgtcatccagatataggaggcaagattattatgtgccctcaatgcgaccgcctgtgcccattctggaagctaaacatcacttgtgagtcctccaaaaagctgtgtatctttgattcgttcggcacgcttgttttcgctgtgttcatgggggtctgggtgaccctgttcctagaattctggaaaaggcgccaggcagaactggagtatgagtgggacaccgtggagctccagcaggaggaacaggcccgtcctgagtatgaggccaggtgtacacacgtcgttatcaacgaaatcactcaagaagaagaaagaatccctttcactgcgtgggggaagtgcatccgcatcaccctgtgcgcgagtgctgtgtttttctggattttgctgatcatcgcctcagtgatcggaatcatagtgtatcggctgagcgtttttatcgtgttttctgccaaactgcctaagaacataaacgggactgacccgatccagaaatatttaaccccacagacagccacctcgattacagcctccattatcagttttatcattatcatgattctgaacacgatatatgaaaaggtggcaatcatgattacaaattttgagctgcctaggacccagaccgattacgagaacagcttaaccatgaagatgttcttatttcaattcgttaactactatagcagctgcttctacattgcatttttcaaaggtaaatttgtgggatatccaggggatcctgtatattggctgggaaagtaccggaacgaagaatgcgatccgggaggatgtttgttagaattgaccacacaattgactataattatgggcggtaaggcaatttggaacaatatccaggaggtactgctaccctggattatgaatctgattggcagattccacagggtgagtgggagcgagaaaattacaccccgttgggaacaggattatcacttgcagccaatgggcaaactggggcttttctatgaatatctggagatgattattcaatttggcttcgttactctgtttgttgcctctttcccactggcgccactgttggctttagtgaacaacattctggagattagagtggacgcctggaagctcaccacccagtttcggaggctcgtaccggagaaagcccaggacataggtgcttggcagccaataatgcagggcatcgctattctggctgtggtgaccaacgcaatgattattgccttcacatctgacatgattcccaggttggtgtactactggtctttctccgtgccgccatacggagatcacaccagctataccatggagggctatattaacaatactttgtctatcttcaaggtcgctgattttaagaataaatccaagggcaacccatactctgatcttggtaatcatacgacgtgcaggtatagagattttcggtatcctcctggccacccacaagaatacaagcataatatctactattggcacgttatagctgccaagttggccttcataatcgttatggaacatgtgatctatagtgtgaagttctttatcagctacgccatcccagatgtgagtaagagaacgaaatccaaaatacagcgcgaaaagtatttgacacagaaactcctacatgagaatcacctcaaggatatgacgaaaaacatgggggtcatcgccgagaggatgatcgaggctgtagataataacctaagacccaagtccgagtag

SEQ ID NO: 81633 - DNA, 5504 bp, Artificial Sequence
  derived and/or modified sequence
gggcatgctcagtctccgggctccgctcggcaggcgagaggcgtcctccggctctgggctccggtcggtgggtgcctcggctcggctttccccggcgctggctgggctcagcggcccctgagcccaagcgacacacgccccgcggtccccgatccggcccctgggagagccgcgccgttctggaacccgggagcccccaacttcgcgccaagttcggagccgccttctgagggagacatgaaaaagatgagcaggaatgttttgctacaaatggaggaggaggaggacgacgacgatggggatatcggtgatgttcctgcctccaggaggccttttctgactcctcatactcacctcccatccagcctggtgttggaaaaccttggacagacaattgtccccgatttgggatcactggaaagtcagcatgattttcgaaccccggagtttgaagaatttaatggaaaacctgactccctcttttttaatgatggccagcgaagaattgactttgttctagtatatgaggatgaaagcagaaaagagaccaataaaaagggtacaaatgaaaaacaaaggaggaaaagacaagcatacgaatctaaccttatctgtcatggcctgcagttagaagcaacaagatcagtattggatgacaagcttgtatttgtaaaagtacacgcaccatgggaggtgttatgtacgtatgctgagataatgcacatcaaattgcctctgaaacccaatgatctgaaaaaccggtcctcagcctttggtacactcaactggtttaccaaagtcctcagtgtagacgaaagcatcatcaagccagagcaagagtttttcactgccccatttgagaagaaccggatgaatgatttttacatagttgatagagatgctttcttcaatccagccaccagaagccgcattgtttacttcatcctctctcgggtcaagtatcaagtgataaacaatgttagcaagtttgggatcaacagacttgtaaactctgggatctacaaggcagctttcccactccatgattgcaaattccgccgtcagtcagaggatcccagctgccctaatgaacggtaccttctgtacagagaatgggctcatcctcgaagcatatacaaaaagcagcccttggatcttatcaggaaatactatggagagaagattggaatctactttgcttggctgggctattacactcagatgcttctcctggccgcagttgtaggagtggcttgctttctctatggatatcttaatcaagataactgtacatggagcaaagaagtttgtcatcctgatattggtggcaagatcataatgtgtcctcagtgtgataggctttgtccattctggaaactcaatattacttgcgagtcctcaaagaaattgtgcatcttcgacagttttggaaccctggtctttgcagtatttatgggagtatgggttaccttgtttttggagttttggaagcgacgccaggcagaacttgagtatgaatgggatactgttgagttacagcaggaagaacaagcccgaccagaatacgaagcacgatgtactcacgtagtgataaatgagattactcaggaagaagaacgcattccctttactgcctggggaaaatgtatacggataaccctctgtgccagtgctgtctttttctggatcctattgatcatcgcttcagttattgggatcattgtctataggctctcggtgttcattgtattttctgcaaaacttcccaagaacattaatggaacagacccaatccagaaatacctgactccacagacagccacgtccatcacggcctccatcatcagctttataattatcatgattctgaacaccatatatgaaaaagtggcaattatgattactaacttcgaactcccaaggacccagactgattatgagaacagcctcaccatgaagatgttcttattccagtttgtcaactactactcttcatgcttctacatagcattctttaagggcaaatttgtaggctatccaggagacccagtttattggttgggaaaatacagaaatgaagagtgtgacccaggtggctgtcttcttgaactgacaactcagctgacaataatcatgggaggaaaagcaatctggaataacatacaagaagtattattgccctggatcatgaatctaattgggcgatttcacagagtttctggatcagaaaagataaccccacgatgggaacaggactaccatctgcagcctatgggcaaactgggattattttatgaatatcttgaaatgattattcagtttgggttcgtcaccttatttgtggcctcttttccactggcccctctgttggctctcgtgaacaatatattggaaataagagtggacgcatggaaactgaccacccagtttagacgcctggtaccagagaaagcccaagacattggagcatggcagcccatcatgcaaggaatagcaattctggctgtggtgaccaatgccatgatcatagctttcacgtcggacatgatcccccgcctagtgtactactggtccttctccgtccctccctacggggaccacacttcctacaccatggaagggtacatcaacaacactctctccatcttcaaagtcgcagacttcaaaaacaaaagcaagggaaacccgtactctgacctgggtaaccataccacatgcaggtatcgtgatttccgatacccacctggacacccccaggagtataaacacaacatctactattggcatgtgattgcagccaagctggcttttatcattgtcatggagcacgtcatctactctgtgaaatttttcatttcatatgcaattcccgatgtatcaaaacgcacaaagagcaagatccagagagaaaaatacctaacccaaaagcttcttcatgagaatcacctcaaagatatgacgaaaaatatgggggtgatagctgagcggatgatagaagcagtagataacaatttacggccaaaatcagaataagagctttatgttctgagaagcactttaaggaatttagctttgtcaaaatatattaggaatcactaatgagaatgtgtaagttaaatcactttggcaaatatgagtctcaactattgccatttcctcatgtattatttttcagtttcagctagcgatgcagaaactggaaaatgtaaaacttagatcatgaagggcataaaacttatcacccggaaaacctcaatgttacctttttctgataaattggaattttacagaaaaagtccctcagtgtgcttaaaaaccaccccttctaaagtagaatggattcttttttttctgtttgattattttcatttctgtctattctcaggcgcatgatctcctttatttttaagccatgtttcatttcttcacttggctagatctgttccagggtcatcttttccttacagtaccatcattatagatttaatttaatagctttcatgtgattaaaaatagctaactagactcaaggattcacaatatttaggtgtattttcaatacctccagaaaggaaacctcagttaatcagaggaaatagtttcagtcttcatttgagcatgtctttccatctcaaaaaaatactcttagtaggttggagtgaagatagcaaggttttgaagcatatttgtcctaatccacagtgacactttttatcttccaggagcactcctaggaggttccgtgcctaatcaatgttgactgctttgcagatctcaagggaataaaatgacaaaagcagggaaagttacagattcaaacagcattttaactcatgttgatctggataattaatcttttctaaagatgtgtagtttcttggaaaacagtgatatcacatgattaaaattacatttttatcaacataattgtctggaaaagataagcccctcaattttctaccagttgacttttattcattagatacagaaggtgcagtattacacatcaccagctgcctttgtgaatggctcactacacagccattggggtacaactgtgtgcatgggcagaaacagcaagtgccctcattgtggtcattgggtggggagtgccttttgtcaaggagtctgcaggaattggcttatttctgtatgccaaagtgatcaacacaccaaagtctctgccataaagaatgtggcttccttgcatcctccatcctgttactctgggcccagtaatttgatgtaactgtctgattgtactagagacaggagtatacccagcttattcataatcaagtaaagagactcagattagatttgattttttagcctcctctagagccaatcaggcagttaagagtaataaaggaaaagggtttggtcacaaaccctaccattatctggagattacttcctgctgcactcctgtcttgccatgcacgtcttgccccctcacttttgctcagcctagcagtctacttcactttattgccttgtaagtgtcaggcctcctgggcgctctggaaaagacagggagccaggccctctcacccctactggtaacaggtcattgctgggtgcacaagagggaggtgatttgcatcatggtcatgctgcatgggcttcactgggatgctgttaaacaccagaggagccaacctatcagaatcccagcagcaaaggaaaactcagattttagaggctttttacaataaagtagcgtaactctaggtcatgattgatttcaaatgcctgccatgaatgatttgtaagtaattatgtaggatccatcaaagcagtattgtaggcttttgaattgtcccagtggatccgggaccccatttcactgtctctcttgatcgtgttaatgatgcaatcagagttcaagacaggccccatgaagtctgactgcactgggatggagaaatgaatttcttcccactgaaggaaactctttctcattcgcagccaagacgggagtgccactgttcctctcttcactcctgagatactgcttctggaagcgggtgtcacttcctctctagtacctcttctcttctctgaagtgtgtgactatctcctagtgtttaaatttggcagttactcgccatgtatgtcagcatagaaaaggaaatgtttttaccttatctcctgtatgtatgatagaacttaaaagaaatgtgcatttgttttcatagccccagcagagaaaatcctcttcatagattaaatgtgctgctgtggacaggaggggaaaaaaaaccctctacatattgaaaggcaccaaatgtaatatctgacactgttaagatgcccaaaagagcaaagttgtagtggagatgcagggtcatttccccatgccatccacagtgtttgttagtgagtccacggctgacttgcagtgataaagaaaagcatggagctgtgtctgcagacaatggtggctgcatctgtaagtggcttcagaggcagcagccctggggaaattgatgggtgtggca

SEQ ID NO: 81634 - DNA, 2796 bp, Artificial Sequence
  derived and/or modified sequence
atgaagaagatgagcagaaacgtgctgctgcagatggaggaggaggaggacgacgacgacggcgacatcggcgacgtgcccgccagcagaagacccttcctgaccccccacacccacctgcccagcagcctggtgctggagaacctgggccagaccatcgtgcccgacctgggcagcctggagagccagcacgacttcagaacccccgagttcgaggagttcaacggcaagcccgacagcctgttcttcaacgacggccagagaagaatcgacttcgtgctggtgtacgaggacgagagcagaaaggagaccaacaagaagggcaccaacgagaagcagagaagaaagagacaggcctacgagagcaacctgatctgccacggcctgcagctggaggccaccagaagcgtgctggacgacaagctggtgttcgtgaaggtgcacgccccctgggaggtgctgtgcacctacgccgagatcatgcacatcaagctgcccctgaagcccaacgacctgaagaacagaagcagcgccttcggcaccctgaactggttcaccaaggtgctgagcgtggacgagagcatcatcaagcccgagcaggagttcttcaccgcccccttcgagaagaacagaatgaacgacttctacatcgtggacagagacgccttcttcaaccccgccaccagaagcagaatcgtgtacttcatcctgagcagagtgaagtaccaggtgatcaacaacgtgagcaagttcggcatcaacagactggtgaacagcggcatctacaaggccgccttccccctgcacgactgcaagttcagaagacagagcgaggaccccagctgccccaacgagagatacctgctgtacagagagtgggcccaccccagaagcatctacaagaagcagcccctggacctgatcagaaagtactacggcgagaagatcggcatctacttcgcctggctgggctactacacccagatgctgctgctggccgccgtggtgggcgtggcctgcttcctgtacggctacctgaaccaggacaactgcacctggagcaaggaggtgtgccaccccgacatcggcggcaagatcatcatgtgcccccagtgcgacagactgtgccccttctggaagctgaacatcacctgcgagagcagcaagaagctgtgcatcttcgacagcttcggcaccctggtgttcgccgtgttcatgggcgtgtgggtgaccctgttcctggagttctggaagagaagacaggccgagctggagtacgagtgggacaccgtggagctgcagcaggaggagcaggccagacccgagtacgaggccagatgcacccacgtggtgatcaacgagatcacccaggaggaggagagaatccccttcaccgcctggggcaagtgcatcagaatcaccctgtgcgccagcgccgtgttcttctggatcctgctgatcatcgccagcgtgatcggcatcatcgtgtacagactgagcgtgttcatcgtgttcagcgccaagctgcccaagaacatcaacggcaccgaccccatccagaagtacctgaccccccagaccgccaccagcatcaccgccagcatcatcagcttcatcatcatcatgatcctgaacaccatctacgagaaggtggccatcatgatcaccaacttcgagctgcccagaacccagaccgactacgagaacagcctgaccatgaagatgttcctgttccagttcgtgaactactacagcagctgcttctacatcgccttcttcaagggcaagttcgtgggctaccccggcgaccccgtgtactggctgggcaagtacagaaacgaggagtgcgaccccggcggctgcctgctggagctgaccacccagctgaccatcatcatgggcggcaaggccatctggaacaacatccaggaggtgctgctgccctggatcatgaacctgatcggcagattccacagagtgagcggcagcgagaagatcacccccagatgggagcaggactaccacctgcagcccatgggcaagctgggcctgttctacgagtacctggagatgatcatccagttcggcttcgtgaccctgttcgtggccagcttccccctggcccccctgctggccctggtgaacaacatcctggagatcagagtggacgcctggaagctgaccacccagttcagaagactggtgcccgagaaggcccaggacatcggcgcctggcagcccatcatgcagggcatcgccatcctggccgtggtgaccaacgccatgatcatcgccttcaccagcgacatgatccccagactggtgtactactggagcttcagcgtgcccccctacggcgaccacaccagctacaccatggagggctacatcaacaacaccctgagcatcttcaaggtggccgacttcaagaacaagagcaagggcaacccctacagcgacctgggcaaccacaccacctgcagatacagagacttcagatacccccccggccacccccaggagtacaagcacaacatctactactggcacgtgatcgccgccaagctggccttcatcatcgtgatggagcacgtgatctacagcgtgaagttcttcatcagctacgccatccccgacgtgagcaagagaaccaagagcaagatccagagagagaagtacctgacccagaagctgctgcacgagaaccacctgaaggacatgaccaagaacatgggcgtgatcgccgagagaatgatcgaggccgtggacaacaacctgagacccaagagcgagtag

SEQ ID NO: 81635 - protein, 264 aa, Artificial Sequence
  derived and/or modified sequence
MCPRAARAPATLLLALGAVLWPAAGAWELTILHTNDVHSRLEQTSEDSSKCVNASRCMGGVARLFTKVQQIRRAEPNVLLLDAGDQYQGTIWFTVYKGAEVAHFMNALRYDAMALGNHEFDNGVEGLIEPLLKEAKFPILSANIKAKGPLASQISGLYLPYKVLPVGDEVVGIVGYTSKETPFLSNPGTNLVFEDEITALQPEVDKLKTLNVNKIIALGHSGFEMDKLIAQKVRGVDVVVGGHSNTFLYTGNCFKRIAWARMSR

SEQ ID NO: 81636 - protein, 524 aa, Artificial Sequence
  derived and/or modified sequence
MCPRAARAPATLLLALGAVLWPAAGAWELTILHTNDVHSRLEQTSEDSSKCVNASRCMGGVARLFTKVQQIRRAEPNVLLLDAGDQYQGTIWFTVYKGAEVAHFMNALRYDAMALGNHEFDNGVEGLIEPLLKEAKFPILSANIKAKGPLASQISGLYLPYKVLPVGDEVVGIVGYTSKETPFLSNPGTNLVFEDEITALQPEVDKLKTLNVNKIIALGHSGFEMDKLIAQKVRGVDVVVGGHSNTFLYTGNPPSKEVPAGKYPFIVTSDDGRKVPVVQAYAFGKYLGYLKIEFDERGNVISSHGNPILLNSSIPEDPSIKADINKWRIKLDNYSTQELGKTIVYLDGSSQSCRFRECNMGNLICDAMINNNLRHTDEMFWNHVSMCILNGGGIRSPIDERNNGIHVVYDLSRKPGDRVVKLDVLCTKCRVPSYDPLKMDEVYKVILPNFLANGGDGFQMIKDELLRHDSGDQDINVVSTYISKMKVIYPAVEGRIKFSTGSHCHGSFSLIFLSLWAVIFVLYQ

SEQ ID NO: 81637 - protein, 230 aa, Artificial Sequence
  derived and/or modified sequence
  misc_feature (1)..(1): Xaa can be any naturally occurring amino acid
XDVVVGGHSNTFLYTGNPPSKEVPAGKYPFIVTSDDGRKVPVVQAYAFGKYLGYLKIEFDERGNVISSHGNPILLNSSIPEDPSIKADINKWRIKLDNYSTQELGKTIVYLDGSSQSCRFRECNMGNLICDAMINNNLRHTDEMFWNHVSMCILNGGGIRSPIDERNNGIHVVYDLSRKPGDRVVKLDVLCTKCRVPSYDPLKMDEVYKVILPNFLANGGDGFQMIKDEL

SEQ ID NO: 81638 - DNA, 795 bp, Artificial Sequence
  derived and/or modified sequence
atgtgcccaagagctgccagagcgcccgctactctcctgctggcgctgggtgcagtgctgtggccggccgccggcgcctgggaactcactatattgcacaccaatgacgtgcattcgcggctggagcagacgtcagaagacagttccaagtgtgtcaacgcaagccggtgcatggggggcgtggccagattattcacaaaagtccagcagatcaggagggcagagcccaatgtgctcttgttggacgctggcgatcagtaccagggaaccatctggttcacagtgtacaaaggagccgaggttgctcacttcatgaacgcacttcgctatgacgccatggctttgggaaatcatgaattcgataatggggtcgagggactgattgaacccctgctgaaggaggccaagtttccaatcttatccgctaatattaaggccaaggggcctctggcgtcgcagatcagcgggctgtaccttccctataaggtcctacccgtcggggacgaggtcgtcgggatcgttggctatacatcgaaagagacgccctttcttagtaacccaggtaccaacttagttttcgaggacgagataacagctttacagcccgaggttgataagctaaagaccctgaacgtgaataaaatcatcgctctcggccacagcggcttcgaaatggacaagttgatcgctcagaaggtgcggggggtcgatgtagtcgttggcggtcactctaacacattcttgtatacagggaactgctttaagcggattgcatgggcgcggatgtctcgctag

SEQ ID NO: 81639 - DNA, 1575 bp, Artificial Sequence
  derived and/or modified sequence
atgtgcccgagggccgcccgcgctcccgccaccctgctgctcgctttgggcgcagtgttatggcctgccgcgggtgcctgggaactgacaatactccataccaatgacgtgcactcaaggttagagcagaccagtgaggactcctctaaatgtgtaaacgcctcccgttgtatgggcggcgtagccagactgttcaccaaggtacagcaaatcaggagggccgagcccaatgtgctgcttctggacgcaggcgaccagtaccagggcacgatctggtttacagtatacaagggggctgaagtggcgcattttatgaatgccctgcgatatgatgccatggcactcggcaaccacgagtttgataacggcgtggaaggactgattgagcccctgttgaaggaggccaagttccctattctctctgccaatattaaagctaagggtccactggccagccaaatttctggactgtaccttccttataaagtgctgccagtgggtgacgaggtggtggggattgttggctatacatcaaaggagaccccattcctctctaatccaggaaccaacctcgtcttcgaagatgaaatcactgcgcttcagccggaggtggataagctcaagacactgaatgtgaataaaataatcgccctgggccacagcggtttcgaaatggacaaactcattgcgcaaaaggtgcgaggggtagatgttgtcgtaggcggacattctaacaccttcttatatacggggaatcctccttctaaagaggtgcccgctggcaagtatcctttcattgttacaagcgacgacggcagaaaagtccccgtcgtacaagcctatgcattcggaaaatatctgggatacttaaaaatcgaattcgatgaaagaggaaatgtgatctcttcacacggtaatcctatactgttgaattcaagcattccagaggatccaagtataaaggccgacatcaacaagtggcgtatcaaacttgacaattactctacacaggagctggggaagactattgtttacctcgatggatcttcccaaagttgcagattccgcgagtgtaacatgggcaatctgatctgcgacgccatgataaacaataacttgcgacatacagatgaaatgttctggaatcacgtcagtatgtgtatcctcaatggcgggggtatccgaagcccaattgacgaacggaataacgggatacatgtggtctatgacctttcccgtaagcccggtgacagggtcgtgaaactcgacgtgttatgcactaagtgcagggtaccgtcctacgacccacttaagatggacgaagtctataaagtcatcttgcccaatttcctcgccaatgggggagatggctttcaaatgattaaagatgaactgctccgccatgactctggggatcaggacattaatgtggtcagcacatatatcagcaaaatgaaagtcatatatccggcagtggaaggtaggataaagtttagcacaggatctcactgtcacggctcatttagtctgatcttcctctctctgtgggcagtcatcttcgtcttgtatcagtag

SEQ ID NO: 81640 - DNA, 693 bp, Artificial Sequence
  derived and/or modified sequence
taagacgtcgtggttggtggccactccaacacatttttgtataccggaaaccctccaagcaaagaagttcccgctggcaaatacccgtttatcgtaacctcagatgacggtaggaaggtgccagtcgtgcaagcctacgcttttggaaagtacttggggtatctaaaaatcgaattcgatgagagagggaacgtgataagtagtcacggcaaccccatactgctgaactcctctataccagaagacccatccatcaaggccgatatcaacaagtggagaataaaactggacaactattcaacccaggaacttggtaagacaatcgtatacttagatgggtctagtcagagttgtcggtttcgcgaatgtaatatggggaacttgatttgcgacgctatgataaacaataatctgcgacacaccgacgaaatgttttggaaccacgtttcaatgtgtatactcaacggaggaggcattcggagcccaatcgacgaacggaacaatggcatccatgtagtttatgatctgagtcggaagcctggagacagggtagtcaaactcgacgtgctgtgcaccaagtgtcgtgtgcctagttatgacccgttgaaaatggatgaggtgtataaggtgatcctgccaaatttcctcgctaatggcggggatggcttccaaatgataaaagacgaactatag

SEQ ID NO: 81641 - DNA, 795 bp, Artificial Sequence
  derived and/or modified sequence
atgtgccccagggctgcccgggccccagccaccctgctgctggccctgggcgctgtgctgtggccagctgctggggcctgggagctgaccatcctgcacaccaatgatgtgcacagccggctggagcagaccagcgaggacagcagcaaatgtgtgaatgccagccgctgcatgggcggcgtggcccggctcttcaccaaggtgcagcagatccggcgggcagagcccaacgtgctgctgctggatgctggggaccagtaccagggcaccatctggttcaccgtgtacaagggagctgaggtggcccacttcatgaatgccctgcgctatgatgccatggccctgggcaaccacgagtttgacaacggggtggagggcctcatcgagcccctgctgaaggaggccaagttccccatcctgagcgccaacatcaaggccaagggccccctggccagccagatcagcggcctgtacctgccctacaaggtgctgcctgtgggagatgaggtggtgggcatcgtgggctacaccagcaaggagacccccttcctgagcaaccctggcaccaacctggtgtttgaagatgagatcacagccctgcagcctgaggtggacaagctgaagaccctgaatgtgaacaagatcatcgccctgggccacagcggctttgagatggacaagctgattgcccagaaggtgcggggcgtggatgtggtggtgggcggccacagcaacaccttcctgtacacaggcaactgcttcaagagaattgcctgggccaggatgagcaggtag

SEQ ID NO: 81642 - DNA, 1575 bp, Artificial Sequence
  derived and/or modified sequence
atgtgccccagggctgcccgggccccagccaccctgctgctggccctgggcgctgtgctgtggccagctgctggggcctgggagctgaccatcctgcacaccaatgatgtgcacagccggctggagcagaccagcgaggacagcagcaaatgtgtgaatgccagccgctgcatgggcggcgtggcccggctcttcaccaaggtgcagcagatccggcgggcagagcccaacgtgctgctgctggatgctggggaccagtaccagggcaccatctggttcaccgtgtacaagggagctgaggtggcccacttcatgaatgccctgcgctatgatgccatggccctgggcaaccacgagtttgacaacggggtggagggcctcatcgagcccctgctgaaggaggccaagttccccatcctgagcgccaacatcaaggccaagggccccctggccagccagatcagcggcctgtacctgccctacaaggtgctgcctgtgggagatgaggtggtgggcatcgtgggctacaccagcaaggagacccccttcctgagcaaccctggcaccaacctggtgtttgaagatgagatcacagccctgcagcctgaggtggacaagctgaagaccctgaatgtgaacaagatcatcgccctgggccacagcggctttgagatggacaagctgattgcccagaaggtgcggggcgtggatgtggtggtgggcggccacagcaacaccttcctgtacacaggcaacccccccagcaaggaggtgcctgctgggaagtaccccttcatcgtgaccagtgatgatggcaggaaggtgcctgtggtgcaggcctatgccttcggcaagtacctgggctacctgaagattgaatttgatgaaagaggaaatgtcatcagcagccacggcaaccccatcctgctgaacagcagcatccctgaggaccccagcatcaaggctgacatcaacaagtggaggatcaagctggacaactacagcacccaggagctgggcaagaccatcgtgtacctggatggcagcagccagagctgccgcttccgggagtgcaacatgggcaacctgatctgtgatgccatgatcaacaacaacctgcggcacacagatgagatgttctggaaccacgtgtccatgtgcatcctgaatggaggcggcatccgcagccccattgatgaaagaaataatggcatccacgtggtgtatgacctgagcaggaagccaggggacagagtggtgaagctggatgtgctgtgcaccaagtgccgggtgcccagctatgaccccctgaagatggatgaggtgtacaaggtgatcctgcccaacttcctggccaatggaggagatggcttccagatgatcaaggatgagctgctgcggcatgacagcggggaccaggacatcaacgtggtgtccacctacatcagcaagatgaaggtgatctacccagctgtggagggccgcatcaagttcagcacaggcagccactgccacggcagcttcagcctcatcttcctgagcctgtgggccgtcatctttgtgctgtaccagtag

SEQ ID NO: 81643 - DNA, 693 bp, Artificial Sequence
  derived and/or modified sequence
tgagatgtggtggtgggcggccacagcaacaccttcctgtacacaggcaacccccccagcaaggaggtgcctgctgggaagtaccccttcatcgtgaccagtgatgatggcaggaaggtgcctgtggtgcaggcctatgccttcggcaagtacctgggctacctgaagattgaatttgatgaaagaggaaatgtcatcagcagccacggcaaccccatcctgctgaacagcagcatccctgaggaccccagcatcaaggctgacatcaacaagtggaggatcaagctggacaactacagcacccaggagctgggcaagaccatcgtgtacctggatggcagcagccagagctgccgcttccgggagtgcaacatgggcaacctgatctgtgatgccatgatcaacaacaacctgcggcacacagatgagatgttctggaaccacgtgtccatgtgcatcctgaatggaggcggcatccgcagccccattgatgagaggaacaacggcatccacgtggtgtatgacctgagcaggaagccaggggacagagtggtgaagctggatgtgctgtgcaccaagtgccgggtgcccagctatgaccccctgaagatggatgaggtgtacaaggtgatcctgcccaacttcctggccaatggaggagatggcttccagatgatcaaggatgagctgtag

SEQ ID NO: 81644 - DNA, 795 bp, Artificial Sequence
  derived and/or modified sequence
atgtgcccccgggccgcccgggcccccgccaccctgctgctggccctaggggccgtcctctggccagcagccggagcatgggaactcaccattctccacactaatgatgttcattctagactggagcaaacgtccgaagatagctcaaaatgtgtaaacgcttcgaggtgtatgggtggagtggcacgactgttcactaaggttcagcagatcagacgcgccgagcccaacgtccttctgctggacgccggggatcagtaccaggggacgatttggttcacagtgtacaagggagccgaggtcgctcattttatgaacgcactgagatatgatgccatggccctcggaaatcacgagtttgacaatggggtcgagggattgatcgagcccttgctgaaagaggccaaatttccaatcttgtctgctaatatcaaggccaagggccctctggcatctcaaatctccggcctgtatctcccatataaggtgctgccagtcggcgatgaggtggttggtatcgtgggctacaccagtaaagaaacccccttcctctctaacccagggactaatctggtgttcgaggatgagattaccgccttgcaaccagaggtagataagctgaagactcttaacgtgaataagatcattgcgcttggacatagcggctttgagatggacaagctgatagcacagaaggttaggggagtagatgtagtggtgggaggacactccaacactttcctgtacaccggtaattgcttcaaacgcattgcgtgggcccggatgtctaggtag

SEQ ID NO: 81645 - DNA, 1575 bp, Artificial Sequence
  derived and/or modified sequence
atgtgcccccgggccgcccgggcccccgccaccctgctgctggcccttggtgccgttctatggcctgcggctggagcatgggaactgactatcctccacaccaacgacgttcattccagactggaacagacttcggaggacagttcgaaatgtgtcaatgcttcgcggtgtatggggggcgtcgcgcgtttatttacaaaagttcagcagattaggcgggctgaaccaaatgtgctgcttttagacgctggcgaccagtatcaggggactatctggttcactgtctataaaggcgcggaggtcgcacactttatgaacgcactccgttacgatgctatggcgctaggcaaccatgaattcgataacggcgtagaggggctcatcgaaccattattgaaagaagccaagtttcctattctgtctgcaaatataaaggccaaagggccgttggcaagtcaaatcagcgggctgtatctaccatacaaagtcctgccagtaggggacgaggtagttgggattgtcggctatacaagcaaggagaccccctttctgtccaaccctgggaccaacttggtgttcgaggatgagataacggctctacagccagaagttgacaagcttaaaactctgaacgttaataagatcattgcgttggggcactctggtttcgaaatggacaagctgattgctcagaaggtcaggggcgtggatgttgttgtcggaggacacagcaacaccttcttatatacaggcaaccctcccagtaaagaagtgcctgccgggaagtatccattcatcgtgaccagcgatgatggaagaaaagtacccgtggtccaggcctacgcatttggaaagtacctgggctacctcaaaatcgaatttgacgagcgcggtaatgtgatcagttctcatggcaatcccatactgttaaacagcagcattcctgaagaccccagtattaaagcggatatcaacaaatggcgaataaagctggataattatagcacgcaggagctgggaaaaaccattgtgtacctggatgggtcgtcacaatcatgcagattcagggagtgcaacatgggcaacctgatctgtgatgccatgataaacaataacctgaggcatactgatgaaatgttctggaatcacgtgtcaatgtgtattctaaatggaggagggattaggtctcccatcgatgagaggaataatggaatacatgtcgtgtatgatttgagccggaagcccggtgatagggtggtgaagctagacgtgctctgtacaaagtgtcgtgtcccctcatacgacccattgaagatggacgaagtgtacaaagtaatcttgccaaacttcctcgccaacggcggcgacggttttcaaatgataaaagacgagctgctgagacatgactcaggcgatcaggacataaacgttgtctcgacttacatcagcaagatgaaggtaatttacccagcagtggagggaagaatcaaattctcaaccgggagccactgtcatggaagcttctccctaatctttctgtccctctgggctgtaatatttgtgctctaccagtag

SEQ ID NO: 81646 - DNA, 693 bp, Artificial Sequence
  derived and/or modified sequence
tgagacgtggtggtgggcggccacagcaacaccttcctgtacaccggaaatccaccctctaaggaagttccagccggaaagtacccattcatcgtaacttccgatgacggtcgtaaagtgccagtggtgcaggcgtacgcatttggaaagtacttaggctatctgaaaattgaattcgacgagagaggtaatgtgatctcttcccatgggaatcccattctcctcaacagctcgatccccgaggatccatctattaaagccgacattaacaagtggcgcattaagctcgacaactattccacacaggagctgggaaagacgattgtctaccttgacggttcaagtcagagttgccggtttcgcgagtgcaacatgggcaacctcatttgcgatgccatgatcaacaataacctgaggcacacggacgagatgttttggaatcacgtgtctatgtgtattcttaacggtggtggcatacggagccctatcgacgagaggaacaacggaatccacgtcgtgtacgatctcagtcgtaaaccgggggacagggtcgttaaacttgatgtgctatgcaccaaatgcagagtgcctagttatgaccccctgaagatggacgaagtctacaaggttattctccctaattttctggctaacggaggagacggattccaaatgattaaggacgaattgtag

SEQ ID NO: 81647 - DNA, 795 bp, Artificial Sequence
  derived and/or modified sequence
atgtgtccacgggcagcaagagcgcctgccaccttgctactcgcattaggcgcagtgctgtggcccgcagccggagcttgggagctgaccattttacacacaaacgacgtacattccagattggaacagacatctgaggattccagcaagtgtgtcaatgcatctaggtgtatgggcggagtcgctaggctgtttaccaaggtgcagcagattaggcgcgcagaacccaacgtcctgctactggacgccggagaccagtatcagggcaccatctggttcacagtgtacaaaggggctgaggtggcacactttatgaatgcgctgcgctacgatgccatggctctgggtaatcatgagttcgacaacggcgtggaaggcctaatcgagcccctccttaaagaagcaaaatttcccattctgagtgctaatataaaggcgaaaggccctctggcttcccagatttcgggcctatacttaccgtacaaagtcctccctgtcggtgatgaggtcgtggggatagtcggctatactagcaaggagacaccgtttctgtccaaccccggaactaacctagtctttgaagacgaaatcaccgcactgcagcccgaggtcgataagttgaagactctgaacgtgaacaaaatcatagccctgggtcacagcggattcgaaatggacaaacttatagcgcagaaagtgcggggtgtcgacgtcgtggtcggtggccattcaaatacattcctttacaccggaaactgttttaagagaattgcttgggcacggatgtcccgctag

SEQ ID NO: 81648 - DNA, 1575 bp, Artificial Sequence
  derived and/or modified sequence
atgtgtcctcgtgcggctagagccccagctaccctgttgctggctctgggagcagtactttggccagctgcgggagcgtgggaactgacaattctccacaccaatgacgtgcactccagactggaacagacgtcagaagatagtagcaaatgcgttaacgcttccaggtgcatgggcggtgtagccagattattcaccaaggttcaacagatccggcgtgctgagcctaatgtgctcttattagacgctggcgaccagtatcagggaacaatctggttcaccgtctacaaaggagccgaggtggcccactttatgaatgcactgcggtatgacgccatggctctgggaaatcatgagttcgacaacggggtggagggcttaattgagcctctactgaaggaggctaagttcccaatcctctcggcaaatataaaggctaaaggacctctggcatcccagatcagtgggttgtacctgccatacaaggtgctcccagtcggcgacgaagtggtcggcatcgttgggtatactagtaaagaaactccgttcttatcaaatcctggtaccaatctggtctttgaggacgaaatcaccgctctgcagccggaagtggataaactgaagacattgaatgtgaataagattattgccctgggtcatagcggattcgaaatggataaattaatcgctcaaaaggtgaggggtgtcgacgttgtggtgggtggacattcaaacacgttcctgtatacagggaacccaccttccaaggaggtcccagcaggaaagtacccttttatcgtgacgagtgacgacgggaggaaggttcccgtagtgcaggcatatgcgtttggaaagtacctcggatatctcaaaatagaatttgacgagcggggtaatgtcatctcctctcacggaaaccctatcttgctgaacagctccatccctgaagacccctcaatcaaggccgacattaataaatggagaatcaaactcgacaattacagcactcaggagctgggaaaaaccattgtgtacttagatggcagtagccaaagctgccggtttcgagagtgcaatatgggaaatctcatctgcgatgctatgatcaataacaacctgcggcacacagatgagatgttctggaaccatgtctccatgtgcatcctgaacggtggtggcatccggtccccaattgacgagaggaacaacggtattcacgtggtatatgatctgtccagaaaaccgggagatagggtggtgaagttggatgtactatgcaccaaatgcagggttccctcttatgacccattgaagatggatgaagtgtataaggtgatcctgcccaactttctggctaacggcggtgacggattccagatgatcaaagacgaactgttacggcacgatagcggagatcaggacatcaacgtagtctccacatacatcagtaagatgaaggtgatctaccctgcagtggaaggccgtatcaaatttagtacaggatcacactgccacgggtcattctctttaatttttctgagtctgtgggctgtcatatttgtgctttaccagtag

SEQ ID NO: 81649 - DNA, 693 bp, Artificial Sequence
  derived and/or modified sequence
tgagacgtggttgtgggtgggcatagtaatacattcctttatacaggtaatcctccatccaaggaggtacccgctggcaagtacccatttatagtcacaagtgacgacggacgcaaggtgccagtcgtgcaggcatacgccttcggcaagtatctggggtaccttaaaatcgagtttgacgagcgcggtaacgtaatcagtagccatggaaatccaatcctgttaaactcaagcattcccgaagatccctccattaaagctgacatcaataagtggcgaatcaaactagataattacagtacacaggagctcggcaaaacaatagtttatctcgatgggagctcacagtcatgtcgattcagagagtgcaacatgggaaaccttatatgcgatgcaatgattaacaataacctgcggcatactgacgagatgttctggaatcatgtgagtatgtgtatcctgaacggagggggtatccgaagcccgatcgatgagaggaataatgggatacatgttgtgtacgacttgagccgcaaacctggtgaccgcgtggtgaaattggacgtgctttgtacaaagtgccgcgtgcccagttatgaccccttgaagatggacgaggtctacaaggtgatcctgcccaattttctggcaaacggcggagacggctttcaaatgatcaaagatgaattgtag

SEQ ID NO: 81650 - DNA, 974 bp, Artificial Sequence
  derived and/or modified sequence
gcactcgcccggctcgcccgctttcgcacccagttcacgcgccacagctatgtgtccccgagccgcgcgggcgcccgcgacgctactcctcgccctgggcgcggtgctgtggcctgcggctggcgcctgggagcttacgattttgcacaccaacgacgtgcacagccggctggagcagaccagcgaggactccagcaagtgcgtcaacgccagccgctgcatgggtggcgtggctcggctcttcaccaaggttcagcagatccgccgcgccgaacccaacgtgctgctgctggacgccggcgaccagtaccagggcactatctggttcaccgtgtacaagggcgccgaggtggcgcacttcatgaacgccctgcgctacgatgccatggcactgggaaatcatgaatttgataatggtgtggaaggactgatcgagccactcctcaaagaggccaaatttccaattctgagtgcaaacattaaagcaaaggggccactagcatctcaaatatcaggactttatttgccatataaagttcttcctgttggtgatgaagttgtgggaatcgttggatacacttccaaagaaaccccttttctctcaaatccagggacaaatttagtgtttgaagatgaaatcactgcattacaacctgaagtagataagttaaaaactctaaatgtgaacaaaattattgcactgggacattcgggttttgaaatggataaactcatcgctcagaaagtgaggggtgtggacgtcgtggtgggaggacactccaacacatttctttacacaggtaattgtttcaaaaggattgcatgggccaggatgtccagataagcactgtgtctcttttgcctttgtaactgttattactctttttactgctatttaatatgtaatgtatattatatgatctataatatatatgtaatatacattaaatgggaacatgtgcaaatcttacaaa

SEQ ID NO: 81651 - DNA, 3384 bp, Artificial Sequence
  derived and/or modified sequence
cgctttcgcacccagttcacgcgccacagctatgtgtccccgagccgcgcgggcgcccgcgacgctactcctcgccctgggcgcggtgctgtggcctgcggctggcgcctgggagcttacgattttgcacaccaacgacgtgcacagccggctggagcagaccagcgaggactccagcaagtgcgtcaacgccagccgctgcatgggtggcgtggctcggctcttcaccaaggttcagcagatccgccgcgccgaacccaacgtgctgctgctggacgccggcgaccagtaccagggcactatctggttcaccgtgtacaagggcgccgaggtggcgcacttcatgaacgccctgcgctacgatgccatggcactgggaaatcatgaatttgataatggtgtggaaggactgatcgagccactcctcaaagaggccaaatttccaattctgagtgcaaacattaaagcaaaggggccactagcatctcaaatatcaggactttatttgccatataaagttcttcctgttggtgatgaagttgtgggaatcgttggatacacttccaaagaaaccccttttctctcaaatccagggacaaatttagtgtttgaagatgaaatcactgcattacaacctgaagtagataagttaaaaactctaaatgtgaacaaaattattgcactgggacattcgggttttgaaatggataaactcatcgctcagaaagtgaggggtgtggacgtcgtggtgggaggacactccaacacatttctttacacaggcaatccaccttccaaagaggtgcctgctgggaagtacccattcatagtcacttctgatgatgggcggaaggttcctgtagtccaggcctatgcttttggcaaatacctaggctatctgaagatcgagtttgatgaaagaggaaacgtcatctcttcccatggaaatcccattcttctaaacagcagcattcctgaagatccaagcataaaagcagacattaacaaatggaggataaaattggataattattctacccaggaattagggaaaacaattgtctatctggatggctcctctcaatcatgccgctttagagaatgcaacatgggcaacctgatttgtgatgcaatgattaacaacaacctgagacacacggatgaaatgttctggaaccacgtatccatgtgcattttaaatggaggtggtatccggtcgcccattgatgaacgcaacaatggaatccatgtggtgtatgatctttcccgaaaacctggagacagagtagtcaaattagatgttctttgcaccaagtgtcgagtgcccagttatgaccctctcaaaatggacgaggtatataaggtgatcctcccaaacttcctggccaatggtggagatgggttccagatgataaaagatgaattattaagacatgactctggtgaccaagatatcaacgtggtttctacatatatctccaaaatgaaagtaatttatccagcagttgaaggtcggatcaagttttccacaggaagtcactgccatggaagcttttctttaatatttctttcactttgggcagtgatctttgttttataccaatagccaaaaattctccttgcctttaatgtgtgaaactgcattttttcaagtgagattcaaatctgccttttaggacctggctttgtgacagcaaaaaccatctttacaggctcctagaagctgaaggttagagcattataaaatgaagagacagacatgattactcagggtcagcaacctagtgagttagaaaaaaaattaacatagggccctataaggagaaagccaactatgttaagtttacgtgtccaaattttaatgaaattttactaacaattttaaaccatatttttcttcttcatatccatttctaatccatcaaacagcttatgtttacataaaattttatcattcacaaggaagttttaagcacactgtctcatttgatatccacaacttatttttggtaggaaagagagatgtttttcccacctgtcagatgaaaaaactgaagctcaaaaagggttgacttgaccatacagctaatgctgacagatccaagacctagacctaggtcttttgaactcaagtccagcattctcaactatatcaagttactgttcagaatacttaatatctcctctcttcataattatcaatagccccaagctcatggatgacaaatctctgctttatttcttgtctctattttttcactttatagctcctgttataatagcaagtttaatggtataaacacaggataccatcctctcttgcaacacccatgtgcctttgatgagtcaggtagcaagctgtagtagataatgagaaaggccagaggctgcaaaagacagtcaaaggacacgagagaaaggaaggggaagaacaggactccaggactgttttatattatagaaaagcaagagctaaagagcatttacacatgttaaacagatacttgttaagcatagtgcctgacacacggcattagctgttattttatgagattccatcagctctgcctctgtcctctttcttctaacatgaaggtatcatgagaagagaaccttctaacataagctgtaattctaaacctgcacttgtccctctccagcaagaggctagcactgaattcattctactcatactacacacccagttatggaatgtccagagttctcgaagaaaataaatgactttaggaagaggtatacattttttaagtcgctctgcctccaaatctgaacagtcactgtaaatcattcttaagcccagatatgagaacttctgctggaaagtgggaccctctgagtgggtggtcagaaaatacccatgctgatgaaatgacctatgcccaaagaacaaatacttaacgtgggagtggaaccacatgagcctgctcagctctgcataagtaattcaagaaatgggaggcttcaccttaaaaacagtgtgcaaatggcagctagaggttttgataggaagtatgtttgtttcttagtgtttacaaatattaagtactcttgatacaaaatatacttttaaacttcataacctttttataaaagttgttgcagcaaaataatagcctcggttctatgcatatatggattagctataaaaaatgtcaataagattgtacaaggaaaattagagaaagtcacatttagggtttattttttacacttggccagtaaaatagggtaaatcctattagaattttttaaagaactttttttaagtttcctaaatctgtgtgtgtattgtgaagtggtataagaaatgactttgaaccactttgcaattgtagattcccaacaataaaattgaagataagc

SEQ ID NO: 81652 - DNA, 689 bp, Artificial Sequence
  derived and/or modified sequence
tggacgtcgtggtgggaggacactccaacacatttctttacacaggcaatccaccttccaaagaggtgcctgctgggaagtacccattcatagtcacttctgatgatgggcggaaggttcctgtagtccaggcctatgcttttggcaaatacctaggctatctgaagatcgagtttgatgaaagaggaaacgtcatctcttcccatggaaatcccattcttctaaacagcagcattcctgaagatccaagcataaaagcagacattaacaaatggaggataaaattggataattattctacccaggaattagggaaaacaattgtctatctggatggctcctctcaatcatgccgctttagagaatgcaacatgggcaacctgatttgtgatgcaatgattaacaacaacctgagacacacggatgaaatgttctggaaccacgtatccatgtgcattttaaatggaggtggtatccggtcgcccattgatgaacgcaacaatggaatccatgtggtgtatgatctttcccgaaaacctggagacagagtagtcaaattagatgttctttgcaccaagtgtcgagtgcccagttatgaccctctcaaaatggacgaggtatataaggtgatcctcccaaacttcctggccaatggtggagatgggttccagatgataaaagatgaatta

SEQ ID NO: 81653 - DNA, 795 bp, Artificial Sequence
  derived and/or modified sequence
atgtgccccagagccgccagagcccccgccaccctgctgctggccctgggcgccgtgctgtggcccgccgccggcgcctgggagctgaccatcctgcacaccaacgacgtgcacagcagactggagcagaccagcgaggacagcagcaagtgcgtgaacgccagcagatgcatgggcggcgtggccagactgttcaccaaggtgcagcagatcagaagagccgagcccaacgtgctgctgctggacgccggcgaccagtaccagggcaccatctggttcaccgtgtacaagggcgccgaggtggcccacttcatgaacgccctgagatacgacgccatggccctgggcaaccacgagttcgacaacggcgtggagggcctgatcgagcccctgctgaaggaggccaagttccccatcctgagcgccaacatcaaggccaagggccccctggccagccagatcagcggcctgtacctgccctacaaggtgctgcccgtgggcgacgaggtggtgggcatcgtgggctacaccagcaaggagacccccttcctgagcaaccccggcaccaacctggtgttcgaggacgagatcaccgccctgcagcccgaggtggacaagctgaagaccctgaacgtgaacaagatcatcgccctgggccacagcggcttcgagatggacaagctgatcgcccagaaggtgagaggcgtggacgtggtggtgggcggccacagcaacaccttcctgtacaccggcaactgcttcaagagaatcgcctgggccagaatgagcagatag

SEQ ID NO: 81654 - DNA, 1575 bp, Artificial Sequence
  derived and/or modified sequence
atgtgccccagagccgccagagcccccgccaccctgctgctggccctgggcgccgtgctgtggcccgccgccggcgcctgggagctgaccatcctgcacaccaacgacgtgcacagcagactggagcagaccagcgaggacagcagcaagtgcgtgaacgccagcagatgcatgggcggcgtggccagactgttcaccaaggtgcagcagatcagaagagccgagcccaacgtgctgctgctggacgccggcgaccagtaccagggcaccatctggttcaccgtgtacaagggcgccgaggtggcccacttcatgaacgccctgagatacgacgccatggccctgggcaaccacgagttcgacaacggcgtggagggcctgatcgagcccctgctgaaggaggccaagttccccatcctgagcgccaacatcaaggccaagggccccctggccagccagatcagcggcctgtacctgccctacaaggtgctgcccgtgggcgacgaggtggtgggcatcgtgggctacaccagcaaggagacccccttcctgagcaaccccggcaccaacctggtgttcgaggacgagatcaccgccctgcagcccgaggtggacaagctgaagaccctgaacgtgaacaagatcatcgccctgggccacagcggcttcgagatggacaagctgatcgcccagaaggtgagaggcgtggacgtggtggtgggcggccacagcaacaccttcctgtacaccggcaacccccccagcaaggaggtgcccgccggcaagtaccccttcatcgtgaccagcgacgacggcagaaaggtgcccgtggtgcaggcctacgccttcggcaagtacctgggctacctgaagatcgagttcgacgagagaggcaacgtgatcagcagccacggcaaccccatcctgctgaacagcagcatccccgaggaccccagcatcaaggccgacatcaacaagtggagaatcaagctggacaactacagcacccaggagctgggcaagaccatcgtgtacctggacggcagcagccagagctgcagattcagagagtgcaacatgggcaacctgatctgcgacgccatgatcaacaacaacctgagacacaccgacgagatgttctggaaccacgtgagcatgtgcatcctgaacggcggcggcatcagaagccccatcgacgagagaaacaacggcatccacgtggtgtacgacctgagcagaaagcccggcgacagagtggtgaagctggacgtgctgtgcaccaagtgcagagtgcccagctacgaccccctgaagatggacgaggtgtacaaggtgatcctgcccaacttcctggccaacggcggcgacggcttccagatgatcaaggacgagctgctgagacacgacagcggcgaccaggacatcaacgtggtgagcacctacatcagcaagatgaaggtgatctaccccgccgtggagggcagaatcaagttcagcaccggcagccactgccacggcagcttcagcctgatcttcctgagcctgtgggccgtgatcttcgtgctgtaccagtag

SEQ ID NO: 81655 - DNA, 693 bp, Artificial Sequence
  derived and/or modified sequence
tgagacgtggtggtgggcggccacagcaacaccttcctgtacaccggcaacccccccagcaaggaggtgcccgccggcaagtaccccttcatcgtgaccagcgacgacggcagaaaggtgcccgtggtgcaggcctacgccttcggcaagtacctgggctacctgaagatcgagttcgacgagagaggcaacgtgatcagcagccacggcaaccccatcctgctgaacagcagcatccccgaggaccccagcatcaaggccgacatcaacaagtggagaatcaagctggacaactacagcacccaggagctgggcaagaccatcgtgtacctggacggcagcagccagagctgcagattcagagagtgcaacatgggcaacctgatctgcgacgccatgatcaacaacaacctgagacacaccgacgagatgttctggaaccacgtgagcatgtgcatcctgaacggcggcggcatcagaagccccatcgacgagagaaacaacggcatccacgtggtgtacgacctgagcagaaagcccggcgacagagtggtgaagctggacgtgctgtgcaccaagtgcagagtgcccagctacgaccccctgaagatggacgaggtgtacaaggtgatcctgcccaacttcctggccaacggcggcgacggcttccagatgatcaaggacgagctgtag

SEQ ID NO: 81656 - protein, 752 aa, Artificial Sequence
  derived and/or modified sequence
MKPAEHATMFLIVLGCLILAVLTTFKEYETVSGDWLLLLETFAIFIFGAEFALRIWAAGCCCRYKGWRGRLKFARKPLCMLDIFVLIASVPVVAVGNQGNVLATSLRSLRFLQILRMLRMDRRGGTWKLLGSAICAHSKELITAWYIGFLTLILSSFLVYLVEKDVPEVDAQGEEMKEEFETYADALWWGLITLATIGYGDKTPKTWEGRLIAATFSLIGVSFFALPAGILGSGLALKVQEQHRQKHFEKRRKPAAELIQAAWRYYATNPNRIDLVATWRFYESVVSFPFFRKEQLEAASSQKLGLLDRVRLSNPRGSNTKGKLFTPLNVDAIEESPSKEPKPVGLNNKERFRTAFRMKAYAFWQSSEDAGTGDPMAEDRGYGNDFPIEDMIPTLKAAIRAVRILQFRLYKKKFKETLRPYDVKDVIEQYSAGHLDMLSRIKYLQTRIDMIFTPGPPSTPKHKKSQKGSAFTFPSQQSPRNEPYVARPSTSEIEDQSMMGKFVKVERQVQDMGKKLDFLVDMHMQHMERLQVQVTEYYPTKGTSSPAEAEKKEDNRYSDLKTIICNYSETGPPEPPYSFHQVTIDKVSPYGFFAHDPVNLPRGGPSSGKVQATPPSSATTYVERPTVLPILTLLDSRVSCHSQADLQGPYSDRISPRQRRSITRDSDTPLSLMSVNHEELERSPSGFSISQDRDDYVFGPNGGSSWMREKRYLAEGETDTDTDPFTPSGSMPLSSTGDGISDSVWTPSNKPI

SEQ ID NO: 81657 - protein, 751 aa, Artificial Sequence [sequence omitted]

SEQ ID NO: 81658 - DNA, 2259 bp, Artificial Sequence
  derived and/or modified sequence
atgaagcctgctgagcacgccacaatgttcctaatcgtgttgggatgcttaatcctcgcggtgttgactaccttcaaggagtatgaaaccgtgagcggcgactggctgctccttctcgaaacttttgccatcttcatctttggagcagaatttgctctgcggatttgggccgccggctgctgctgtcgctataaggggtggcgcggcaggctaaaatttgcccggaagcctctctgcatgttggacatctttgtccttatcgcttccgtgccagttgtagccgttgggaatcaaggcaacgtgctggctacctccctgcggagcctgaggttcctgcaaatccttcgcatgctccgtatggataggcgcggggggacctggaagttgctcggatccgcaatatgcgctcattccaaagagttgatcactgcttggtacataggcttcttgaccctgatcctctcaagtttcctcgtctacttggtcgagaaggacgtgcctgaagttgatgcccagggggaagaaatgaaagaggagttcgagacatacgctgatgccctgtggtggggtctgattactctggcaactatagggtatggagataaaacgccgaaaacctgggaagggcgtctgatcgccgcaacctttagtcttattggagttagcttttttgccctacccgccggtatactcggttctggactcgcgctgaaggtacaggaacaacatcggcagaagcacttcgagaagagaagaaagcccgctgcagagcttatacaggccgcttggcggtactacgccactaatcctaataggatcgacctcgtggccacatggagattttatgagagcgtggtgtccttcccgttcttccgaaaagagcagctcgaagccgcctccagccagaagctgggactcttagaccgtgtgcggctgtcaaatccgagaggctctaacacaaagggcaaactgttcacacctctcaatgtggacgccattgaggagtctccatccaaggaaccgaagcctgtgggcttgaataacaaggagcgcttccgcactgcatttcggatgaaggcttacgccttctggcaatcctccgaggatgccggcaccggggaccccatggcagaagacaggggttacggcaatgattttcctattgaagatatgatcccaaccctgaaagccgccattagagccgtgcgtattctgcagttccgattgtacaaaaagaagttcaaggaaacgcttcgaccgtatgacgtgaaagacgtcatcgagcagtattccgctggacatctggatatgttaagcagaattaaatacttgcagaccagaatcgacatgatttttacccctgggccccccagtacccctaagcataagaaatcccaaaaaggctctgcatttacatttccttcccagcagagccctaggaacgagccctatgtagcgaggccaagtaccagcgaaattgaggatcaaagcatgatgggcaaattcgtcaaggtagagcgacaggtgcaagacatggggaagaagctggattttctcgtagacatgcatatgcaacacatggagaggctgcaggtgcaggtgacagagtactaccccacaaagggcacctcaagtcccgcggaagcagagaaaaaagaagataaccgctactcagacctgaaaactattatctgcaactatagtgagaccggtccaccagagccaccctactctttccatcaagtcaccattgataaagtttccccgtacggattcttcgcccatgatcccgtcaacttgccaaggggggggccatcctcaggcaaagttcaagccacccctccctcctcagccacaacttatgtggaaaggcccacagtgctgcctattctgaccctcttagactccagggtcagctgccactcccaagccgatctccaggggccatacagcgacagaatttctccccgccaacgcaggtctattacccgcgacagtgacactcccctaagccttatgtcagtgaaccatgaagaactagagaggtccccatctggcttctcaatcagccaggacagggatgactacgtgttcgggccaaacgggggaagctcatggatgagagagaaaagatatttagcagagggtgagaccgacactgacaccgatccgtttactccttcgggtagcatgcccctatcaagcacaggagatggcatctctgattctgtctggaccccaagcaataaacccatctag

SEQ ID NO: 81659 - DNA, 2256 bp, Artificial Sequence
  derived and/or modified sequence
aagccaaagaaacacgggccaatgttcctgatcgtgctgggctgcttgatacttgccgtcttgaccacgtttaaggaatatgagaccgtttccggggactggctccttctgcttgagactttcgcaattttcatatttggtgccgaattcgccctcagaatttgggccgcaggctgttgttgccggtataaaggttggaggggaagactgaaattcgcccgtaagccactctgtatgttggacatttttgtcctgatagcttcagtgccagtggtggctgtgggtaatcaaggcaatgtactggctacaagtctgagatctctgcggtttttgcaaatcttgaggatgttgaggatggaccgcaggggtggaacatggaagcttctgggtagcgccatttgtgcacattctaaggagctcatcacggcatggtacatcggcttcctgaccctgatcctgagctcattcttagtgtacttggtggagaaggatgtacccgaagtggacgcgcagggagaggagatgaaagaggaatttgagacctacgccgacgctctgtggtggggcctcattacgctcgccacaattgggtatggtgacaaaacacctaagacttgggaagggaggttgattgcagctaccttttctcttattggtgtgtccttttttgcgttgcccgccgggatactgggcagcggcctggcactgaaagtccaggagcagcaccgtcagaaacactttgagaagaggaggaagcctgccgcagagctcatccaagccgcctggaggtactatgcaacaaatccaaataggatcgatctggttgccacatggcgcttttacgaatccgtggtgagctttcctttttttcgtaaggagcaactggaggcagcaagttcccagaagttggggctgttggatagggtacgcctgagcaacccacgggggtccaatacaaaagggaagctgttcacgcccctcaacgtagacgccattgaagagagccctagtaaggagccaaagcctgtaggattgaataacaaggaacggtttaggaccgcctttcggatgaaagcttatgcgttttggcaatctagtgaagatgctggcacaggagacccaatggccgaggaccgcggttatggaaatgattttcccattgaggacatgattcctactctgaaagccgcaatcagggccgttaggatactccagttcagactctataagaagaagttcaaggaaactctgcggccatatgacgtcaaggacgtcattgaacaatacagcgccggccacctggatatgctcagccggatcaagtatctacagacccggatcgacatgatttttacgcccggcccaccttctacacctaagcataaaaaaagtcaaaagggtagtgcgttcacattcccttcacagcagtctccacggaacgagccgtatgtggcgcgtccctcaacctctgagattgaggaccagtccatgatgggtaagttcgtaaaggttgaacggcaggttcaggacatgggcaagaagctggacttcttggtagacatgcacatgcaacatatggagaggttgcaggtgcaggtcacagaatattaccctacgaagggaacctcatccccagctgaggctgaaaagaaagaggataaccgctattctgatctgaagacgattatctgtaactattccgagacaggtccacccgaacccccctacagctttcaccaggtcacaattgataaggtgtcaccatatggcttcttcgcccacgaccccgttaatctgcctagaggaggtcccagttcgggtaaggtccaggctacacctccgtcctcagctacaacgtatgtagagaggcctacggtactgcccatcttgacgcttctcgactccagggtgtcatgccattcacaggccgatctccagggaccctattccgatcgtatatctccccgccagcggcgcagtatcacacgcgatagcgacactcctctgtcccttatgagtgtgaatcacgaggagctggagagatctccatccggctttagcatttcccaagacagagacgactatgtctttgggcctaatggcggaagctcatggatgcgtgagaagcgctatctcgcggaaggggaaactgacacagacacggatccgtttacccctagcggtagcatgcctctcagcagtaccggggatggtatcagcgattccgtgtggacgcctagcaataagcctatctag

SEQ ID NO: 81660 - DNA, 2259 bp, Artificial Sequence
  derived and/or modified sequence
atgaagccagctgagcacgccaccatgttcctgattgtgctgggctgcctgatcctggccgtgctgaccaccttcaaggagtatgagaccgtgtctggggactggctgctgctgctggagacctttgccatcttcatctttggagctgagtttgccctgcgcatctgggccgccggctgctgctgccgctacaagggctggaggggccgcctgaagtttgccaggaagcccctgtgcatgctggacatctttgtgctgattgcctctgtgcctgtggtggccgtgggcaaccagggcaatgtgctggccaccagcctgcggagcctgcgcttcctgcagatcctgaggatgctgaggatggaccggcggggcggcacctggaagctgctgggcagcgccatctgtgcccacagcaaggagctgatcacagcctggtacatcggcttcctgaccctcatcctgagcagcttcctggtgtacctggtggagaaggatgtgcctgaggtggatgcccagggcgaggagatgaaggaggagtttgagacctatgcagatgccctgtggtggggcctcatcaccctggccaccatcggctatggagacaagacccccaagacctgggagggccgcctgattgctgccaccttcagcctgattggagtgtccttctttgccctgcctgctggcatcctgggcagcggcctggccctgaaggtgcaggagcagcaccggcagaagcactttgagaagaggaggaagccagctgctgagctgatccaggccgcctggagatactatgccaccaaccccaacagaattgacctggtggccacctggaggttctatgagagcgtggtgtccttccccttcttcaggaaggagcagctggaggccgccagcagccagaagctgggcctgctggacagagtgcggctgagcaacccccggggcagcaacaccaagggcaagctgttcacccccctgaatgtggatgccatcgaggagagccccagcaaggagcccaagcctgtgggcctgaacaacaaggagcgcttcagaacagccttcaggatgaaggcctatgccttctggcagagcagtgaagatgctggcaccggggaccccatggccgaggaccggggctatggaaatgacttccccatcgaggacatgatccccaccctgaaggccgccatccgggctgtgcgcatcctgcagttccggctgtacaagaagaagttcaaggagaccctgcggccctatgatgtgaaggatgtgattgagcagtacagcgctggccacctggacatgctgagccgcatcaagtacctgcagaccagaattgacatgatcttcaccccaggcccccccagcacccccaagcacaagaagagccagaagggcagcgccttcaccttccccagccagcagagccccagaaatgagccctacgtggcccggcccagcaccagcgagattgaggaccagagcatgatgggcaagtttgtgaaggtggagcggcaggtgcaggacatgggcaagaagctggacttcctggtggacatgcacatgcagcacatggagcggctgcaggtgcaggtgacagagtactaccccaccaagggcaccagcagccctgctgaggccgagaagaaggaggacaaccgctacagcgacctgaagaccatcatctgcaactacagcgagaccggccccccagagcccccctacagcttccaccaggtgaccatcgacaaggtgagcccctacggcttctttgcccatgaccctgtgaacctgccccggggcggccccagcagcggcaaggtgcaggccaccccacccagcagcgccaccacctacgtggagcggcccaccgtgctgcccatcctgaccctgctggacagccgggtgtcctgccacagccaggccgacctgcagggcccctacagcgaccgcatcagcccccggcagaggaggagcatcacccgggacagcgacacccccctgagcctgatgtctgtgaaccacgaggagctggagaggagccccagcggcttcagcatcagccaggacagagatgattatgtgtttggccccaatggaggcagctcctggatgagggagaagcgctacctggccgagggggagacagacacagacacagaccccttcacccccagcggctccatgcccctgagcagcactggagatggcatcagtgacagcgtgtggacccccagcaacaagcccatctag

SEQ ID NO: 81661 - DNA, 2256 bp, Artificial Sequence
  derived and/or modified sequence
aagcccaagaagcacggccccatgttcctgattgtgctgggctgcctgatcctggccgtgctgaccaccttcaaggagtatgaaacagtgtctggggactggctgctgctgctggagacctttgccatcttcatctttggagctgagtttgccctgcgcatctgggccgccggctgctgctgccgctacaagggctggaggggccgcctgaagtttgccaggaagcccctgtgcatgctggacatctttgtgctgattgcctctgtgcctgtggtggccgtgggcaaccagggcaatgtgctggccaccagcctgcggagcctgcgcttcctgcagatcctgaggatgctgaggatggacagaagaggaggcacctggaagctgctgggcagcgccatctgtgcccacagcaaggagctgatcacagcctggtacatcggcttcctgaccctcatcctgagcagcttcctggtgtacctggtggagaaggatgtgcctgaggtggatgcccagggcgaggagatgaaggaggagtttgagacctatgcagatgccctgtggtggggcctcatcaccctggccaccatcggctacggggacaagacccccaagacctgggagggccgcctgattgctgccaccttcagcctcatcggcgtgtccttctttgccctgcctgctggcatcctgggcagcggcctggccctgaaggtgcaggagcagcaccggcagaagcactttgagaagaggaggaagccagctgctgagctgatccaggccgcctggagatactatgccaccaaccccaacagaattgacctggtggccacctggaggttctatgaatctgtggtgtccttccccttcttcaggaaggagcagctggaggccgccagcagccagaagctgggcctgctggacagagtgcggctgagcaacccccggggcagcaacaccaagggcaagctgttcacccccctgaatgtggatgccatcgaggagagccccagcaaggagcccaagcctgtgggcctgaacaacaaggagcgcttcagaacagccttcaggatgaaggcctatgccttctggcagagcagtgaagatgctggcactggagaccccatggctgaagatcggggctatggaaatgacttccccatcgaggacatgatccccaccctgaaggccgccatccgggctgtgcgcatcctgcagttccggctgtacaagaagaagttcaaggagaccctgcggccctatgatgtgaaggatgtgattgagcagtacagcgctggccacctggacatgctgagccgcatcaagtacctgcagaccagaattgacatgatcttcaccccaggcccccccagcacccccaagcacaagaagagccagaagggcagcgccttcaccttccccagccagcagagccccagaaatgagccctacgtggcccggcccagcaccagcgagattgaggaccagagcatgatgggcaagtttgtgaaggtggagcggcaggtgcaggacatgggcaagaagctggacttcctggtggacatgcacatgcagcacatggagcggctgcaggtgcaggtgacagagtactaccccaccaagggcaccagcagccctgctgaggccgagaagaaggaggacaaccgctacagcgacctgaagaccatcatctgcaactacagcgagactggacctcctgagcccccctacagcttccaccaggtgaccatcgacaaggtgagcccctacggcttctttgcccatgaccctgtgaacctgccccggggcggccccagcagcggcaaggtgcaggccaccccacccagcagcgccaccacctacgtggagcggcccaccgtgctgcccatcctgaccctgctggacagccgggtgtcctgccacagccaggccgacctgcagggcccctacagcgaccgcatcagcccccggcagaggaggagcatcacccgggacagcgacacccccctgagcctgatgtctgtgaaccacgaggagctggagaggagccccagcggcttcagcatcagccaggacagagatgattatgtgtttggccccaacggcggcagctcctggatgagggagaagcgctacctggccgagggggagacagacacagacacagaccccttcaccccatctggctccatgcccctgagcagcactggagatggcatcagtgacagcgtgtggacccccagcaacaagcccatctag

SEQ ID NO: 81662 - DNA, 2259 bp, Artificial Sequence
  derived and/or modified sequence
atgaagcccgccgagcacgccaccatgttcctgatcgtgctgggctgtcttatcctcgctgtgttgactacattcaaggaatatgaaaccgtatccggagattggctgctccttctggagacctttgccatctttatctttggtgccgagtttgccctcaggatttgggctgctggctgttgttgccgctacaaggggtggcggggccgtctgaaatttgcaaggaaacctctgtgcatgctggacatcttcgttctgatcgcgtcagtcccagtggtggccgtgggcaatcagggtaacgtccttgccacttccctccgcagtcttcggttccttcagatattgcgcatgctcaggatggacaggcggggcgggacttggaagctgttgggaagcgccatctgtgcgcattccaaggagctaattactgcatggtacattgggttcttaaccctcatactttcgagctttttggtgtatttggtcgagaaagacgtccctgaggtcgacgcccagggcgaagagatgaaagaagagttcgaaacttacgccgacgctctgtggtggggcctgataactttagctacaatcgggtacggagataagacacccaaaacctgggaagggcgcttaatcgcggctaccttttcgctgattggagtctccttttttgcactgcccgccgggattctgggatccgggctcgcattaaaggtccaggagcagcaccggcaaaaacatttcgaaaaacgccgaaagcccgccgctgaactgatccaagcggcatggcgctattacgcaactaatccgaatcggatcgacctggtcgccacctggagattttacgaatccgtcgtgagcttccccttcttccgcaaagagcagcttgaagcagcgagcagccagaaactcgggctactggacagagtccggctaagtaaccctcggggatcaaataccaaggggaagctatttacacccttgaatgtagatgctatcgaagaaagcccatcaaaggagccgaagcccgtcgggttgaacaacaaggaacggtttagaaccgcattcagaatgaaggcgtacgccttctggcagagttctgaggacgccggcaccggcgatccgatggccgaggataggggatacggaaatgatttcccaatcgaggatatgattcccaccttgaaggccgcaataagagccgtcagaatactgcagttccgactctataagaagaaatttaaagaaactttgaggccatacgacgtgaaggatgtgatagaacagtacagcgccggccatctggatatgctgtcacgtatcaaatatctgcaaacacgcattgacatgatatttacacccggtcctccatcaacccctaagcataagaaatcccagaaaggttcggccttcacctttccctctcaacagagccctagaaacgaaccctacgtggcccgcccctctacctccgaaatcgaggaccagtctatgatgggcaagttcgtcaaagtggagaggcaggtgcaggatatggggaagaagcttgactttctggtcgacatgcatatgcaacacatggagaggctccaggtgcaggtgacagagtactaccccacaaaagggacctcgtctccagctgaggctgaaaaaaaagaggataaccggtatagcgacctgaaaactattatctgtaattattctgaaaccgggccacccgagccaccatacagcttccatcaggtgaccatcgataaggtttccccctacggattcttcgctcatgatccggtgaacttgcctcgtgggggaccatctagcgggaaagttcaagcaacccctccctctagcgcgacaacatacgtggagcgccctacggtcttacccatacttaccctgttagactcccgagtgtcatgtcacagtcaagccgacctgcaggggccatattccgaccgcattagcccacggcaacggagaagtatcaccagagactcagatacccccctgtccttaatgagcgtaaaccacgaggaactggaacggtcaccatctggattcagtattagtcaagatcgggacgactacgtattcggtcctaacggtggatctagttggatgcgggagaaaaggtacttggcggagggggaaacggatacagatactgaccccttcactccttccggaagcatgcctctctccagcactggcgatggaatcagcgatagcgtgtggactccaagtaacaaacccatttag

SEQ ID NO: 81663 - DNA, 2256 bp, Artificial Sequence
  derived and/or modified sequence
aagcccaagaagcacggccccatgttcctgatcgtgctgggctgcctgatcctggcggtactgactacgtttaaagagtatgaaacagtcagcggtgactggcttctcctgctcgaaacatttgcaatctttatattcggagccgagttcgctctccggatctgggctgcaggctgctgctgtcggtacaaaggctggcgtggaagacttaaattcgcaaggaagcccttatgcatgctcgatattttcgtccttattgcatctgtgcccgtggtagctgtcgggaaccagggaaatgtacttgccactagcctgcgctccctccgctttctccagatccttcgcatgctgcggatggaccgcagaggcggtacctggaaattactggggagtgccatctgcgcccattccaaggagctaatcacagcctggtatatagggtttctgacccttatccttagctctttcttggtgtacctggtggagaaagacgttccagaggttgacgcccaaggtgaggaaatgaaggaggagttcgaaacttatgctgacgccctgtggtggggcctcatcacattagccaccattggatatggcgataagaccccaaaaacttgggaaggaaggctcattgctgccactttttcgttaataggcgtctcattttttgccctgccggcaggaatattaggatcaggccttgcactgaaagtgcaggagcagcatagacaaaaacacttcgaaaaaaggcggaaacctgctgcagagctgatacaggcggcctggcgatattatgccacgaaccccaataggatcgacctggtggccacctggagattctatgagagtgtggtgtcattcccattcttccgtaaagagcaactggaagccgcctcaagtcagaaactcggcctcctggatagagtccgtctgtcgaacccgagaggctccaacactaaaggcaaactgtttactccccttaacgttgatgcaatcgaggagagccccagtaaggagcctaaaccagtgggccttaacaacaaagaacgctttagaacggcctttagaatgaaagcttatgccttctggcagtctagtgaagatgccgggacaggggatccgatggccgaagacagaggctatggaaacgactttccaattgaagatatgattcctacccttaaagctgcaatacgagcagtgagaattttacagttccggttgtacaagaagaagtttaaggagactctcaggccgtacgacgttaaagatgtgattgaacagtattctgcgggtcatctggacatgctctctcgaattaagtacttacagactcgtatagatatgatttttaccccggggcccccttccactcccaagcacaaaaaatctcagaagggctcagccttcacattccccagccaacagtctcctcggaacgaaccctacgtcgcaaggcccagcacatcagagattgaggatcagagtatgatggggaagttcgtaaaggtggaaagacaagtgcaggacatgggtaagaagctcgattttttagtagatatgcatatgcaacacatggaaagactgcaggtccaagtgacagaatactaccctacaaagggtacaagctcacccgcggaagctgagaaaaaggaggataaccggtattccgatcttaagaccatcatctgtaactacagcgagacaggacccccagaaccaccctatagctttcatcaggtgacaatcgataaggtgagcccttacgggttcttcgcccatgaccccgttaatctcccacggggggggccaagttctggaaaggttcaggctacgcctccttcaagcgctacaacctacgtagaaagaccaacggtcctcccaatcctaaccctcttggactcccgcgtaagctgtcactcacaagctgacttgcaagggccgtatagcgacagaatttctccacggcagcgcaggtccatcacaagggacagcgatacgcccctgagcctgatgtccgttaatcacgaagaactggaacgaagcccctccgggtttagcatctcacaggaccgcgatgactacgtgtttgggccaaacgggggatcttcctggatgcgtgagaaacgatacctggcagagggagagacggacaccgacacagatcccttcacaccctcaggttccatgcctttgtcttctacgggagacggcattagtgatagtgtgtggacaccctccaacaagccaatatag

SEQ ID NO: 81664 - DNA, 2576 bp, Artificial Sequence
  derived and/or modified sequence
acttgttaaaaatcttgttcttgcattcattaccttatgaagcctgcagaacacgccacgatgttcctgattgtcctggggtgcttgattctggctgtcctgaccacattcaaggagtatgagactgtctcgggagactggcttctgttactggagacatttgctattttcatctttggagccgagtttgctttgaggatctgggctgctggatgttgctgccgatacaaaggctggcggggccgactgaagtttgccaggaagcccctgtgcatgttggacatctttgtgctgattgcctctgtgccagtggttgctgtgggaaaccaaggcaatgttctggccacctccctgcgaagcctgcgcttcctgcagatcctgcgcatgctgcggatggaccggagaggtggcacctggaagcttctgggctcagccatctgtgcccacagcaaagaactcatcacggcctggtacatcggtttcctgacactcatcctttcttcatttcttgtctacctggttgagaaagacgtcccagaggtggatgcacaaggagaggagatgaaagaggagtttgagacctatgcagatgccctgtggtggggcctgatcacactggccaccattggctatggagacaagacacccaaaacgtgggaaggccgtctgattgccgccaccttttccttaattggcgtctccttttttgcccttccagcgggcatcctggggtccgggctggccctcaaggtgcaggagcaacaccgtcagaagcactttgagaaaaggaggaagccagctgctgagctcattcaggctgcctggaggtattatgctaccaaccccaacaggattgacctggtggcgacatggagattttatgaatcagtcgtctcttttcctttcttcaggaaagaacagctggaggcagcatccagccaaaagctgggtctcttggatcgggttcgcctttctaatcctcgtggtagcaatactaaaggaaagctatttacccctctgaatgtagatgccatagaagaaagtccttctaaagaaccaaagcctgttggcttaaacaataaagagcgtttccgcacggccttccgcatgaaagcctacgctttctggcagagttctgaagatgccgggacaggtgaccccatggcggaagacaggggctatgggaatgacttccccatcgaagacatgatccccaccctgaaggccgccatccgagccgtcagaattctacaattccgtctctataaaaaaaaattcaaggagactttgaggccttacgatgtgaaggatgtgattgagcagtattctgccgggcatctcgacatgctttccaggataaagtaccttcagacgagaatagatatgattttcacccctggacctccctccacgccaaaacacaagaagtctcagaaagggtcagcattcaccttcccatcccagcaatctcccaggaatgaaccatatgtagccagaccatccacatcagaaatcgaagaccaaagcatgatggggaagtttgtaaaagttgaaagacaggttcaggacatggggaagaagctggacttcctcgtggatatgcacatgcaacacatggaacggttgcaggtgcaggtcacggagtattacccaaccaagggcacctcctcgccagctgaagcagagaagaaggaggacaacaggtattccgatttgaaaaccatcatctgcaactattctgagacaggccccccggaaccaccctacagcttccaccaggtgaccattgacaaagtcagcccctatgggttttttgcacatgaccctgtgaacctgccccgagggggacccagttctggaaaggttcaggcaactcctccttcctcagcaacaacgtatgtggagaggcccacggtcctgcctatcttgactcttctcgactcccgagtgagctgccactcccaggctgacctgcagggcccctactcggaccgaatctccccccggcagagacgtagcatcacgcgagacagtgacacacctctgtccctgatgtcggtcaaccacgaggagctggagaggtctccaagtggcttcagcatctcccaggacagagatgattatgtgttcggccccaatggggggtcgagctggatgagggagaagcggtacctcgccgagggtgagacggacacagacacggaccccttcacgcccagcggctccatgcctctgtcgtccacaggggatgggatttctgattcagtatggaccccttccaataagcccatttaaaagaggtcactggctgacccctccttgtaatgtagacagactttgtatagttcacttactcttacacccgacgcttaccagcggggacaccaatggctgcatcaaatgcatgcgtgtgcgtggtggccccacccaggcaggggcttcccacagcctcttcctccccatgtcaccacaacaaagtgcttccttttcagcatggtttgcatgactttacactatataaatggttccgctaatctcttctaggatacacatttatctgctgttcttacttttaa

SEQ ID NO: 81665 - DNA, 2256 bp, Artificial Sequence
  derived and/or modified sequence
aagccaaaaaagcatggtcctatgttcctgattgtcctggggtgcttgattctggctgtcctgaccacattcaaggagtatgagactgtctcgggagactggcttctgttactggagacatttgctattttcatctttggagccgagtttgctttgaggatctgggctgctggatgttgctgccgatacaaaggctggcggggccgactgaagtttgccaggaagcccctgtgcatgttggacatctttgtgctgattgcctctgtgccagtggttgctgtgggaaaccaaggcaatgttctggccacctccctgcgaagcctgcgcttcctgcagatcctgcgcatgctgcggatggaccggagaggtggcacctggaagcttctgggctcagccatctgtgcccacagcaaagaactcatcacggcctggtacatcggtttcctgacactcatcctttcttcatttcttgtctacctggttgagaaagacgtcccagaggtggatgcacaaggagaggagatgaaagaggagtttgagacctatgcagatgccctgtggtggggcctgatcacactggccaccattggctatggagacaagacacccaaaacgtgggaaggccgtctgattgccgccaccttttccttaattggcgtctccttttttgcccttccagcgggcatcctggggtccgggctggccctcaaggtgcaggagcaacaccgtcagaagcactttgagaaaaggaggaagccagctgctgagctcattcaggctgcctggaggtattatgctaccaaccccaacaggattgacctggtggcgacatggagattttatgaatcagtcgtctcttttcctttcttcaggaaagaacagctggaggcagcatccagccaaaagctgggtctcttggatcgggttcgcctttctaatcctcgtggtagcaatactaaaggaaagctatttacccctctgaatgtagatgccatagaagaaagtccttctaaagaaccaaagcctgttggcttaaacaataaagagcgtttccgcacggccttccgcatgaaagcctacgctttctggcagagttctgaagatgccgggacaggtgaccccatggcggaagacaggggctatgggaatgacttccccatcgaagacatgatccccaccctgaaggccgccatccgagccgtcagaattctacaattccgtctctataaaaaaaaattcaaggagactttgaggccttacgatgtgaaggatgtgattgagcagtattctgccgggcatctcgacatgctttccaggataaagtaccttcagacgagaatagatatgattttcacccctggacctccctccacgccaaaacacaagaagtctcagaaagggtcagcattcaccttcccatcccagcaatctcccaggaatgaaccatatgtagccagaccatccacatcagaaatcgaagaccaaagcatgatggggaagtttgtaaaagttgaaagacaggttcaggacatggggaagaagctggacttcctcgtggatatgcacatgcaacacatggaacggttgcaggtgcaggtcacggagtattacccaaccaagggcacctcctcgccagctgaagcagagaagaaggaggacaacaggtattccgatttgaaaaccatcatctgcaactattctgagacaggccccccggaaccaccctacagcttccaccaggtgaccattgacaaagtcagcccctatgggttttttgcacatgaccctgtgaacctgccccgagggggacccagttctggaaaggttcaggcaactcctccttcctcagcaacaacgtatgtggagaggcccacggtcctgcctatcttgactcttctcgactcccgagtgagctgccactcccaggctgacctgcagggcccctactcggaccgaatctccccccggcagagacgtagcatcacgcgagacagtgacacacctctgtccctgatgtcggtcaaccacgaggagctggagaggtctccaagtggcttcagcatctcccaggacagagatgattatgtgttcggccccaatggggggtcgagctggatgagggagaagcggtacctcgccgagggtgagacggacacagacacggaccccttcacgcccagcggctccatgcctctgtcgtccacaggggatgggatttctgattcagtatggaccccttccaataagcccatttaa

SEQ ID NO: 81666 - DNA, 2259 bp, Artificial Sequence
  derived and/or modified sequence
atgaaacctgccgaacacgccaccatgtttttaatcgtcctaggctgcctgatactggcagtccttactacatttaaagagtacgagaccgtatctggcgattggctgctgcttctcgagaccttcgccatattcattttcggcgcagaatttgcccttaggatatgggccgctgggtgctgctgcaggtataaggggtggagaggcaggctcaagtttgcccgaaagccgctctgtatgctggatatctttgtcctcatcgcctccgtccctgtggtcgccgttggaaatcagggaaacgtcttggccacgagcctgcgatccctgagattcctgcagatactccggatgttgaggatggaccggagagggggaacctggaagcttctcggcagcgctatctgcgcccacagcaaggaacttatcactgcctggtatataggatttctgacattaatccttagcagttttttagtgtatcttgtggagaaggatgtgcccgaagtggacgcgcaaggcgaagaaatgaaagaagaattcgagacctacgccgatgctttgtggtggggactgataacactcgccaccataggatacggagacaaaacccccaagacatgggaggggaggcttatcgctgctacattcagtctgattggcgtcagcttttttgcactgccagcaggcattctggggagtggtcttgcgctgaaggtccaggaacaacatcggcagaaacacttcgagaagaggcgcaagccggcagccgagctgatccaggcagcctggaggtactacgccacaaaccctaaccgaatagacctggtggccacgtggaggttctacgagtctgtcgtgagtttcccattttttaggaaggagcagttggaggcagccagttctcagaagctgggcctgttggaccgggtccggctgagcaacccacgcggttcaaataccaaaggcaagctgtttaccccgttaaacgtggacgctatagaagaatcccctagtaaggagcctaagccggtaggacttaataataaagagagattcagaaccgcgtttcgtatgaaagcttacgcattttggcaaagttcagaggatgccggaacaggcgatcccatggcggaagatcgcggatatggcaacgatttccctatcgaggatatgatcccaactctcaaagccgcaattcgggctgtgagaatattacaattccgactttacaaaaagaagttcaaggagacactccggccttacgatgtgaaggacgtgattgagcagtacagtgccggacatctcgatatgttgagcaggatcaagtatctgcaaaccaggattgatatgattttcacacctggccctccaagtacccccaaacataaaaaaagccagaaaggctccgcattcacattccccagccaacaatcaccacggaatgagccctacgtcgccagaccatctacatcagaaatagaggaccagagtatgatgggcaagttcgtcaaagtggagcgccaggtacaggacatggggaaaaagctcgacttcctggtggacatgcacatgcagcacatggaaagactccaggtgcaggtcactgaatactacccaaccaaggggacctctagtcctgctgaagctgagaagaaggaagacaacagatattctgatctgaaaactattatctgcaactactctgaaactgggccaccggaaccaccctattcatttcatcaggtcaccattgacaaggtatccccttacggcttctttgctcatgatcccgtcaatctacctcggggagggccaagttccggcaaggtacaggctacgccaccatctagcgccaccacttatgtcgaacggcctactgtcttgcctattctgaccctgctggactcccgggtgtcttgtcactcacaggctgatcttcagggcccatattcagatcggatttcacccaggcagaggaggtctatcactcgcgactctgatactcctctgagtttgatgtctgtgaaccacgaagaactggagagatctccctcaggcttttcaatcagccaagatagggatgactatgtcttcgggccaaacgggggttcctcttggatgcgagaaaagaggtacctggcagagggtgagactgacaccgacacagacccatttacaccctctggaagtatgcccctgagctcaacaggagacggaattagcgactccgtgtggacacctagcaacaaaccaatatag

SEQ ID NO: 81667 - DNA, 2256 bp, Artificial Sequence
  derived and/or modified sequence
aagcctaagaagcatggacctatgtttttgatagtgttgggatgcctcatcctggccgtgctgactaccttcaaggagtacgaaaccgtttccggcgattggcttctgctgctggaaacatttgccatctttattttcggggcagagtttgccctgaggatctgggctgctggatgctgctgtagatataagggatggcgcggaagactgaaatttgcaagaaagcccctgtgtatgcttgacatttttgttctcatcgcgagcgtgcctgtcgtggccgtcgggaatcagggaaacgttctggcgacatccctgcgttctctgagatttttacagattcttaggatgctgcggatggatcgcagaggaggtacttggaagctattaggcagcgcgatctgtgctcatagtaaagagcttatcacagcctggtatatcgggtttctcactttgatcctgtcctccttcctcgtgtacctggtggaaaaagacgtccccgaggtggacgctcagggcgaggagatgaaagaggaattcgaaacctacgcggacgctctgtggtggggattgataacactggcgactatcggttacggcgataagacccccaaaacttgggaagggcgactgattgccgcaacatttagtctgattggggtctcattttttgcactgccggcaggaattttaggtagtggactcgctctcaaagttcaggagcagcaccggcagaaacactttgagaaacgtagaaagcccgcagcggagttaatccaggcagcttggcgctattacgccaccaaccccaatcgcattgacctcgtggccacctggcgattctacgagagcgtggtatcttttcctttttttcgtaaggagcaacttgaggctgcctcgagtcagaaactggggctcctcgacagggtacgtttatcaaatccaaggggttccaatactaaaggtaaactgtttacaccgttgaatgtggacgctattgaagaaagccccagcaaggagccaaagcccgtgggactgaataacaaagagcggttccggaccgcctttcgtatgaaggcatatgccttttggcagtcttcagaggatgccggtaccggcgatcctatggcagaggatagaggctatggaaatgatttcccgatcgaggatatgatccctaccctgaaggccgctattcgggctgtacggattctgcagtttcgtttgtacaaaaaaaagttcaaggagaccctgcgaccttacgacgtgaaggatgtaattgagcagtattctgcagggcacctggacatgctgtcacgcattaaatatctgcagactcggattgacatgatctttacccctgggccaccatcaactccgaagcataaaaaaagccagaaaggctctgcttttacttttcctagccagcagtcacctaggaacgaaccttacgttgccagaccctctacaagcgaaattgaggatcagtcaatgatgggaaaattcgtaaaggtcgaaaggcaggtccaggatatggggaaaaagcttgactttctggttgacatgcacatgcagcacatggaaagattgcaggtccaggtgaccgaatattatcctaccaaaggtacatcatctcccgcagaggccgagaagaaggaggataatcggtattccgacctcaagaccataatctgtaactactctgagaccggtcctccggagccaccatattcatttcaccaagtaacaatcgataaagttagcccttatggtttctttgcccatgaccccgtgaatctccctcgcggtgggccttcttccggaaaagtgcaagccactccaccttcaagcgccacgacatacgtcgagcgccctactgtgttgcctattctgacattgctcgactctcgggtgtcatgccactcgcaagccgaccttcaagggccatacagcgacaggataagtcccagacaacgcagaagcataactcgagacagcgatacccccctgagccttatgagcgtcaaccacgaggagctggaacggtccccaagtggcttcagtatcagtcaggaccgggatgactacgtttttggccctaacgggggatccagctggatgcgcgagaagagatatttagctgaaggagagaccgatacagataccgatccgtttacaccctcggggagtatgcccttaagctccaccggggatggaatctccgacagcgtttggacgccatcgaacaagcctatttag

SEQ ID NO: 81668 - DNA, 2259 bp, Artificial Sequence
  derived and/or modified sequence
atgaagcccgccgagcacgccaccatgttcctgatcgtgctgggctgcctgatcctggccgtgctgaccaccttcaaggagtacgagaccgtgagcggcgactggctgctgctgctggagaccttcgccatcttcatcttcggcgccgagttcgccctgagaatctgggccgccggctgctgctgcagatacaagggctggagaggcagactgaagttcgccagaaagcccctgtgcatgctggacatcttcgtgctgatcgccagcgtgcccgtggtggccgtgggcaaccagggcaacgtgctggccaccagcctgagaagcctgagattcctgcagatcctgagaatgctgagaatggacagaagaggcggcacctggaagctgctgggcagcgccatctgcgcccacagcaaggagctgatcaccgcctggtacatcggcttcctgaccctgatcctgagcagcttcctggtgtacctggtggagaaggacgtgcccgaggtggacgcccagggcgaggagatgaaggaggagttcgagacctacgccgacgccctgtggtggggcctgatcaccctggccaccatcggctacggcgacaagacccccaagacctgggagggcagactgatcgccgccaccttcagcctgatcggcgtgagcttcttcgccctgcccgccggcatcctgggcagcggcctggccctgaaggtgcaggagcagcacagacagaagcacttcgagaagagaagaaagcccgccgccgagctgatccaggccgcctggagatactacgccaccaaccccaacagaatcgacctggtggccacctggagattctacgagagcgtggtgagcttccccttcttcagaaaggagcagctggaggccgccagcagccagaagctgggcctgctggacagagtgagactgagcaaccccagaggcagcaacaccaagggcaagctgttcacccccctgaacgtggacgccatcgaggagagccccagcaaggagcccaagcccgtgggcctgaacaacaaggagagattcagaaccgccttcagaatgaaggcctacgccttctggcagagcagcgaggacgccggcaccggcgaccccatggccgaggacagaggctacggcaacgacttccccatcgaggacatgatccccaccctgaaggccgccatcagagccgtgagaatcctgcagttcagactgtacaagaagaagttcaaggagaccctgagaccctacgacgtgaaggacgtgatcgagcagtacagcgccggccacctggacatgctgagcagaatcaagtacctgcagaccagaatcgacatgatcttcacccccggcccccccagcacccccaagcacaagaagagccagaagggcagcgccttcaccttccccagccagcagagccccagaaacgagccctacgtggccagacccagcaccagcgagatcgaggaccagagcatgatgggcaagttcgtgaaggtggagagacaggtgcaggacatgggcaagaagctggacttcctggtggacatgcacatgcagcacatggagagactgcaggtgcaggtgaccgagtactaccccaccaagggcaccagcagccccgccgaggccgagaagaaggaggacaacagatacagcgacctgaagaccatcatctgcaactacagcgagaccggcccccccgagcccccctacagcttccaccaggtgaccatcgacaaggtgagcccctacggcttcttcgcccacgaccccgtgaacctgcccagaggcggccccagcagcggcaaggtgcaggccaccccccccagcagcgccaccacctacgtggagagacccaccgtgctgcccatcctgaccctgctggacagcagagtgagctgccacagccaggccgacctgcagggcccctacagcgacagaatcagccccagacagagaagaagcatcaccagagacagcgacacccccctgagcctgatgagcgtgaaccacgaggagctggagagaagccccagcggcttcagcatcagccaggacagagacgactacgtgttcggccccaacggcggcagcagctggatgagagagaagagatacctggccgagggcgagaccgacaccgacaccgaccccttcacccccagcggcagcatgcccctgagcagcaccggcgacggcatcagcgacagcgtgtggacccccagcaacaagcccatctag

SEQ ID NO: 81669 - DNA, 2256 bp, Artificial Sequence
  derived and/or modified sequence
aagcccaagaagcacggccccatgttcctgatcgtgctgggctgcctgatcctggccgtgctgaccaccttcaaggagtacgagaccgtgagcggcgactggctgctgctgctggagaccttcgccatcttcatcttcggcgccgagttcgccctgagaatctgggccgccggctgctgctgcagatacaagggctggagaggcagactgaagttcgccagaaagcccctgtgcatgctggacatcttcgtgctgatcgccagcgtgcccgtggtggccgtgggcaaccagggcaacgtgctggccaccagcctgagaagcctgagattcctgcagatcctgagaatgctgagaatggacagaagaggcggcacctggaagctgctgggcagcgccatctgcgcccacagcaaggagctgatcaccgcctggtacatcggcttcctgaccctgatcctgagcagcttcctggtgtacctggtggagaaggacgtgcccgaggtggacgcccagggcgaggagatgaaggaggagttcgagacctacgccgacgccctgtggtggggcctgatcaccctggccaccatcggctacggcgacaagacccccaagacctgggagggcagactgatcgccgccaccttcagcctgatcggcgtgagcttcttcgccctgcccgccggcatcctgggcagcggcctggccctgaaggtgcaggagcagcacagacagaagcacttcgagaagagaagaaagcccgccgccgagctgatccaggccgcctggagatactacgccaccaaccccaacagaatcgacctggtggccacctggagattctacgagagcgtggtgagcttccccttcttcagaaaggagcagctggaggccgccagcagccagaagctgggcctgctggacagagtgagactgagcaaccccagaggcagcaacaccaagggcaagctgttcacccccctgaacgtggacgccatcgaggagagccccagcaaggagcccaagcccgtgggcctgaacaacaaggagagattcagaaccgccttcagaatgaaggcctacgccttctggcagagcagcgaggacgccggcaccggcgaccccatggccgaggacagaggctacggcaacgacttccccatcgaggacatgatccccaccctgaaggccgccatcagagccgtgagaatcctgcagttcagactgtacaagaagaagttcaaggagaccctgagaccctacgacgtgaaggacgtgatcgagcagtacagcgccggccacctggacatgctgagcagaatcaagtacctgcagaccagaatcgacatgatcttcacccccggcccccccagcacccccaagcacaagaagagccagaagggcagcgccttcaccttccccagccagcagagccccagaaacgagccctacgtggccagacccagcaccagcgagatcgaggaccagagcatgatgggcaagttcgtgaaggtggagagacaggtgcaggacatgggcaagaagctggacttcctggtggacatgcacatgcagcacatggagagactgcaggtgcaggtgaccgagtactaccccaccaagggcaccagcagccccgccgaggccgagaagaaggaggacaacagatacagcgacctgaagaccatcatctgcaactacagcgagaccggcccccccgagcccccctacagcttccaccaggtgaccatcgacaaggtgagcccctacggcttcttcgcccacgaccccgtgaacctgcccagaggcggccccagcagcggcaaggtgcaggccaccccccccagcagcgccaccacctacgtggagagacccaccgtgctgcccatcctgaccctgctggacagcagagtgagctgccacagccaggccgacctgcagggcccctacagcgacagaatcagccccagacagagaagaagcatcaccagagacagcgacacccccctgagcctgatgagcgtgaaccacgaggagctggagagaagccccagcggcttcagcatcagccaggacagagacgactacgtgttcggccccaacggcggcagcagctggatgagagagaagagatacctggccgagggcgagaccgacaccgacaccgaccccttcacccccagcggcagcatgcccctgagcagcaccggcgacggcatcagcgacagcgtgtggacccccagcaacaagcccatctag

SEQ ID NO: 81670 - protein, 627 aa, Artificial Sequence
  derived and/or modified sequence
MKVTLSALDTSESSFTPLVVIELAQDVKEETKEWLKNRIIAKKKDGGAQLLFRPLLNKYEQETLENQNLYLVGASKIRMLLGAEAVGLVKECNDNTMRAFTYRTRQNFKGFDDNNDDFLTMAECQFIIKHELENLRAKDEKMIPGYPQAKLYPGKSLLRRLLTSGIVIQVFPLHDSEALKKLEDTWYTRFALKYQPIDSIRGYFGETIALYFGFLEYFTFALIPMAVIGLPYYLFVWEDYDKYVIFASFNLIWSTVILELWKRGCANMTYRWGTLLMKRKFEEPRPGFHGVLGINSITGKEEPLYPSYKRQLRIYLVSLPFVCLCLYFSLYVMMIYFDMEVWALGLHENSGSEWTSVLLYVPSIIYAIVIEIMNRLYRYAAEFLTSWENHRLESAYQNHLILKVLVFNFLNCFASLFYIAFVLKDMKLLRQSLATLLITSQILNQIMESFLPYWLQRKHGVRVKRKVQALKADIDATLYEQVILEKEMGTYLGTFDDYLELFLQFGYVSLFSCVYPLAAAFAVLNNFTEVNSDALKMCRVFKRPFSEPSANIGVWQLAFETMSVISVVTNCALIGMSPQVNAVFPESKADLILIVVAVEAASCKLVSLPRYSWSTNSVPGTVIGPGV

SEQ ID NO: 81671 - DNA, 1884 bp, Artificial Sequence
  derived and/or modified sequence
atgaaggtgaccttgagtgctctggacactagtgagtccagctttaccccactggttgtgattgagctggcgcaggatgtcaaagaagagacaaaggaatggctgaaaaatcgcatcatcgcaaagaagaaggatgggggcgcccaactcttgtttcgacctctcctgaacaagtatgaacaagaaacactggaaaatcaaaacctgtaccttgtcggggccagtaaaatccgcatgcttctgggcgcagaagctgtggggttagtgaaggaatgtaacgacaacactatgcgggcttttacatacaggacccggcaaaattttaaaggcttcgacgacaacaacgatgacttcctgacaatggccgaatgccagttcatcattaagcatgagcttgaaaatctgcgcgcaaaagatgaaaaaatgattcctggttacccccaggctaaactatacccaggcaagtcccttctgaggcgattgctgacaagcggaattgtgatacaggtttttcccctccacgacagcgaagctttgaagaagttagaagacacatggtacaccagattcgcactgaagtatcagcctatcgactcaatcagaggctattttggggagaccattgcactctatttcggatttcttgagtacttcacttttgccctaatccccatggccgttatcgggctcccgtattatttgttcgtgtgggaggactatgacaaatatgtgatcttcgccagtttcaatctgatctggtccactgtgatacttgagctttggaaacggggctgtgccaacatgacgtatcggtggggtaccttactgatgaagcggaagttcgaagagccgcgccccggattccacggtgtcctggggataaattctattacaggaaaagaggaaccgttatacccgagctataagcgacagctgcgtatatacctggtttccctgcctttcgtttgcctttgcctgtatttcagtctgtatgtgatgatgatttacttcgacatggaggtgtgggccctgggcctccacgagaactcagggtcagagtggacttcagtcctactctatgttccaagcattatctatgctattgtaatagaaattatgaatcgtctttaccggtatgccgctgaattcctcacttcatgggagaaccaccggcttgaatccgcctaccagaatcacttaatcctgaaagtgttggtgtttaactttctaaattgcttcgcctcactgttctatattgcgttcgtgttgaaggatatgaagcttctgagacagtccttggctactcttttgatcacttcgcagatcctcaaccagattatggaatcctttcttccctactggttacagcgaaaacatggagttcgcgtaaagcgaaaagttcaggctctcaaggctgatatcgacgcaacactttacgaacaggtaatcctggagaaagagatgggcacatatcttggaacctttgatgactatctggaattatttttgcagttcggctatgtctcgctgttttcctgcgtgtaccctctcgccgccgcttttgcggtccttaataacttcacagaggtgaattccgatgcacttaaaatgtgtcgcgtgttcaagagacctttctctgaaccttctgcaaatattggggtatggcaactcgcctttgagacgatgtcagtcatttccgtggtgaccaactgcgcgctcataggaatgagcccccaagtgaatgccgtattcccagagagtaaggctgatttaattctgattgtggtggcagttgaagctgctagctgcaaacttgtaagcctccccagatattcctggagcacaaacagtgtgcccggaaccgtgatcggcccgggagtttag

SEQ ID NO: 81672 - DNA, 1884 bp, Artificial Sequence
  derived and/or modified sequence
atgaaggtgaccctgagcgccctggacaccagcgagagcagcttcacccccctggtggtgattgagctggcccaggatgtgaaggaggagaccaaggagtggctgaagaaccgcatcatcgccaagaagaaggatggaggagcccagctgctcttccggcccctgctgaacaagtatgagcaggagaccctggagaaccagaacctgtacctggtgggcgccagcaagatccgcatgctgctgggcgctgaggccgtgggcctggtgaaggaatgtaatgacaacaccatgagggccttcacctaccgcacccggcagaacttcaagggctttgatgacaacaatgatgacttcctgaccatggccgagtgccagttcatcatcaagcatgagctggagaacctgcgggccaaggatgagaagatgatccctggctacccccaggccaagctgtacccaggcaagagcctgctgcggcggctgctgaccagcggcatcgtcatccaggtgttccccctgcatgacagcgaggccctgaagaagctggaggacacctggtacaccaggtttgccctgaagtaccagcccatcgacagcatccggggctactttggagagaccatcgccctgtacttcggcttcctggagtacttcacctttgccctgatccccatggccgtcatcggcctgccctactacctgtttgtgtgggaggactatgacaagtatgtgatctttgccagcttcaacctgatctggagcaccgtcatcctggagctgtggaagaggggctgtgccaacatgacctaccgctggggcaccctgctgatgaagaggaagtttgaggagccccggcccggcttccatggagtgctgggcatcaacagcatcaccgggaaggaggagcccctgtaccccagctacaagaggcagctgcgcatctacctggtgtccctgccctttgtgtgcctgtgcctgtacttcagcctgtatgtgatgatgatctactttgacatggaggtgtgggccctgggcctgcacgagaacagcggcagcgagtggacctctgtgctgctgtatgtgcccagcatcatctatgccatcgtcatcgagatcatgaaccggctgtaccgctatgctgctgagttcctgacctcctgggagaaccaccggctggagagcgcctaccagaaccacctgatcctgaaggtgctggtgttcaacttcctgaactgctttgccagcctcttctacatcgcctttgtgctgaaggacatgaagctgctgcggcagagcctggccaccctgctgatcaccagccagatcctgaaccagatcatggagagcttcctgccctactggctgcagaggaagcatggagtgcgggtgaagaggaaggtgcaggccctgaaggctgacattgatgccaccctgtatgagcaggtgatcctggagaaggagatgggcacctacctgggcacctttgatgactacctggagctgttcctgcagtttggctacgtgtccctcttcagctgtgtgtaccccctggccgccgcctttgctgtgctgaacaacttcacagaggtgaacagtgatgccctgaagatgtgcagggtcttcaagaggcccttcagcgagcccagcgccaacatcggcgtgtggcagctggcctttgagaccatgtctgtcatctctgtggtgaccaactgtgccctgattggcatgagcccccaggtgaatgctgtgtttcctgagagcaaggctgacctgatcctgattgtggtggccgtggaggccgccagctgcaagctggtgtccctgccccgctacagctggagcaccaacagcgtgcccggcaccgtgattggccctggggtgtag

SEQ ID NO: 81673 - DNA, 1884 bp, Artificial Sequence
  derived and/or modified sequence
atgaaggtgaccctgagcgccctggacaccagcgagagcagcttcacccccctggtggtgatcgagctggctcaggatgtcaaggaagagaccaaggagtggctcaagaaccgtatcatagcgaaaaagaaggatggtggagcacagctccttttccggccactcttaaataagtatgaacaagaaactctggagaatcaaaatctatatttggtgggtgcatctaaaatccgtatgctcctgggggctgaggcagttggcctggtgaaggagtgtaacgacaacaccatgcgcgcgtttacctatcgaacacgccaaaacttcaagggctttgatgataacaatgacgactttctgacaatggcagaatgtcagttcatcatcaagcacgaactggaaaatctgcgggccaaggatgagaagatgatcccaggataccctcaggccaaactttatcctgggaagagtcttctcaggcgactgctgacttccggcatcgtgattcaagttttcccgctccacgattccgaggccctgaaaaagctcgaggacacatggtatacgcgattcgccctgaaatatcagcctattgacagtatccgtgggtacttcggagagactattgctttgtacttcggctttttggaatatttcacattcgctcttatccctatggccgtgattggtctgccgtactatcttttcgtgtgggaggattacgacaagtacgttatctttgcttccttcaaccttatctggagcacagtgattctcgaattgtggaaacgagggtgcgccaacatgacttaccgctgggggactctgctgatgaagcgcaaatttgaggaaccacggcccggattccacggcgtgctcggaattaattccatcacaggtaaggaagagccgttatacccctcatacaaaaggcaactccggatctacctcgtgagtctcccctttgtgtgtctctgtctctacttttccctctacgtgatgatgatctacttcgacatggaggtttgggccctgggcctgcacgaaaactcaggttccgagtggacatcggtgctcctttatgtaccaagcattatttatgccattgtaattgaaataatgaatcggctttacaggtacgctgcggagttcctgacctcttgggagaaccatcgcctggagtcagcctatcagaaccacctgattctaaaggtgctagtgtttaattttctgaattgttttgctagcttattctacattgcttttgttctaaaagatatgaagcttttgaggcagtctttagctacactcctgattaccagtcagatcttaaaccaaatcatggaatcctttctaccgtactggctgcaaaggaaacacggggtgagggtgaagagaaaggtacaggctttgaaagccgacatcgacgccacactgtacgagcaggtgattctggaaaaagagatgggcacatacctaggtacctttgacgattatctcgaactatttctgcaatttggatatgtctctctcttctcctgcgtgtatccattagctgccgccttcgcagtgctgaacaactttacagaggtcaattcagatgcgctcaaaatgtgccgagtgtttaaacgtccttttagcgagccatcggcgaacattggagtgtggcagctggcttttgagactatgagtgtcatcagtgtagttacaaactgcgcactcattggcatgtcgccacaggtcaacgccgtcttccccgaaagtaaggctgacctgatactcatcgtcgtcgccgtggaggctgcctcgtgcaaactggtctcactgcctcgttatagctggagtaccaattcagtgcctggcactgttatcgggccaggtgtttag

SEQ ID NO: 81674 - DNA, 1884 bp, Artificial Sequence
  derived and/or modified sequence
atgaaagttactttgtccgctcttgacaccagtgagtccagcttcacccctctggtggttatcgaactggcccaggatgtgaaagaagaaactaaagaatggctgaaaaaccgcattattgccaagaagaaggatgggggtgctcagctcctgttccgacctctgttgaataagtatgagcaggagacactggaaaatcaaaacctgtacctcgttggagctagtaaaattcggatgcttctgggcgctgaggcagttggactggtgaaagagtgcaacgacaacacaatgcgggctttcacgtataggaccagacagaattttaagggtttcgacgacaataacgacgactttttgaccatggcagagtgccagtttatcattaagcacgagctcgagaacctgagggcaaaagatgaaaagatgataccaggatacccgcaggccaagctgtatcctgggaaaagtttactgagaagactgctgacatcaggtatagtgattcaggtatttcccttgcacgattccgaagccctgaaaaagctggaagatacatggtatactaggtttgccttgaagtatcagcccatcgatagcataaggggctactttggcgagacaatcgctctgtattttggatttttggagtattttacttttgccttaatacccatggcagtcataggactaccctattatctgtttgtgtgggaggattatgacaaatatgttatctttgcttcatttaacttgatctggtcaaccgtaattctggagctatggaaacggggatgcgctaatatgacttacagatggggcaccctgttgatgaaacggaaatttgaggagccgcgaccaggttttcacggggttttgggaatcaatagcataacgggcaaggaggaaccgctgtatccatcctataagagacagctaaggatttacttggttagcctgcccttcgtgtgtctgtgtctctacttctcactctatgtcatgatgatatacttcgacatggaagtttgggccttaggactgcacgaaaattctggttctgagtggacatctgtgctgctgtatgtccccagtattatttatgccattgtgatagaaatcatgaaccgactgtaccgatatgccgcagaattcctgacttcgtgggagaatcatagactggaatcagcgtaccagaatcacctgatcttgaaagtgttggtgtttaattttcttaactgttttgcttcgctgttttacattgccttcgtgctgaaggatatgaagctgcttcggcagagcctcgccaccctgctgataaccagtcagattttgaatcaaattatggagtccttccttccgtactggcttcagcggaaacatggtgttcgcgtgaagcggaaagttcaggctctgaaagcggatatcgatgccaccctgtatgagcaggtaattttggagaaagaaatggggacttacctggggactttcgacgactacctggaacttttcctccagttcggatatgtgagccttttttcctgtgtttaccccctggctgccgcttttgccgtcctcaataattttacagaagttaattccgatgctctgaaaatgtgccgcgtctttaagaggcctttcagtgagccctcggctaacattggcgtttggcagctcgctttcgaaactatgagtgtcattagtgtcgtgacaaattgtgccctcattggcatgtcccctcaggtgaatgccgtcttccccgagtccaaagccgacttgattcttattgtagtcgcggtggaagccgctagctgcaaactggtttcactgcctcggtatagctggtctacgaattctgtgcctggtacggtgattggtccaggcgtgtag

SEQ ID NO: 81675 - DNA, 2450 bp, Artificial Sequence
  derived and/or modified sequence
actggcctggcccgccccccgcaccgagcactctttcgcccggcctccggttctcgccggctctcggacccgcctccgaagacgtggagcgctgcggcggctgatttgtcaaagatgaaagtgaccttatcagctttggatacttctgagagttctttcacacctttggtggtcatagaacttgctcaggatgtcaaagaagaaaccaaagaatggctgaaaaacagaattatagctaaaaaaaaagatggaggtgcccagttgttgtttagaccattgttaaataaatatgaacaagaaacactagaaaatcagaacttatatcttgttggtgcctccaagattagaatgttactaggggcagaagcagtgggattggtaaaagagtgcaatgataacaccatgagagccttcacatacagaaccagacagaacttcaaaggttttgatgataacaatgatgatttcctgacaatggcagaatgtcaattcattatcaaacatgaacttgaaaatcttagagctaaagatgaaaaaatgatccctggttaccctcaggcaaagttgtatccaggaaaatcattgttgagaagattgctcacgtctggcatcgtgattcaggtgtttccactgcatgacagtgaagccctgaagaagcttgaggacacctggtacactcggtttgctttgaagtatcagcccatagacagtattcgtggctactttggggaaacaattgctctgtactttggatttttggagtatttcacttttgcattaatccccatggctgtcattgggttaccttactacttgtttgtgtgggaagactatgacaagtacgtgatctttgcctcgttcaacctcatctggtccacggtgattctggaactgtggaagcgtggctgtgccaacatgacctacaggtgggggacactgctcatgaagagaaagtttgaggagccccggccaggatttcatggtgtcttgggtatcaattccatcactgggaaggaggagcctctgtaccccagctacaagagacagttgcgcatttacctggtctccctgccattcgtgtgcctctgcctctatttctcactgtatgtcatgatgatttacttcgacatggaggtttgggccttgggtctacatgagaacagcgggtctgagtggaccagtgtcctgttgtatgtgcccagcatcatctatgccattgtgattgagatcatgaatcgtctctatcgatatgctgccgagtttttaacttcatgggagaatcacagattggaatctgcctatcagaaccatctaattctgaaagttttagtgttcaacttcctcaattgctttgcctcactcttctatattgcctttgtcttgaaagatatgaagcttttgcgccagagcttggccactctcctaattacctcccagatcctcaaccaaattatggaatcttttcttccttattggctccaaaggaagcatggtgtgcgggtgaagaggaaggtgcaggctttaaaggcagacattgatgctacattatatgaacaagtcatcctggaaaaagaaatgggaacttatttgggcacctttgatgattacttggagttattcctgcagtttggttatgtgagccttttctcctgtgtttacccattagcagctgcctttgctgtgttaaataacttcactgaagtaaattcagatgccttaaaaatgtgcagggtcttcaaacgtccattctcagaaccttcagccaatattggtgtgtggcagttggcttttgaaacgatgagtgttatatctgtggtcactaactgtgcgctgattggaatgtcaccacaagtgaatgcagtctttccagaatcaaaagcagacctcattttgattgtagtagcagtggaggctgcaagctgcaagctggtctctcttccacggtattcatggagcaccaactcagtgccaggcactgtcataggtcctggggtctagtcatggccctgctctctggagaccacataccagcaaatgaagctcgtgaccgagaacctgaaggaggaaccaatggaaagcgggaaggagaaggcaacctgagtgcccagcgtgcccagctgccctgttggcagaggcctgtgtctgtgccacacctgccacggtggcagggggggtacccggggcagcatcgtggctcctgaacccagacccaatgcttagccaaacgaagtggctcccatgtggcaagcacccttctcagtttcgcagtggcttggctcgggatccttggcagttcccccagccccaccctgtctgctccttcccagttccttcccgggccccacacgctgctccagctgccaactttgctgcagagccactgccgcccttgagcctctcaccatgagtgagccaccagctctccacgttcccctcatagcagtgtcact

SEQ ID NO: 81676 - DNA, 1884 bp, Artificial Sequence
  derived and/or modified sequence
atgaaggtgaccctgagcgccctggacaccagcgagagcagcttcacccccctggtggtgatcgagctggcccaggacgtgaaggaggagaccaaggagtggctgaagaacagaatcatcgccaagaagaaggacggcggcgcccagctgctgttcagacccctgctgaacaagtacgagcaggagaccctggagaaccagaacctgtacctggtgggcgccagcaagatcagaatgctgctgggcgccgaggccgtgggcctggtgaaggagtgcaacgacaacaccatgagagccttcacctacagaaccagacagaacttcaagggcttcgacgacaacaacgacgacttcctgaccatggccgagtgccagttcatcatcaagcacgagctggagaacctgagagccaaggacgagaagatgatccccggctacccccaggccaagctgtaccccggcaagagcctgctgagaagactgctgaccagcggcatcgtgatccaggtgttccccctgcacgacagcgaggccctgaagaagctggaggacacctggtacaccagattcgccctgaagtaccagcccatcgacagcatcagaggctacttcggcgagaccatcgccctgtacttcggcttcctggagtacttcaccttcgccctgatccccatggccgtgatcggcctgccctactacctgttcgtgtgggaggactacgacaagtacgtgatcttcgccagcttcaacctgatctggagcaccgtgatcctggagctgtggaagagaggctgcgccaacatgacctacagatggggcaccctgctgatgaagagaaagttcgaggagcccagacccggcttccacggcgtgctgggcatcaacagcatcaccggcaaggaggagcccctgtaccccagctacaagagacagctgagaatctacctggtgagcctgcccttcgtgtgcctgtgcctgtacttcagcctgtacgtgatgatgatctacttcgacatggaggtgtgggccctgggcctgcacgagaacagcggcagcgagtggaccagcgtgctgctgtacgtgcccagcatcatctacgccatcgtgatcgagatcatgaacagactgtacagatacgccgccgagttcctgaccagctgggagaaccacagactggagagcgcctaccagaaccacctgatcctgaaggtgctggtgttcaacttcctgaactgcttcgccagcctgttctacatcgccttcgtgctgaaggacatgaagctgctgagacagagcctggccaccctgctgatcaccagccagatcctgaaccagatcatggagagcttcctgccctactggctgcagagaaagcacggcgtgagagtgaagagaaaggtgcaggccctgaaggccgacatcgacgccaccctgtacgagcaggtgatcctggagaaggagatgggcacctacctgggcaccttcgacgactacctggagctgttcctgcagttcggctacgtgagcctgttcagctgcgtgtaccccctggccgccgccttcgccgtgctgaacaacttcaccgaggtgaacagcgacgccctgaagatgtgcagagtgttcaagagacccttcagcgagcccagcgccaacatcggcgtgtggcagctggccttcgagaccatgagcgtgatcagcgtggtgaccaactgcgccctgatcggcatgagcccccaggtgaacgccgtgttccccgagagcaaggccgacctgatcctgatcgtggtggccgtggaggccgccagctgcaagctggtgagcctgcccagatacagctggagcaccaacagcgtgcccggcaccgtgatcggccccggcgtgtag

SEQ ID NO: 81677 - protein, 594 aa, Artificial Sequence
  derived and/or modified sequence
MKVTLSALDTSESSFTPLVVIELAQDVKEETKEWLKNRIIAKKKDGDNNDDFLTMAECQFIIKHELENLRAKDEKMIPGYPQAKLYPGKSLLRRLLTSGIVIQVFPLHDSEALKKLEDTWYTRFALKYQPIDSIRGYFGETIALYFGFLEYFTFALIPMAVIGLPYYLFVWEDYDKYVIFASFNLIWSTVILELWKRGCANMTYRWGTLLMKRKFEEPRPGFHGVLGINSITGKEEPLYPSYKRQLRIYLVSLPFVCLCLYFSLYVMMIYFDMEVWALGLHENSGSEWTSVLLYVPSIIYAIVIEIMNRLYRYAAEFLTSWENHRLESAYQNHLILKVLVFNFLNCFASLFYIAFVLKDMKLLRQSLATLLITSQILNQIMESFLPYWLQRKHGVRVKRKVQALKADIDATLYEQVILEKEMGTYLGTFDDYLELFLQFGYVSLFSCVYPLAAAFAVLNNFTEVNSDALKMCRVFKRPFSEPSANIGVWQLAFETMSVISVVTNCALIGMSPQVNAVFPESKADLILIVVAVEHALLALKFILAFAIPDKPRHIQMKLARLEFESLEALKQQQMKLVTENLKEEPMESGKEKAT

SEQ ID NO: 81678 - DNA, 1785 bp, Artificial Sequence
  derived and/or modified sequence
atgaaagttacgctgagcgctctagacacttctgaatcttcatttactcccctcgtagtgatagagttggctcaggatgtgaaggaggagacaaaggagtggctgaagaataggatcattgcaaagaagaaggacggagacaacaacgatgacttcttgacaatggccgaatgccagttcatcatcaagcacgagctggaaaatctaagggcgaaagacgagaaaatgatacctgggtacccacaagccaagctgtatccagggaagagtttactcaggcgcctcctgacctctggcatagtaatccaggtttttcctctgcacgatagcgaagctctgaaaaaactggaggacacctggtatacccgctttgccctcaagtaccagccgatcgattcgatcaggggatacttcggtgaaaccatcgctctgtacttcggctttctcgagtacttcacctttgccttgatacctatggcagttatcggtctgccttactatctattcgtctgggaagattacgataagtatgtaatatttgcttcctttaatttaatctggtcaaccgtgatcctggagctgtggaaacgcggctgtgctaacatgacgtatcgttggggcactctcctgatgaagcgtaaattcgaggaacctcgcccaggctttcatggtgttctgggaatcaattccattaccggcaaggaggagcctctgtacccctcctataaaaggcaactccgaatctacctcgtatccctgcctttcgtgtgtctgtgcctgtatttcagcctctatgttatgatgatttattttgacatggaagtctgggccctaggcttgcatgagaattcagggtccgagtggacctcagtgctattgtatgtgccaagcattatctacgccatcgtcatcgaaattatgaatagactttaccggtacgctgctgaattccttacgagctgggagaaccatcggttagaatcagcttaccagaatcacctcattcttaaggttctggtgtttaacttcctcaactgttttgcttctttattttatattgcgtttgttctgaaggacatgaaattgctgagacagagcctcgcaaccctgctcataacttcacagatattgaatcagataatggaatcctttcttccctactggctgcagaggaaacatggtgtgagggtgaaaagaaaggtccaggccttgaaagcggatatcgatgcgacactgtatgagcaggtcatattagaaaaggagatgggtacgtatctcgggactttcgacgactacctggagctttttctccaatttggatacgtctccttgtttagttgtgtctaccccttggccgccgctttcgcagtgctaaataacttcacagaggtcaactctgatgcactcaagatgtgccgggtcttcaagcgtcccttctccgagccgtccgctaatattggagtttggcagctcgcattcgaaacaatgagcgtgatctccgtggtcactaactgcgctctgatcggcatgtccccacaggtgaatgctgtgtttcccgagtccaaagcagacctgatcctgattgtggtggccgtcgagcatgcccttctcgcactcaagtttatactggccttcgccatcccagacaagccaagacacatccagatgaagcttgccagattggaatttgaaagcctagaagctctgaagcagcagcagatgaagctggtcaccgagaatcttaaggaggagccaatggaatctgggaaggaaaaggccacctag

SEQ ID NO: 81679 - DNA, 1785 bp, Artificial Sequence
  derived and/or modified sequence
atgaaggtgaccctgagcgccctggacaccagcgagagcagcttcacccccctggtggtgattgagctggcccaggatgtgaaggaggagaccaaggagtggctgaagaaccgcatcatcgccaagaagaaggatggagacaacaatgatgacttcctgaccatggccgagtgccagttcatcatcaagcatgagctggagaacctgcgggccaaggatgagaagatgatccctggctacccccaggccaagctgtacccaggcaagagcctgctgcggcggctgctgaccagcggcatcgtcatccaggtgttccccctgcatgacagcgaggccctgaagaagctggaggacacctggtacaccaggtttgccctgaagtaccagcccatcgacagcatccggggctactttggagagaccatcgccctgtacttcggcttcctggagtacttcacctttgccctgatccccatggccgtcatcggcctgccctactacctgtttgtgtgggaggactatgacaagtatgtgatctttgccagcttcaacctgatctggagcaccgtcatcctggagctgtggaagaggggctgtgccaacatgacctaccgctggggcaccctgctgatgaagaggaagtttgaggagccccggcccggcttccatggagtgctgggcatcaacagcatcaccgggaaggaggagcccctgtaccccagctacaagaggcagctgcgcatctacctggtgtccctgccctttgtgtgcctgtgcctgtacttcagcctgtatgtgatgatgatctactttgacatggaggtgtgggccctgggcctgcacgagaacagcggcagcgagtggacctctgtgctgctgtatgtgcccagcatcatctatgccatcgtcatcgagatcatgaaccggctgtaccgctatgctgctgagttcctgacctcctgggagaaccaccggctggagagcgcctaccagaaccacctgatcctgaaggtgctggtgttcaacttcctgaactgctttgccagcctcttctacatcgcctttgtgctgaaggacatgaagctgctgcggcagagcctggccaccctgctgatcaccagccagatcctgaaccagatcatggagagcttcctgccctactggctgcagaggaagcatggagtgcgggtgaagaggaaggtgcaggccctgaaggctgacattgatgccaccctgtatgagcaggtgatcctggagaaggagatgggcacctacctgggcacctttgatgactacctggagctgttcctgcagtttggctacgtgtccctcttcagctgtgtgtaccccctggccgccgcctttgctgtgctgaacaacttcacagaggtgaacagtgatgccctgaagatgtgcagggtcttcaagaggcccttcagcgagcccagcgccaacatcggcgtgtggcagctggcctttgagaccatgtctgtcatctctgtggtgaccaactgtgccctgattggcatgagcccccaggtgaatgctgtgtttcctgagagcaaggctgacctgatcctgattgtggtggccgtggagcacgccctgctggccctgaagttcatcctggcctttgccatcccagacaagcccaggcacatccagatgaagctggcccggctggagtttgagagcctggaggccctgaagcagcagcagatgaagctggtgacagagaacctgaaggaggagcccatggagagcggcaaggagaaggccacctag

SEQ ID NO: 81680 - DNA, 1785 bp, Artificial Sequence
  derived and/or modified sequence
atgaaggtgaccctgagcgccctggacaccagcgagagcagcttcacccccctggttgtcatcgaactggctcaagatgtgaaggaagaaaccaaggagtggctcaaaaaccgcatcatcgccaagaagaaagatggggacaataatgacgatttcctaaccatggccgagtgtcagttcatcattaaacatgaattggaaaatctgagggcgaaagacgaaaagatgattccaggctacccccaggccaaactctatcctggaaaaagcctcctgaggcggctgctgacatccgggattgtcatacaggttttccctctgcatgattcagaagctctgaaaaaactcgaagacacttggtacaccagatttgctctgaaatatcagcccatagattccatcaggggctactttggggaaactatagctctttacttcggctttctggaatatttcacatttgccctgatcccaatggctgtaatcggcttgccttactacttgttcgtgtgggaagactatgataagtacgtgatttttgcttcctttaacctcatatggagtacagtgattcttgagctgtggaaacgtggttgcgccaacatgacataccgctggggcaccctgctgatgaagagaaagtttgaggaaccccgccctggcttccacggtgtgttgggcatcaattctattacggggaaagaggagcctctatacccatcctataagcgacagctgcggatatatcttgtgagcctgcctttcgtctgcctgtgcctatacttcagcttatacgtgatgatgatctacttcgatatggaagtgtgggctctgggcctccacgagaattccggctccgagtggacttccgtgctactctatgtcccttccatcatctacgcaattgtgattgaaattatgaacagactgtaccggtacgctgctgaattcctcactagctgggagaatcaccggctcgaatctgcataccaaaatcatttgatcctgaaagtgctggttttcaacttcctgaactgtttcgcttcattattttatatcgcattcgtcttgaaggatatgaagcttctgcgtcagtcgcttgctaccctactgatcacatctcagatcctgaaccaaattatggaatcttttctgccttactggttgcagagaaagcatggagtgcgggtgaagaggaaggtccaagctctcaaggcagacatcgacgctacgctctatgagcaggttatcctggagaaggagatgggcacctacctgggtacatttgatgattacctggagttattcctgcaatttggctacgtcagcctctttagttgtgtttacccattagcagctgcattcgctgttttgaataatttcaccgaagtgaactcagacgccctgaagatgtgtcgagtgtttaagcggccattcagtgagccaagtgccaacattggagtctggcagctggcatttgaaacaatgtcagttatcagcgtggtaactaattgtgccctgattggtatgagtccacaggtgaatgcagtttttccagagagcaaagccgatctgattcttatcgtggtcgccgtcgaacacgctttgctcgccctgaagttcatccttgcctttgctatcccagacaaacctagacacatccagatgaagctagctaggctggaattcgaatcactagaggctctcaaacaacaacagatgaaactcgtcacagagaacctaaaagaagagccgatggagtcaggtaaagaaaaggcaacctag

SEQ ID NO: 81681 - DNA, 1785 bp, Artificial Sequence
  derived and/or modified sequence
atgaaggttacactatccgcactcgatacaagtgagtcctcatttacacctttggtcgtcatcgaactcgcccaggacgttaaagaagagacgaaagagtggttgaagaatcgcatcatagccaagaaaaaagacggagataataatgacgactttctcacgatggctgaatgccagttcataatcaagcacgaactagaaaacctgcgcgctaaggacgagaagatgattcccggttatcctcaggccaagctatacccaggcaagtctctcttgagaagactcctcacctccggtattgtgatccaggtgtttcctctgcacgatagtgaagcactgaagaagttggaagatacttggtatactcgctttgctctgaagtatcagcccattgatagcatcaggggctactttggggaaaccattgcattgtactttggattcctcgaatatttcacattcgccttgattcctatggccgtcatcggtctcccttactacttgttcgtatgggaagattatgataagtacgtgatcttcgccagcttcaaccttatctggtctacagttatccttgagctctggaaacgaggctgtgccaacatgacttacaggtgggggacacttctcatgaaaaggaagtttgaggagcctcgcccaggatttcacggagtcctggggattaattccattactggtaaggaggagcctctgtacccttcatataagcggcagctgcggatttaccttgtctccctgccctttgtctgtctctgtctctacttttccctctatgttatgatgatatatttcgatatggaagtgtgggctcttggtttgcacgagaacagcgggtccgaatggacctccgtgctgctgtatgtaccgtccataatatatgccattgttatcgagataatgaataggttgtaccgctacgccgctgagtttctaacttcatgggagaatcaccggctggaaagtgcgtaccagaaccatttgattctgaaggtgctggtgttcaacttccttaattgttttgcctcgttattttatatcgcttttgtgctcaaagatatgaagctgctaaggcagtcccttgcaactttgcttattactagccagatactgaaccagatcatggagtcttttcttccatactggctgcagcggaagcacggagtcagagtgaaacgaaaagtgcaggctctgaaagcagatatcgacgccactctgtacgaacaggtaatacttgaaaaggagatgggcacttacctgggaacattcgatgattatttagagctgtttcttcaattcggttatgttagcctctttagctgcgtctaccctttagccgctgcattcgctgttctaaataacttcacggaagtaaattccgacgccttaaaaatgtgtagagtgttcaaacgaccgttctctgagccctccgcgaatatcggggtctggcagctagccttcgagactatgtccgttatctctgtcgtgaccaattgtgccctgattggaatgtccccccaggtgaacgctgtgtttccagagtctaaggcagatctgattttgatcgtggtggcagtggagcacgctcttctggctctgaagtttatcctggcatttgccatacctgacaagccccgtcatatacaaatgaagcttgctcgtctagaatttgagagcctggaagctctcaaacagcaacagatgaaactagttaccgaaaatttgaaggaggagcctatggagtccgggaaggaaaaagccacttag

SEQ ID NO: 81682 - DNA, 2419 bp, Artificial Sequence
  derived and/or modified sequence
gcactctttcgcccggcctccggttctcgccggctctcggacccgcctccgaagacgtggagcgctgcggcggctgatttgtcaaagatgaaagtgaccttatcagctttggatacttctgagagttctttcacacctttggtggtcatagaacttgctcaggatgtcaaagaagaaaccaaagaatggctgaaaaacagaattatagctaaaaaaaaagatggagataacaatgatgatttcctgacaatggcagaatgtcaattcattatcaaacatgaacttgaaaatcttagagctaaagatgaaaaaatgatccctggttaccctcaggcaaagttgtatccaggaaaatcattgttgagaagattgctcacgtctggcatcgtgattcaggtgtttccactgcatgacagtgaagccctgaagaagcttgaggacacctggtacactcggtttgctttgaagtatcagcccatagacagtattcgtggctactttggggaaacaattgctctgtactttggatttttggagtatttcacttttgcattaatccccatggctgtcattgggttaccttactacttgtttgtgtgggaagactatgacaagtacgtgatctttgcctcgttcaacctcatctggtccacggtgattctggaactgtggaagcgtggctgtgccaacatgacctacaggtgggggacactgctcatgaagagaaagtttgaggagccccggccaggatttcatggtgtcttgggtatcaattccatcactgggaaggaggagcctctgtaccccagctacaagagacagttgcgcatttacctggtctccctgccattcgtgtgcctctgcctctatttctcactgtatgtcatgatgatttacttcgacatggaggtttgggccttgggtctacatgagaacagcgggtctgagtggaccagtgtcctgttgtatgtgcccagcatcatctatgccattgtgattgagatcatgaatcgtctctatcgatatgctgccgagtttttaacttcatgggagaatcacagattggaatctgcctatcagaaccatctaattctgaaagttttagtgttcaacttcctcaattgctttgcctcactcttctatattgcctttgtcttgaaagatatgaagcttttgcgccagagcttggccactctcctaattacctcccagatcctcaaccaaattatggaatcttttcttccttattggctccaaaggaagcatggtgtgcgggtgaagaggaaggtgcaggctttaaaggcagacattgatgctacattatatgaacaagtcatcctggaaaaagaaatgggaacttatttgggcacctttgatgattacttggagttattcctgcagtttggttatgtgagccttttctcctgtgtttacccattagcagctgcctttgctgtgttaaataacttcactgaagtaaattcagatgccttaaaaatgtgcagggtcttcaaacgtccattctcagaaccttcagccaatattggtgtgtggcagttggcttttgaaacgatgagtgttatatctgtggtcactaactgtgcgctgattggaatgtcaccacaagtgaatgcagtctttccagaatcaaaagcagacctcattttgattgtagtagcagtggagcacgcactcctggctttaaagtttatacttgcatttgccatacctgataagccacggcatatccagatgaaactagccagactggaatttgagtctttggaggcactcaagcagcagcaaatgaagctcgtgaccgagaacctgaaggaggaaccaatggaaagcgggaaggagaaggcaacctgagtgcccagcgtgcccagctgccctgttggcagaggcctgtgtctgtgccacacctgccacggtggcagggggggtacccggggcagcatcgtggctcctgaacccagacccaatgcttagccaaacgaagtggctcccatgtggcaagcacccttctcagtttcgcagtggcttggctcgggatccttggcagttcccccagccccaccctgtctgctccttcccagttccttcccgggccccacacgctgctccagctgccaactttgctgcagagccactgccgcccttgagcctctcaccatgagtgagccaccagctctccacgttcccctcatagcagtgtcactcccaaccccaccatggcccagggacccgtggacaggttggggatggggtgtgtgcccactgtgctcatcacaggagcctcagttgagagtgagcggggtacagtaaggcagtgcttcccacactggacctctttcctggttctcttttgcaatacattaacagaccctttatcaacataaacaatagtaactgagct

SEQ ID NO: 81683 - DNA, 1785 bp, Artificial Sequence
  derived and/or modified sequence
atgaaggtgaccctgagcgccctggacaccagcgagagcagcttcacccccctggtggtgatcgagctggcccaggacgtgaaggaggagaccaaggagtggctgaagaacagaatcatcgccaagaagaaggacggcgacaacaacgacgacttcctgaccatggccgagtgccagttcatcatcaagcacgagctggagaacctgagagccaaggacgagaagatgatccccggctacccccaggccaagctgtaccccggcaagagcctgctgagaagactgctgaccagcggcatcgtgatccaggtgttccccctgcacgacagcgaggccctgaagaagctggaggacacctggtacaccagattcgccctgaagtaccagcccatcgacagcatcagaggctacttcggcgagaccatcgccctgtacttcggcttcctggagtacttcaccttcgccctgatccccatggccgtgatcggcctgccctactacctgttcgtgtgggaggactacgacaagtacgtgatcttcgccagcttcaacctgatctggagcaccgtgatcctggagctgtggaagagaggctgcgccaacatgacctacagatggggcaccctgctgatgaagagaaagttcgaggagcccagacccggcttccacggcgtgctgggcatcaacagcatcaccggcaaggaggagcccctgtaccccagctacaagagacagctgagaatctacctggtgagcctgcccttcgtgtgcctgtgcctgtacttcagcctgtacgtgatgatgatctacttcgacatggaggtgtgggccctgggcctgcacgagaacagcggcagcgagtggaccagcgtgctgctgtacgtgcccagcatcatctacgccatcgtgatcgagatcatgaacagactgtacagatacgccgccgagttcctgaccagctgggagaaccacagactggagagcgcctaccagaaccacctgatcctgaaggtgctggtgttcaacttcctgaactgcttcgccagcctgttctacatcgccttcgtgctgaaggacatgaagctgctgagacagagcctggccaccctgctgatcaccagccagatcctgaaccagatcatggagagcttcctgccctactggctgcagagaaagcacggcgtgagagtgaagagaaaggtgcaggccctgaaggccgacatcgacgccaccctgtacgagcaggtgatcctggagaaggagatgggcacctacctgggcaccttcgacgactacctggagctgttcctgcagttcggctacgtgagcctgttcagctgcgtgtaccccctggccgccgccttcgccgtgctgaacaacttcaccgaggtgaacagcgacgccctgaagatgtgcagagtgttcaagagacccttcagcgagcccagcgccaacatcggcgtgtggcagctggccttcgagaccatgagcgtgatcagcgtggtgaccaactgcgccctgatcggcatgagcccccaggtgaacgccgtgttccccgagagcaaggccgacctgatcctgatcgtggtggccgtggagcacgccctgctggccctgaagttcatcctggccttcgccatccccgacaagcccagacacatccagatgaagctggccagactggagttcgagagcctggaggccctgaagcagcagcagatgaagctggtgaccgagaacctgaaggaggagcccatggagagcggcaaggagaaggccacctag

SEQ ID NO: 81684 - protein, 549 aa, Artificial Sequence
  derived and/or modified sequence
MKVTLSALDTSESSFTPLVVIELAQDVKEETKEWLKNRIIAKKKDGVRRLLTSGIVIQVFPLHDSEALKKLEDTWYTRFALKYQPIDSIRGYFGETIALYFGFLEYFTFALIPMAVIGLPYYLFVWEDYDKYVIFASFNLIWSTVILELWKRGCANMTYRWGTLLMKRKFEEPRPGFHGVLGINSITGKEEPLYPSYKRQLRIYLVSLPFVCLCLYFSLYVMMIYFDMEVWALGLHENSGSEWTSVLLYVPSIIYAIVIEIMNRLYRYAAEFLTSWENHRLESAYQNHLILKVLVFNFLNCFASLFYIAFVLKDMKLLRQSLATLLITSQILNQIMESFLPYWLQRKHGVRVKRKVQALKADIDATLYEQVILEKEMGTYLGTFDDYLELFLQFGYVSLFSCVYPLAAAFAVLNNFTEVNSDALKMCRVFKRPFSEPSANIGVWQLAFETMSVISVVTNCALIGMSPQVNAVFPESKADLILIVVAVEHALLALKFILAFAIPDKPRHIQMKLARLEFESLEALKQQQMKLVTENLKEEPMESGKEKAT

SEQ ID NO: 81685 - DNA, 1650 bp, Artificial Sequence
  derived and/or modified sequence
atgaaggtgacattgtcagccctggatactagcgagagcagttttactcctctggtggtgatcgaattggctcaggatgtgaaggaagaaacaaaagagtggttaaagaatcgcatcatcgcaaaaaaaaaagacggtgtccggcgtctgctgacttctggcattgtgatccaggtgttcccactgcacgacagtgaagcacttaagaagcttgaagacacctggtacacccgattcgctctaaagtatcagccgattgatagcatcagaggctactttggtgaaacgatagctttatacttcggttttctggaatacttcacttttgccctgattccgatggctgtgatcggactgccctactatctgtttgtttgggaagattacgacaagtatgtgatatttgcaagctttaatctgatctggagtacagtgatactggaactctggaagcgggggtgtgccaatatgacgtaccggtggggtactctgctgatgaaacgcaagttcgaggagccccggcctggttttcacggagtcttagggattaacagcatcacaggcaaggaggaacctctctacccctcctataagaggcagctcaggatttacctggtgtcgctgccctttgtctgcctgtgcctctatttttcgctgtacgtcatgatgatctatttcgatatggaggtttgggctctgggactgcatgaaaattcggggtcagaatggacttcagttttgctatacgtcccatctattatttatgcaatcgtgatcgagatcatgaacaggctctacaggtatgccgcagagtttttaaccagctgggagaatcacaggctggagtcagcgtatcaaaaccacctcatcctgaaggtgctagtgtttaatttcctcaattgctttgcttcattattttatattgcatttgtgttgaaggacatgaagctgttgaggcaaagtctcgccacactcctgatcacatctcagatcctgaatcagattatggaatcttttctcccatactggctgcagaggaaacacggagtacgggtcaaacggaaggtgcaggcactgaaagccgatatagatgccactctctatgagcaagttattcttgagaaagagatgggcacctatctcgggaccttcgatgactacttagagctgtttctgcaatttggctatgtttcgctcttttcatgcgtgtaccctctagcggcggcatttgcagtgctgaacaatttcacagaggtcaactcagacgctcttaaaatgtgccgggtcttcaagaggcctttctcggaaccgagtgccaacataggggtttggcagctggcattcgaaaccatgtcggtcatcagtgtggtaaccaattgcgccctcatcgggatgagtccccaggtgaatgccgtgttcccagagagcaaagccgaccttattctcatcgtggtagctgtagagcacgcgctgcttgcactgaagtttatactcgcgttcgcgatcccagacaagcctcggcatatccagatgaaactggcacgcctggagtttgaaagcctggaggccttgaaacagcagcaaatgaaactcgtgacagaaaaccttaaagaggagccaatggagagcggcaaagagaaggctacctag

SEQ ID NO: 81686 - DNA, 1650 bp, Artificial Sequence
  derived and/or modified sequence
atgaaggtgaccctgagcgccctggacaccagcgagagcagcttcacccccctggtggtgattgagctggcccaggatgtgaaggaggagaccaaggagtggctgaagaaccgcatcatcgccaagaagaaggatggagtgcggcggctgctgaccagcggcatcgtcatccaggtgttccccctgcatgattctgaggccctgaagaagctggaggacacctggtacaccaggtttgccctgaagtaccagcccatcgacagcatccggggctactttggagagaccatcgccctgtacttcggcttcctggagtacttcacctttgccctgatccccatggctgtgattggcctgccctactacctgtttgtgtgggaggactatgacaagtatgtgatctttgccagcttcaacctgatctggagcaccgtcatcctggagctgtggaagaggggctgtgccaacatgacctaccgctggggcaccctgctgatgaagaggaagtttgaggagcccaggcctggcttccacggcgtgctgggcatcaacagcatcaccgggaaggaggagcccctgtaccccagctacaagaggcagctgcgcatctacctggtgtccctgccctttgtgtgcctgtgcctgtacttcagcctgtatgtgatgatgatctactttgacatggaggtgtgggccctgggcctgcatgaaaattctggcagcgagtggacctctgtgctgctgtatgtgcccagcatcatctatgccatcgtgattgagatcatgaacagactctaccgctatgctgctgagttcctgacctcctgggagaaccaccggctggagagcgcctaccagaaccacctgatcctgaaggtgctggtgttcaacttcctgaactgctttgccagcctcttctacatcgcctttgtgctgaaggacatgaagctgctgcggcagagcctggccaccctgctgatcaccagccagatcctgaaccagatcatggagagcttcctgccctactggctgcagaggaagcacggcgtgcgggtgaagaggaaggtgcaggccctgaaggctgacattgatgccaccctgtatgagcaggtgatcctggagaaggagatgggcacctacctgggcacctttgatgactacctggagctgttcctgcagtttggctacgtgtccctcttcagctgtgtgtaccccctggccgccgcctttgctgtgctgaacaacttcacagaggtgaacagtgatgccctgaagatgtgcagggtcttcaagaggcccttcagcgagcccagcgccaacattggagtgtggcagctggcctttgagaccatgtctgtcatctctgtggtgaccaactgtgccctgattggcatgagcccccaggtgaatgctgtgtttcctgagagcaaggctgacctgatcctgattgtggtggccgtggagcacgccctgctggccctgaagttcatcctggcctttgccatcccagacaagcccaggcacatccagatgaagctggcccggctggagtttgagagcctggaggccctgaagcagcagcagatgaagctggtgacagagaacctgaaggaggagcccatggagagcggcaaggagaaggccacctag

SEQ ID NO: 81687 - DNA, 1650 bp, Artificial Sequence
  derived and/or modified sequence
atgaaggtgaccctgagcgccctggacaccagcgagagcagcttcactcccctagttgtcatagaattagcccaggacgtaaaggaggaaaccaaagagtggctgaagaacagaatcatagctaaaaaaaaggacggggtccggagactgttaacttccggaatagtgatacaagtcttcccactgcatgattctgaagccctgaagaaactcgaggacacgtggtacacccgctttgccctgaaatatcagcctatcgactctatcagaggctacttcggagaaacgatagcgctgtactttggatttttggaatacttcactttcgctttaattcccatggctgtgattggcttgccctattaccttttcgtgtgggaggactacgataaatacgtgattttcgccagcttcaatcttatttggtccactgtgatattggaattgtggaaacgtggatgtgccaatatgacctatcggtgggggaccttgcttatgaagcggaagttcgaagaaccacggcccggttttcacggtgtgcttggcataaattctattaccgggaaagaggaacctctttacccaagttacaagcgtcaattaaggatctacctggtgtctctcccgttcgtctgtctatgtttgtactttagcctgtatgttatgatgatttacttcgatatggaagtgtgggctctgggcctgcacgagaattccggcagtgagtggacttctgtgttgctgtacgtgccatcgattatctacgctatcgtgattgagatcatgaatcggctgtaccgatacgccgccgaatttttgacatcttgggagaaccaccgcttggaaagtgcctaccaaaatcacctgattttgaaggtcctcgtgtttaacttcctgaactgtttcgcctctctattctatattgcattcgtgttgaaagacatgaaattactaagacagtcgctggcaactctgcttataaccagtcagattctcaatcagattatggagtctttcttgccttattggctgcaacggaagcatggcgtgagagtaaagcggaaagtgcaggccctcaaggccgacatagacgctaccttgtatgagcaggtgatccttgagaaggagatgggcacttacctggggacattcgacgactaccttgagctgtttttgcagtttggatatgtcagccttttctcctgtgtctatcccttggccgccgcttttgctgtcctgaataactttacagaagtcaatagcgatgcactcaagatgtgccgtgtgtttaagcggcctttttctgagccttcagctaatattggtgtgtggcagctggcgtttgagaccatgtctgtaatcagtgtggtgacgaattgcgcactaatcgggatgtcacctcaagtcaacgccgtattcccagaatcgaaggcagacttgattctgatcgttgtggctgttgagcatgctctgttggcactgaagttcatcctggccttcgcaattcctgacaaacccagacatatacagatgaagctggctcggttggagttcgaatctctggaagctttaaaacagcagcagatgaagcttgtgactgaaaatctcaaggaagagccaatggagtcagggaaagaaaaggctacatag

SEQ ID NO: 81688 - DNA, 1650 bp, Artificial Sequence
  derived and/or modified sequence
atgaaggtgaccctaagcgccctggatacttctgagtcgtccttcaccccactggttgtgatcgaattagcgcaagatgtcaaggaagagaccaaggagtggctgaaaaaccgtatcattgcaaaaaaaaaagacggagttaggcggctgttgacttccgggattgtcatacaggtgttccctctgcatgattccgaggctctgaaaaaattagaggacacgtggtatacgcggtttgcccttaagtaccagcctatagattccatcagagggtactttggggaaactatagccctgtacttcggctttctggagtacttcacattcgccctcataccaatggctgtgataggcctcccatattacctgttcgtgtgggaagactacgataaatacgttatattcgcctcattcaacctgatctggagcacagtcattctagaattatggaaacgaggctgtgccaacatgacctatcggtggggtacactgctgatgaaaagaaaatttgaggagccaagacctggattccatggggtactcggtataaattcgatcacgggtaaggaagaacctctgtaccctagctacaagaggcagctacgaatctacttggtcagccttccttttgtctgcctctgtctttacttttccctgtacgtgatgatgatctactttgatatggaagtgtgggccctgggccttcatgagaactcaggtagcgagtggacttcagtcctactttacgtgccatccatcatttatgctatagtgatcgaaatcatgaataggctttataggtacgcggctgaattcctaactagttgggagaaccaccggcttgaatccgcctaccagaaccatctgattttgaaggtgctcgtgttcaatttcttgaactgtttcgcctcactgttttatatcgcctttgttctgaaggacatgaagctcctgagacagagtctcgcaacgctgctcattactagtcagatcttgaaccagattatggagtcattcttaccatactggctgcagaggaaacacggcgtgagggtcaaacggaaggtccaggcactcaaagctgacattgatgcaacactctatgagcaagtcatcctggagaaggagatggggacctatctcggtacctttgatgactacctagagctgtttctgcagtttggttatgtgagcctcttttcgtgtgtctaccccctcgccgctgcatttgccgtgttaaacaattttacagaagttaactcagacgcattgaagatgtgtcgagtcttcaagaggcctttttccgaacccagtgctaacatcggagtgtggcagttggccttcgaaactatgtccgtcataagcgttgtgacaaattgcgccttgatcgggatgtctcctcaggtgaacgcggtatttcctgaatccaaagcggacttgatcttaattgtggttgccgtggaacatgcactccttgcacttaaattcatactcgccttcgcaatccctgacaaaccacgccatattcagatgaagttagcgagactggagttcgaatcccttgaggcgctgaagcagcagcagatgaaactggttacggagaacttaaaggaagagcctatggaaagcggaaaagagaaggcaacgtag

SEQ ID NO: 81689 - DNA, 2019 bp, Artificial Sequence
  derived and/or modified sequence
ggcccgccccccgcaccgagcactctttcgcccggcctccggttctcgccggctctcggacccgcctccgaagacgtggagcgctgcggcggctgatttgtcaaagatgaaagtgaccttatcagctttggatacttctgagagttctttcacacctttggtggtcatagaacttgctcaggatgtcaaagaagaaaccaaagaatggctgaaaaacagaattatagctaaaaaaaaagatggagtgagaagattgctcacgtctggcatcgtgattcaggtgtttccactgcatgacagtgaagccctgaagaagcttgaggacacctggtacactcggtttgctttgaagtatcagcccatagacagtattcgtggctactttggggaaacaattgctctgtactttggatttttggagtatttcacttttgcattaatccccatggctgtcattgggttaccttactacttgtttgtgtgggaagactatgacaagtacgtgatctttgcctcgttcaacctcatctggtccacggtgattctggaactgtggaagcgtggctgtgccaacatgacctacaggtgggggacactgctcatgaagagaaagtttgaggagccccggccaggatttcatggtgtcttgggtatcaattccatcactgggaaggaggagcctctgtaccccagctacaagagacagttgcgcatttacctggtctccctgccattcgtgtgcctctgcctctatttctcactgtatgtcatgatgatttacttcgacatggaggtttgggccttgggtctacatgagaacagcgggtctgagtggaccagtgtcctgttgtatgtgcccagcatcatctatgccattgtgattgagatcatgaatcgtctctatcgatatgctgccgagtttttaacttcatgggagaatcacagattggaatctgcctatcagaaccatctaattctgaaagttttagtgttcaacttcctcaattgctttgcctcactcttctatattgcctttgtcttgaaagatatgaagcttttgcgccagagcttggccactctcctaattacctcccagatcctcaaccaaattatggaatcttttcttccttattggctccaaaggaagcatggtgtgcgggtgaagaggaaggtgcaggctttaaaggcagacattgatgctacattatatgaacaagtcatcctggaaaaagaaatgggaacttatttgggcacctttgatgattacttggagttattcctgcagtttggttatgtgagccttttctcctgtgtttacccattagcagctgcctttgctgtgttaaataacttcactgaagtaaattcagatgccttaaaaatgtgcagggtcttcaaacgtccattctcagaaccttcagccaatattggtgtgtggcagttggcttttgaaacgatgagtgttatatctgtggtcactaactgtgcgctgattggaatgtcaccacaagtgaatgcagtctttccagaatcaaaagcagacctcattttgattgtagtagcagtggagcacgcactcctggctttaaagtttatacttgcatttgccatacctgataagccacggcatatccagatgaaactagccagactggaatttgagtctttggaggcactcaagcagcagcaaatgaagctcgtgaccgagaacctgaaggaggaaccaatggaaagcgggaaggagaaggcaacctgagtgcccagcgtgcccagctgccctgttggcagaggcctgtgtctgtgccacacctgccacggtggcagggggggtacccggggcagcatcgtggctcctgaacccagacccaatgcttagccaaacgaagtggctcccatgtggcaagcacccttctcagtttcgcagtggcttggctcgggatccttggcagttcccccagccccaccctgtctgctccttcccagttccttcccgggccccacacgctgctccagctgcca

SEQ ID NO: 81690 - DNA, 1650 bp, Artificial Sequence
  derived and/or modified sequence
atgaaggtgaccctgagcgccctggacaccagcgagagcagcttcacccccctggtggtgatcgagctggcccaggacgtgaaggaggagaccaaggagtggctgaagaacagaatcatcgccaagaagaaggacggcgtgagaagactgctgaccagcggcatcgtgatccaggtgttccccctgcacgacagcgaggccctgaagaagctggaggacacctggtacaccagattcgccctgaagtaccagcccatcgacagcatcagaggctacttcggcgagaccatcgccctgtacttcggcttcctggagtacttcaccttcgccctgatccccatggccgtgatcggcctgccctactacctgttcgtgtgggaggactacgacaagtacgtgatcttcgccagcttcaacctgatctggagcaccgtgatcctggagctgtggaagagaggctgcgccaacatgacctacagatggggcaccctgctgatgaagagaaagttcgaggagcccagacccggcttccacggcgtgctgggcatcaacagcatcaccggcaaggaggagcccctgtaccccagctacaagagacagctgagaatctacctggtgagcctgcccttcgtgtgcctgtgcctgtacttcagcctgtacgtgatgatgatctacttcgacatggaggtgtgggccctgggcctgcacgagaacagcggcagcgagtggaccagcgtgctgctgtacgtgcccagcatcatctacgccatcgtgatcgagatcatgaacagactgtacagatacgccgccgagttcctgaccagctgggagaaccacagactggagagcgcctaccagaaccacctgatcctgaaggtgctggtgttcaacttcctgaactgcttcgccagcctgttctacatcgccttcgtgctgaaggacatgaagctgctgagacagagcctggccaccctgctgatcaccagccagatcctgaaccagatcatggagagcttcctgccctactggctgcagagaaagcacggcgtgagagtgaagagaaaggtgcaggccctgaaggccgacatcgacgccaccctgtacgagcaggtgatcctggagaaggagatgggcacctacctgggcaccttcgacgactacctggagctgttcctgcagttcggctacgtgagcctgttcagctgcgtgtaccccctggccgccgccttcgccgtgctgaacaacttcaccgaggtgaacagcgacgccctgaagatgtgcagagtgttcaagagacccttcagcgagcccagcgccaacatcggcgtgtggcagctggccttcgagaccatgagcgtgatcagcgtggtgaccaactgcgccctgatcggcatgagcccccaggtgaacgccgtgttccccgagagcaaggccgacctgatcctgatcgtggtggccgtggagcacgccctgctggccctgaagttcatcctggccttcgccatccccgacaagcccagacacatccagatgaagctggccagactggagttcgagagcctggaggccctgaagcagcagcagatgaagctggtgaccgagaacctgaaggaggagcccatggagagcggcaaggagaaggccacctag

SEQ ID NO: 81691 - protein, 470 aa, Artificial Sequence
  derived and/or modified sequence
MKVTLSALDTSESSFTPLVVIELAQDVKEETKEWLKNRIIAKKKDGGAQLLFRPLLNKYEQETLENQNLYLVGASKIRMLLGAEAVGLVKECNDNTMRAFTYRTRQNFKGFDDNNDDFLTMAECQFIIKHELENLRAKDEKMIPGYPQAKLYPGKSLLRRLLTSGIVIQVFPLHDSEALKKLEDTWYTRFALKYQPIENHRLESAYQNHLILKVLVFNFLNCFASLFYIAFVLKDMKLLRQSLATLLITSQILNQIMESFLPYWLQRKHGVRVKRKVQALKADIDATLYEQVILEKEMGTYLGTFDDYLELFLQFGYVSLFSCVYPLAAAFAVLNNFTEVNSDALKMCRVFKRPFSEPSANIGVWQLAFETMSVISVVTNCALIGMSPQVNAVFPESKADLILIVVAVEHALLALKFILAFAIPDKPRHIQMKLARLEFESLEALKQQQMKLVTENLKEEPMESGKEKAT

SEQ ID NO: 81692 - protein, 140 aa, Artificial Sequence
  derived and/or modified sequence
MKVTLSALDTSESSFTPLVVIELAQDVKEETKEWLKNRIIAKKKDGGAQLLFRPLLNKYEQETLENQNLYLVGASKIRMLLGAEAVGLVKECNDNTMRAFTYRTRQNFKGFDDNNDDFLTMAECQFIIKHELENLRAKDE

SEQ ID NO: 81693 - protein, 112 aa, Artificial Sequence
  derived and/or modified sequence
MKVTLSALDTSESSFTPLVVIELAQDVKEETKEWLKNRIIAKKKDGGAQLLFRPLLNKYEQETLENQNLYLVGASKIRMLLGAEAVGLVKECNDNTMRAFTYRTRQNFKGFD

SEQ ID NO: 81694 - protein, 134 aa, Artificial Sequence
  derived and/or modified sequence
MKVTLSALDTSESSFTPLVVIELAQDVKEETKEWLKNRIIAKKKDGGAQLLFRPLLNKYEQETLENQNLYLVGASKIRMLLGAEAVGLVKECNDNTMRAFTYRTRQNFKGFDDNNDDFLTMAECQFIIKHELEN

SEQ ID NO: 81695 - protein, 146 aa, Artificial Sequence
  derived and/or modified sequence
MKVTLSALDTSESSFTPLVVIELAQDVKEETKEWLKNRIIAKKKDGGAQLLFRPLLNKYEQETLENQNLYLVGASKIRMLLGAEAVGLVKECNDNTMRAFTYRTRQNFKGFDDNNDDFLTMAECQFIIKHELENLRAKDEKMIPGY

SEQ ID NO: 81696 - protein, 141 aa, Artificial Sequence
  derived and/or modified sequence
MKVTLSALDTSESSFTPLVVIELAQDVKEETKEWLKNRIIAKKKDGGAQLLFRPLLNKYEQETLENQNLYLVGASKIRMLLGAEAVGLVKECNDNTMRAFTYRTRQNFKGFDDNNDDFLTMAECQFIIKHELENLRAKDEK

SEQ ID NO: 81697 - DNA, 1413 bp, Artificial Sequence
  derived and/or modified sequence
atgaaagttacgctgagcgccttggatacttcagagtcatcatttaccccactggtggtgatagagctggcacaggatgtcaaggaggagacaaaagagtggctgaagaacagaatcatcgcaaagaagaaagacggcggtgcgcaactgctcttccgccctctgctcaacaagtacgaacaagagactttggaaaaccagaacctgtatctggtcggggccagcaagattcgcatgctgctgggagctgaagccgttggcttggtgaaagagtgtaatgacaacaccatgcgtgctttcacttatcgaacaaggcagaatttcaaaggcttcgatgacaacaatgatgattttctgactatggcagaatgccagttcatcattaaacacgaattggaaaatctacgggctaaagacgaaaaaatgatcccaggatatccccaggctaaactctacccgggaaaaagcctgctccgccgactactgacaagcggtatcgtgatccaggtgtttccactgcacgacagcgaggcattgaagaagcttgaagatacctggtatactcggtttgccctgaagtatcagccaattgagaatcatcgacttgaaagcgcctatcaaaaccatctgatactgaaggtcctggtattcaatttcctgaattgcttcgctagtcttttttacatcgcattcgtcctgaaggacatgaaactgctccggcagtctcttgcaacacttctcatcacatctcagattctgaaccaaataatggagagctttttaccttattggcttcagcgcaagcacggagttcgggtcaagcggaaggtgcaagccttgaaggccgacattgatgctaccctctatgaacaagtcattcttgagaaggaaatgggcacgtatctaggaacctttgacgactaccttgagctctttcttcagttcggctacgtaagtctattctcttgcgtctaccccttggcagccgcattcgctgtgctgaacaacttcacggaagtaaatagcgatgccctgaagatgtgtcgggtgtttaagaggccattttctgaaccctcggccaatattggtgtgtggcagctggccttcgaaaccatgtctgtcatcagcgttgttaccaattgtgctctgatcggaatgagtccccaggtcaacgccgtgttccctgaatctaaggctgatcttattctcatcgttgtggcggtggaacacgccctgttggctctcaaatttatcctcgcatttgctatacccgacaagcctcggcacatccagatgaaactcgcgagactggagtttgaaagtctcgaggccctcaagcaacagcagatgaaattagttaccgagaacctcaaggaggagccaatggaatccggcaaagagaaggcaacttag

SEQ ID NO: 81698 - DNA, 423 bp, Artificial Sequence
  derived and/or modified sequence
atgaaagtaactctcagcgcactggatacatccgaatcctctttcacccccctggttgttatcgaactggcacaggatgtgaaggaggaaaccaaggagtggttgaaaaatcgcataatcgccaagaagaaagacgggggcgcccaattgctgttccgccccctgctcaacaaatacgaacaagaaactctggaaaaccaaaatctgtaccttgtgggcgctagcaagattcgcatgctgctcggagccgaagccgtgggtctggtgaaggagtgcaatgataatacaatgcgggcgttcacatacaggacgagacagaatttcaagggttttgacgataataatgacgactttttaactatggccgagtgtcagtttattataaaacacgagttggaaaacctacgtgccaaggatgaatag

SEQ ID NO: 81699 - DNA, 339 bp, Artificial Sequence
  derived and/or modified sequence
atgaaggtgacactctctgcactggacaccagcgaatcatcatttaccccattggtggtgattgagttggctcaggacgtcaaggaggagacaaaggagtggctgaagaataggattattgctaagaagaaagacgggggggctcaactgttgttcagacccctgcttaacaagtacgagcaggagactctggagaaccaaaatctctacctcgtcggagcttctaaaattcggatgctcctcggagcagaagcagttggacttgtgaaagaatgcaatgataacaccatgcgggcttttacctatagaacacgacaaaatttcaaagggtttgactag

SEQ ID NO: 81700 - DNA, 117 bp, Artificial Sequence
  derived and/or modified sequence
atgaaagtgacgctgtcagctctagacacctcagaatctagctttacaccgctggtcgtcatcgagttagcgcaggacgtcaaagaggaaaccaaggaatggttaaaaaaccggtag

SEQ ID NO: 81701 - DNA, 405 bp, Artificial Sequence
  derived and/or modified sequence
atgaaagtgacactgtccgctttggatacatccgagtcatcctttaccccactggtcgtgatagaattggcccaggacgtcaaagaagagacaaaggagtggctgaagaatcggatcatagctaaaaaaaaggacggcggggcacagcttctctttaggcctctgttaaacaagtatgaacaagagactcttgagaaccagaatctgtacctggttggtgcttcaaagatacgtatgttactgggagccgaagcagtcggacttgtcaaggaatgcaatgacaatacaatgcgagccttcacgtatcggacaagacagaactttaaaggattcgatgataataatgatgactttctcactatggccgagtgtcagttcatcatcaagcatgagctcgagaactag

SEQ ID NO: 81702 - DNA, 441 bp, Artificial Sequence
  derived and/or modified sequence
atgaaggtgacactgtcggcccttgacacatcagaatctagcttcacccctctagtagtgatagaactggcgcaggacgtgaaagaagagacgaaagaatggctgaagaatcgcatcatagctaagaaaaaagatggtggcgcccagttactttttaggcctctcctgaacaaatatgaacaggagactctcgagaaccagaatctgtatcttgtcggggcctcgaagatcagaatgctgctgggtgcagaagcagttgggctggtcaaagaatgcaatgacaataccatgagggcgttcacataccggacaagacagaacttcaaaggattcgatgataacaacgacgacttcctgacaatggcggaatgtcaattcatcataaaacacgaacttgaaaatttaagagcgaaggacgagaagatgattcccggctattag

SEQ ID NO: 81703 - DNA, 426 bp, Artificial Sequence
  derived and/or modified sequence
atgaaagtgacgctgtcagcactggatacctctgagtcttcgtttactcccctggtagtgatcgaactggcccaggatgtcaaagaggagaccaaggagtggctaaagaatcgcattatcgcaaagaaaaaagacggaggggcacaactcctcttccggccccttctgaacaaatacgagcaagaaactctcgagaatcaaaacctctatctggttggcgctagtaaaatccgcatgctgctgggcgctgaggcagtggggctggtcaaagaatgcaatgataacactatgcgcgctttcacttacagaaccagacaaaactttaaggggtttgatgataacaacgacgactttctaacaatggctgagtgccaatttatcatcaagcatgagctggaaaacctgcgtgccaaggacgagaagtag

SEQ ID NO: 81704 - DNA, 1413 bp, Artificial Sequence
  derived and/or modified sequence
atgaaggtgaccctgagcgccctggacaccagcgagagcagcttcacccccctggtggtgattgagctggcccaggatgtgaaggaggagaccaaggagtggctgaagaaccgcatcatcgccaagaagaaggatggaggagcccagctgctcttccggcccctgctgaacaagtatgagcaggagaccctggagaaccagaacctgtacctggtgggcgccagcaagatccgcatgctgctgggcgctgaggccgtgggcctggtgaaggaatgtaatgacaacaccatgagggccttcacctaccgcacccggcagaacttcaagggctttgatgacaacaatgatgacttcctgaccatggccgagtgccagttcatcatcaagcatgagctggagaacctgcgggccaaggatgagaagatgatccctggctacccccaggccaagctgtacccaggcaagagcctgctgcggcggctgctgaccagcggcatcgtcatccaggtgttccccctgcatgacagcgaggccctgaagaagctggaggacacctggtacaccaggtttgccctgaagtaccagcccatcgagaaccaccggctggagagcgcctaccagaaccacctgatcctgaaggtgctggtgttcaacttcctgaactgctttgccagcctcttctacatcgcctttgtgctgaaggacatgaagctgctgcggcagagcctggccaccctgctgatcaccagccagatcctgaaccagatcatggagagcttcctgccctactggctgcagaggaagcatggagtgcgggtgaagaggaaggtgcaggccctgaaggctgacattgatgccaccctgtatgagcaggtgatcctggagaaggagatgggcacctacctgggcacctttgatgactacctggagctgttcctgcagtttggctacgtgtccctcttcagctgtgtgtaccccctggccgccgcctttgctgtgctgaacaacttcacagaggtgaacagtgatgccctgaagatgtgcagggtcttcaagaggcccttcagcgagcccagcgccaacatcggcgtgtggcagctggcctttgagaccatgtctgtcatctctgtggtgaccaactgtgccctgattggcatgagcccccaggtgaatgctgtgtttcctgagagcaaggctgacctgatcctgattgtggtggccgtggagcacgccctgctggccctgaagttcatcctggcctttgccatcccagacaagcccaggcacatccagatgaagctggcccggctggagtttgagagcctggaggccctgaagcagcagcagatgaagctggtgacagagaacctgaaggaggagcccatggagagcggcaaggagaaggccacctag

SEQ ID NO: 81705 - DNA, 423 bp, Artificial Sequence
  derived and/or modified sequence
atgaaggtgaccctgagcgccctggacaccagcgagagcagcttcacccccctggtggtgattgagctggcccaggatgtgaaggaggagaccaaggagtggctgaagaaccgcatcatcgccaagaagaaggatggaggagcccagctgctcttccggcccctgctgaacaagtatgagcaggagaccctggagaaccagaacctgtacctggtgggcgccagcaagatccgcatgctgctgggcgctgaggccgtgggcctggtgaaggaatgtaatgacaacaccatgagggccttcacctaccgcacccggcagaacttcaagggctttgatgacaacaatgatgacttcctgaccatggccgagtgccagttcatcatcaagcatgagctggagaacctgcgggccaaggatgaatag

SEQ ID NO: 81706 - DNA, 339 bp, Artificial Sequence
  derived and/or modified sequence
atgaaggtgaccctgagcgccctggacaccagcgagagcagcttcacccccctggtggtgattgagctggcccaggatgtgaaggaggagaccaaggagtggctgaagaaccgcatcatcgccaagaagaaggatggaggagcccagctgctcttccggcccctgctgaacaagtatgagcaggagaccctggagaaccagaacctgtacctggtgggcgccagcaagatccgcatgctgctgggcgctgaggccgtgggcctggtgaaggaatgtaatgacaacaccatgagggccttcacctaccgcacccggcagaacttcaagggctttgattag

SEQ ID NO: 81707 - DNA, 117 bp, Artificial Sequence
  derived and/or modified sequence
atgaaggtgaccctgagcgccctggacaccagcgagagcagcttcacccccctggtggtgattgagctggcccaggatgtgaaggaggagaccaaggagtggctgaagaacagatag

SEQ ID NO: 81708 - DNA, 405 bp, Artificial Sequence
  derived and/or modified sequence
atgaaggtgaccctgagcgccctggacaccagcgagagcagcttcacccccctggtggtgattgagctggcccaggatgtgaaggaggagaccaaggagtggctgaagaaccgcatcatcgccaagaagaaggatggaggagcccagctgctcttccggcccctgctgaacaagtatgagcaggagaccctggagaaccagaacctgtacctggtgggcgccagcaagatccgcatgctgctgggcgctgaggccgtgggcctggtgaaggaatgtaatgacaacaccatgagggccttcacctaccgcacccggcagaacttcaagggctttgatgacaacaatgatgacttcctgaccatggccgagtgccagttcatcatcaagcatgagctggagaactag

SEQ ID NO: 81709 - DNA, 441 bp, Artificial Sequence
  derived and/or modified sequence
atgaaggtgaccctgagcgccctggacaccagcgagagcagcttcacccccctggtggtgattgagctggcccaggatgtgaaggaggagaccaaggagtggctgaagaaccgcatcatcgccaagaagaaggatggaggagcccagctgctcttccggcccctgctgaacaagtatgagcaggagaccctggagaaccagaacctgtacctggtgggcgccagcaagatccgcatgctgctgggcgctgaggccgtgggcctggtgaaggaatgtaatgacaacaccatgagggccttcacctaccgcacccggcagaacttcaagggctttgatgacaacaatgatgacttcctgaccatggccgagtgccagttcatcatcaagcatgagctggagaacctgcgggccaaggatgagaagatgatccctggctactag

SEQ ID NO: 81710 - DNA, 426 bp, Artificial Sequence
  derived and/or modified sequence
atgaaggtgaccctgagcgccctggacaccagcgagagcagcttcacccccctggtggtgattgagctggcccaggatgtgaaggaggagaccaaggagtggctgaagaaccgcatcatcgccaagaagaaggatggaggagcccagctgctcttccggcccctgctgaacaagtatgagcaggagaccctggagaaccagaacctgtacctggtgggcgccagcaagatccgcatgctgctgggcgctgaggccgtgggcctggtgaaggaatgtaatgacaacaccatgagggccttcacctaccgcacccggcagaacttcaagggctttgatgacaacaatgatgacttcctgaccatggccgagtgccagttcatcatcaagcatgagctggagaacctgcgggccaaggatgagaagtag

SEQ ID NO: 81711 - DNA, 1413 bp, Artificial Sequence
  derived and/or modified sequence
atgaaggtgaccctgagcgccctggacaccagcgagagcagcttcacccctctggttgtgattgaacttgcccaggacgtgaaagaagagactaaagaatggcttaagaaccgcataatagccaaaaagaaagacgggggcgcccagctgctattccgtcccctcctcaacaagtacgagcaagagaccctggagaatcagaacctgtacctggttggcgcttcaaaaatcaggatgttactgggcgccgaagctgttggcctggttaaggagtgcaacgacaatacaatgcgggccttcacctataggacccgtcagaacttcaagggctttgacgacaataatgatgattttctgaccatggccgaatgccagttcattattaaacatgagttagagaatttgagggccaaggatgagaagatgatccctggataccctcaggcaaagttgtaccccggaaagtcattgcttagaaggctcttaaccagtggcattgtgattcaggtctttccactgcacgactctgaggccctgaagaagctggaagatacatggtatacacgttttgcacttaaatatcagccaatcgaaaatcaccggcttgaaagcgcctatcagaaccatctgatcttaaaggtattagttttcaacttcttgaactgtttcgcctctctgttctacattgccttcgtcctgaaagacatgaagctgttgcgccagtccctcgcaacacttctaataacatctcaaattctcaatcagattatggaatctttcttgccgtattggcttcagcgcaaacatggtgtgagagtgaagaggaaagtgcaggctctgaaggctgacatagatgctaccctgtacgaacaggtaatcttggaaaaggagatgggcacctacctgggaaccttcgacgattacctcgagttattcttgcagttcggatacgtgtccttgttcagttgtgtgtaccctctcgcagcagcctttgccgtactcaataactttacagaggtaaactcggacgccctcaagatgtgtcgtgtgttcaaacgaccgttttcagaaccaagcgcgaatattggggtgtggcagctggcctttgagacaatgagtgtgatctctgtcgtcaccaattgcgccctgattgggatgtcaccgcaggtgaacgccgtcttcccggaatctaaagccgatttaatcctgatagtagtagctgtagagcatgcattgctggctctgaagttcatccttgctttcgccatacccgataagccaagacatatccagatgaagctggctcgactggagtttgagtcattagaagctctaaaacagcagcagatgaaactggtcacagaaaatctaaaagaggagccaatggaatctggaaaagagaaggccacttag

SEQ ID NO: 81712 - DNA, 423 bp, Artificial Sequence
  derived and/or modified sequence
atgaaggtgaccctgagcgccctggacaccagcgagagcagcttcacaccactagtagtcattgagctcgcgcaggacgtgaaggaagaaactaaagaatggctgaaaaatcgtatcatcgccaagaagaaagatgggggcgcccagctgctgttccgacccctactaaataaatatgagcaagaaaccctggaaaatcagaatttgtacctggtcggggcctcaaagatcagaatgctactcggcgccgaggctgtaggcctcgtgaaagaatgcaacgataacaccatgcgcgcttttacctacagaactagacagaattttaagggtttcgatgacaataacgatgacttcctgaccatggccgagtgccagtttatcataaaacatgagctggaaaacttgcgggcaaaagatgaatag

SEQ ID NO: 81713 - DNA, 339 bp, Artificial Sequence
  derived and/or modified sequence
atgaaggtgaccctgagcgccctggacaccagcgagagcagcttcacccccctggtggtgatcgaactggctcaggatgtgaaagaggaaaccaaagagtggctgaaaaaccgcatcattgctaaaaagaaggatggtggtgcccaacttctgttccggcctctgctgaataagtacgaacaggagacactggaaaatcagaatttatacttggttggtgcttctaagattaggatgttacttggcgctgaggcagtgggccttgtcaaagagtgcaacgataataccatgcgagcatttacgtaccggacccggcaaaacttcaaggggtttgactag

SEQ ID NO: 81714 - DNA, 117 bp, Artificial Sequence
  derived and/or modified sequence
atgaaggtgaccctgagcgccctggacaccagcgagagcagcttcacgcccttagttgtcatcgaattggcccaggacgtgaaggaggagacaaaagagtggctgaagaacagatag

SEQ ID NO: 81715 - DNA, 405 bp, Artificial Sequence
  derived and/or modified sequence
atgaaggtgaccctgagcgccctggacaccagcgagagcagcttcactcccctcgtggtgattgaactggcccaagatgtgaaagaagagacaaaggaatggcttaagaaccgcataatcgccaaaaagaaggatggaggggctcaactactgtttaggcccctgttaaataagtatgagcaagaaactctggagaatcaaaatctctacctggtaggtgcttccaagatacggatgctgctgggagctgaggccgttgggctggtgaaggaatgtaatgacaatactatgagagcctttacgtacaggacaaggcagaattttaagggcttcgacgataacaatgatgacttcctgacgatggcagagtgtcaatttatcatcaaacacgaactggaaaattag

SEQ ID NO: 81716 - DNA, 441 bp, Artificial Sequence
  derived and/or modified sequence
atgaaggtgaccctgagcgccctggacaccagcgagagcagcttcacgcccctcgtcgtgattgaactcgcacaagacgttaaggaggaaaccaaggaatggctcaagaacaggataatcgcaaagaagaaggatggtggagcacagttgctcttcagaccactgctgaataagtatgaacaggaaaccctggagaatcaaaacctgtacttggtcggcgcctccaagattagaatgctgttgggcgcggaggccgttgggttggtcaaggaatgtaatgacaacactatgagagcattcacatacagaacacgccagaattttaagggctttgatgataacaacgatgattttcttacaatggccgaatgtcagtttattatcaagcacgaactggagaacctaagagcaaaggacgagaagatgatccccggctattag

SEQ ID NO: 81717 - DNA, 426 bp, Artificial Sequence
  derived and/or modified sequence
atgaaggtgaccctgagcgccctggacaccagcgagagcagcttcactccactggtggtgatcgagctggcccaagacgttaaagaggaaacaaaagagtggttgaaaaatcgcatcatcgccaagaaaaaggacgggggcgcgcagttgctgttccgtcctctgctgaataagtacgagcaggagaccctggaaaaccaaaacttatacctggttggtgcatcaaagataagaatgctgctgggggcggaggctgtgggtctggtaaaagagtgtaacgacaacaccatgcgggcgtttacgtaccggacacggcagaacttcaaaggctttgatgacaacaacgacgacttcttgaccatggccgagtgccagttcataattaaacatgaactagagaaccttcgcgctaaggacgaaaaatag

SEQ ID NO: 81718 - DNA, 2039 bp, Artificial Sequence
  derived and/or modified sequence
ccggttctcgccggctctcggacccgcctccgaagacgtggagcgctgcggcggctgatttgtcaaagatgaaagtgaccttatcagctttggatacttctgagagttctttcacacctttggtggtcatagaacttgctcaggatgtcaaagaagaaaccaaagaatggctgaaaaacagaattatagctaaaaaaaaagatggaggtgcccagttgttgtttagaccattgttaaataaatatgaacaagaaacactagaaaatcagaacttatatcttgttggtgcctccaagattagaatgttactaggggcagaagcagtgggattggtaaaagagtgcaatgataacaccatgagagccttcacatacagaaccagacagaacttcaaaggttttgatgataacaatgatgatttcctgacaatggcagaatgtcaattcattatcaaacatgaacttgaaaatcttagagctaaagatgaaaaaatgatccctggttaccctcaggcaaagttgtatccaggaaaatcattgttgagaagattgctcacgtctggcatcgtgattcaggtgtttccactgcatgacagtgaagccctgaagaagcttgaggacacctggtacactcggtttgctttgaagtatcagcccatagagaatcacagattggaatctgcctatcagaaccatctaattctgaaagttttagtgttcaacttcctcaattgctttgcctcactcttctatattgcctttgtcttgaaagatatgaagcttttgcgccagagcttggccactctcctaattacctcccagatcctcaaccaaattatggaatcttttcttccttattggctccaaaggaagcatggtgtgcgggtgaagaggaaggtgcaggctttaaaggcagacattgatgctacattatatgaacaagtcatcctggaaaaagaaatgggaacttatttgggcacctttgatgattacttggagttattcctgcagtttggttatgtgagccttttctcctgtgtttacccattagcagctgcctttgctgtgttaaataacttcactgaagtaaattcagatgccttaaaaatgtgcagggtcttcaaacgtccattctcagaaccttcagccaatattggtgtgtggcagttggcttttgaaacgatgagtgttatatctgtggtcactaactgtgcgctgattggaatgtcaccacaagtgaatgcagtctttccagaatcaaaagcagacctcattttgattgtagtagcagtggagcacgcactcctggctttaaagtttatacttgcatttgccatacctgataagccacggcatatccagatgaaactagccagactggaatttgagtctttggaggcactcaagcagcagcaaatgaagctcgtgaccgagaacctgaaggaggaaccaatggaaagcgggaaggagaaggcaacctgagtgcccagcgtgcccagctgccctgttggcagaggcctgtgtctgtgccacacctgccacggtggcagggggggtacccggggcagcatcgtggctcctgaacccagacccaatgcttagccaaacgaagtggctcccatgtggcaagcacccttctcagtttcgcagtggcttggctcgggatccttggcagttcccccagccccaccctgtctgctccttcccagttccttcccgggccccacacgctgctccagctgccaactttgctgcagagccactgccgcccttgagcctctcaccatgagtgagccaccagctctccacgttcccctcatagcagtgtcactcccaaccccaccatggcccagggacccgtggacaggttggggatggggtgtgtgcccactgtgctcatcacaggagcctcagttgagagtgagcggggtacagtaaggcagtgcttcccacactggacctctttcctggttctcttttgcaatacattaacagaccctttatcaacataaacaatagtaactgagctattaaaggcaa

SEQ ID NO: 81719 - DNA, 511 bp, Artificial Sequence
  derived and/or modified sequence
atcccctccaaggaagcgccgccccttcctacggctacgggaaggatcgtccagtggctgaggctggacagagcacagatttgtcaaagatgaaagtgaccttatcagctttggatacttctgagagttctttcacacctttggtggtcatagaacttgctcaggatgtcaaagaagaaaccaaagaatggctgaaaaacagaattatagctaaaaaaaaagatggaggtgcccagttgttgtttagaccattgttaaataaatatgaacaagaaacactagaaaatcagaacttatatcttgttggtgcctccaagattagaatgttactaggggcagaagcagtgggattggtaaaagagtgcaatgataacaccatgagagccttcacatacagaaccagacagaacttcaaaggttttgatgataacaatgatgatttcctgacaatggcagaatgtcaattcattatcaaacatgaacttgaaaatcttagagctaaagatgaaaa

SEQ ID NO: 81720 - DNA, 641 bp, Artificial Sequence
  derived and/or modified sequence
gcgtccgccatccccagccagcatgcactagttctcccgcccgacgctcccgggtgtaagcgcggggcgggacagtcagcccagagggactggcgagactcacccgaatgagttaggtgttttagctaatttgaataatgactgtattcatgcatcaccccgtcggtgttggctgtcaggtggcaccttggggacggagtagagatggggtttcaccatgttggccaggatggtctcaatcttctgacctcatgatccgcccacctcggcctcccaaggtgctgggattacagatttgtcaaagatgaaagtgaccttatcagctttggatacttctgagagttctttcacacctttggtggtcatagaacttgctcaggatgtcaaagaagaaaccaaagaatggctgaaaaacagaattatagctaaaaaaaaagatggaggtgcccagttgttgtttagaccattgttaaataaatatgaacaagaaacactagaaaatcagaacttatatcttgttggtgcctccaagattagaatgttactaggggcagaagcagtgggattggtaaaagagtgcaatgataacaccatgagagccttcacatacagaaccagacagaacttcaaaggttttgatg

SEQ ID NO: 81721 - DNA, 497 bp, Artificial Sequence
  derived and/or modified sequence
ggctttgcgtccgccatccccagccagcatgcactagttctcccgcccgacgctcccgggtgtaagcgcggggcgggacagtcagcccagagggactggcgagactcacccgaatgagttaggtgttttagctaatttgaataatgactgtattcatgcatcaccccgtcggtgttggctgtcaggtggcaccttggggacggaggtgcgtccggtcctggaagagcctagctagtgtccgatagatggtgcagtggcaaatgaaatggcgtaatcgagagatggggtttcaccatgttggccaggatggtctcaatcttctgacctcatgatccgcccacctcggcctcccaaggtgctgggattacagatttgtcaaagatgaaagtgaccttatcagctttggatacttctgagagttctttcacacctttggtggtcatagaacttgctcaggatgtcaaagaagaaaccaaagaatggctgaaaaacagaat

SEQ ID NO: 81722 - DNA, 1413 bp, Artificial Sequence
  derived and/or modified sequence
atgaaagtaaccctgtcagcccttgacactagcgaaagttcatttactccattagtcgtaattgaacttgcccaagatgtaaaggaagagacaaaagagtggctcaagaacagaatcattgccaagaagaaggacggcggagcccaattattgtttcggcctcttcttaacaagtatgaacaggagaccctcgagaaccaaaatctgtaccttgtgggggcatctaagatccggatgctgctgggggctgaggccgtcggcctggtaaaagagtgtaatgataacacgatgcgcgcttttacttacaggacccgccagaactttaagggcttcgacgacaacaatgacgatttcctcacaatggccgaatgccaatttattattaagcacgaactagagaacttgcgtgcaaaggatgaaaagatgattccgggttacccacaggccaagctgtaccccggaaaatcgctccttcggaggctcttgactagtggcatagtgattcaagtcttccctctgcatgatagcgaagccttaaaaaagcttgaggatacctggtatacaaggttcgcgctgaaataccagcccatcgagaaccaccgactggagagcgcttaccaaaatcacctcattctgaaggtgctcgtcttcaactttcttaactgtttcgcaagcctgttctacattgcgttcgttttaaaagatatgaagctgttaagacagagccttgcgaccctacttattactagccagatactgaaccagattatggagtctttcctgccctattggttacagcgaaaacacggagtcagagtcaaacggaaggtccaggcgctgaaagcagacatcgatgctacactatatgagcaggtcattctggagaaagagatgggcacctacctcggcactttcgacgactatttggaactgtttctccagttcggctacgtgtcccttttcagttgcgtgtaccctctagccgcagccttcgcagtgctaaataactttacggaggtgaactccgatgcactgaaaatgtgtagggttttcaaacgccctttttccgaacccagcgccaacattggggtgtggcaattagcctttgagaccatgtcagtcataagcgtggtgacgaattgtgcactaataggaatgagtccccaggtgaacgccgtgttcccggagtccaaagcagacctgatcttgattgtggttgcagtcgagcacgcattactggcgctcaagttcatcctcgccttcgctattccagataaaccacggcacatacagatgaagctcgctaggctggagttcgaaagtctcgaagcgctgaagcaacagcagatgaaattggtgacagagaacctgaaagaagaacccatggagtccggcaaagagaaggcaacctag

SEQ ID NO: 81723 - DNA, 423 bp, Artificial Sequence
  derived and/or modified sequence
atgaaagtgactctgtccgccttggatactagtgagagtagcttcactcccctcgtggtgatcgagctagcccaggacgtaaaggaagagacaaaggaatggctgaaaaatcgcatcatcgctaaaaagaaagatgggggagcccagctactctttagaccactgctgaataaatacgaacaggaaacgcttgagaaccagaacctgtacctcgtcggcgctagtaaaatccgaatgttgctgggtgcggaagctgtgggcctcgttaaagaatgtaatgacaacaccatgagagccttcacgtatagaaccagacaaaattttaaagggtttgacgataacaatgacgacttcttaacaatggccgagtgccaattcatcatcaagcacgagctcgagaatttgagagccaaggacgagtag

SEQ ID NO: 81724 - DNA, 339 bp, Artificial Sequence
  derived and/or modified sequence
atgaaagttacactatccgctctggatacttcagaatcgtcattcacccctctggtggttattgaactggctcaggatgtgaaggaagagacgaaggagtggctgaagaatagaattattgcgaagaagaaggatggaggcgctcaactgttgtttcgaccccttcttaacaagtacgaacaggagactttggagaaccagaacctgtatctggtgggagcaagcaaaattagaatgctcctgggggctgaagccgtcgggcttgtgaaggagtgcaatgataacacaatgcgggctttcacctatagaacaagacagaacttcaagggctttgactag

SEQ ID NO: 81725 - DNA, 117 bp, Artificial Sequence
  derived and/or modified sequence
atgaaagtcacgctaagcgctctcgatacaagcgagtcatcctttaccccacttgtggttatcgaactcgcacaagatgtgaaggaggagaccaaagagtggttaaagaatcgttag

SEQ ID NO: 81726 - DNA, 405 bp, Artificial Sequence
  derived and/or modified sequence
atgaaggtaacactgtctgccctggacacaagcgaatccagcttcacccctttagtggtgatcgaactggcacaggatgtcaaggaagagaccaaggagtggctcaaaaacagaatcatagccaagaaaaaagatggtggcgctcaattgctgttcaggcccctgctgaacaaatatgaacaagaaactctggaaaaccagaatttatacctagtcggtgcctcgaaaattcgcatgcttcttggtgctgaggccgtaggtctggtgaaagaatgtaacgataacacaatgcgggcatttacataccggacaagacaaaactttaagggattcgatgataataacgacgactttctgaccatggcggaatgtcaatttatcatcaagcatgaactggaaaattag

SEQ ID NO: 81727 - DNA, 441 bp, Artificial Sequence
  derived and/or modified sequence
atgaaggtcactttatctgccctggacaccagcgagtccagcttcacaccgctagtggtaatcgaattggcccaggacgtgaaggaggagaccaaagaatggctgaagaatcgcataatcgccaaaaagaaggacggaggagcccaactgctgttcaggccattgcttaacaaatacgaacaggagaccctcgaaaaccagaatctctatctagtgggcgcatctaagatccggatgctcctgggagcagaggcggtaggactggtcaaggagtgtaacgacaatacaatgagggccttcacgtacagaacacggcagaacttcaagggattcgatgacaataacgacgatttcctgactatggccgagtgtcagttcatcatcaagcacgagctggagaacttgagagctaaggacgaaaagatgatccctggctactag

SEQ ID NO: 81728 - DNA, 426 bp, Artificial Sequence
  derived and/or modified sequence
atgaaagttaccctctccgccctggatacctccgagagttcatttacccccctggtggtgattgaactggcgcaggacgtcaaggaagagactaaggagtggttgaaaaatcgaatcattgctaagaaaaaagacgggggagcccagctcctttttagacccctgctgaataaatacgagcaagagacactcgagaatcagaacctgtatctcgtgggcgcaagtaagattaggatgctgttgggtgccgaagcagtcggtctcgttaaggagtgtaacgataacactatgcgtgccttcacatacagaacccgccagaattttaaggggtttgacgacaataacgacgacttcttaactatggccgaatgccagttcatcataaagcacgagctcgaaaaccttagagccaaggatgagaaatag

SEQ ID NO: 81729 - DNA, 560 bp, Artificial Sequence
  derived and/or modified sequence
ttcctacggctacgggaaggatcgtccagtggctgaggctggacagagcacagtagagatggggtttcaccatgttggccaggatggtctcaatcttctgacctcatgatccgcccacctcggcctcccaaggtgctgggattacagatttgtcaaagatgaaagtgaccttatcagctttggatacttctgagagttctttcacacctttggtggtcatagaacttgctcaggatgtcaaagaagaaaccaaagaatggctgaaaaacagaattatagctaaaaaaaaagatggaggtgcccagttgttgtttagaccattgttaaataaatatgaacaagaaacactagaaaatcagaacttatatcttgttggtgcctccaagattagaatgttactaggggcagaagcagtgggattggtaaaagagtgcaatgataacaccatgagagccttcacatacagaaccagacagaacttcaaaggttttgatgataacaatgatgatttcctgacaatggcagaatgtcaattcattatcaaacatgaacttgaaaat

SEQ ID NO: 81730 - DNA, 575 bp, Artificial Sequence
  derived and/or modified sequence
agggcacctcggaccccccagctgtccgcagcagagcccggccccttgcagccacagagccccggccgctgcaggctccaggagctccgcctggtcgccgccctgcgttcccgggccgcctcccgatttgtcaaagatgaaagtgaccttatcagctttggatacttctgagagttctttcacacctttggtggtcatagaacttgctcaggatgtcaaagaagaaaccaaagaatggctgaaaaacagaattatagctaaaaaaaaagatggaggtgcccagttgttgtttagaccattgttaaataaatatgaacaagaaacactagaaaatcagaacttatatcttgttggtgcctccaagattagaatgttactaggggcagaagcagtgggattggtaaaagagtgcaatgataacaccatgagagccttcacatacagaaccagacagaacttcaaaggttttgatgataacaatgatgatttcctgacaatggcagaatgtcaattcattatcaaacatgaacttgaaaatcttagagctaaagatgaaaaaatgatccctggttacc

SEQ ID NO: 81731 - DNA, 545 bp, Artificial Sequence
  derived and/or modified sequence
gctctcggacccgcctccgaagacgtggagcgctgcggcggctggcagctgccctaggtacaaggagggaggctcccacaattgctctcaccattaactgcctgcctgtagatttgtcaaagatgaaagtgaccttatcagctttggatacttctgagagttctttcacacctttggtggtcatagaacttgctcaggatgtcaaagaagaaaccaaagaatggctgaaaaacagaattatagctaaaaaaaaagatggaggtgcccagttgttgtttagaccattgttaaataaatatgaacaagaaacactagaaaatcagaacttatatcttgttggtgcctccaagattagaatgttactaggggcagaagcagtgggattggtaaaagagtgcaatgataacaccatgagagccttcacatacagaaccagacagaacttcaaaggttttgatgataacaatgatgatttcctgacaatggcagaatgtcaattcattatcaaacatgaacttgaaaatcttagagctaaagatgaaaaa

SEQ ID NO: 81732 - DNA, 1413 bp, Artificial Sequence
  derived and/or modified sequence
atgaaggtgaccctgagcgccctggacaccagcgagagcagcttcacccccctggtggtgatcgagctggcccaggacgtgaaggaggagaccaaggagtggctgaagaacagaatcatcgccaagaagaaggacggcggcgcccagctgctgttcagacccctgctgaacaagtacgagcaggagaccctggagaaccagaacctgtacctggtgggcgccagcaagatcagaatgctgctgggcgccgaggccgtgggcctggtgaaggagtgcaacgacaacaccatgagagccttcacctacagaaccagacagaacttcaagggcttcgacgacaacaacgacgacttcctgaccatggccgagtgccagttcatcatcaagcacgagctggagaacctgagagccaaggacgagaagatgatccccggctacccccaggccaagctgtaccccggcaagagcctgctgagaagactgctgaccagcggcatcgtgatccaggtgttccccctgcacgacagcgaggccctgaagaagctggaggacacctggtacaccagattcgccctgaagtaccagcccatcgagaaccacagactggagagcgcctaccagaaccacctgatcctgaaggtgctggtgttcaacttcctgaactgcttcgccagcctgttctacatcgccttcgtgctgaaggacatgaagctgctgagacagagcctggccaccctgctgatcaccagccagatcctgaaccagatcatggagagcttcctgccctactggctgcagagaaagcacggcgtgagagtgaagagaaaggtgcaggccctgaaggccgacatcgacgccaccctgtacgagcaggtgatcctggagaaggagatgggcacctacctgggcaccttcgacgactacctggagctgttcctgcagttcggctacgtgagcctgttcagctgcgtgtaccccctggccgccgccttcgccgtgctgaacaacttcaccgaggtgaacagcgacgccctgaagatgtgcagagtgttcaagagacccttcagcgagcccagcgccaacatcggcgtgtggcagctggccttcgagaccatgagcgtgatcagcgtggtgaccaactgcgccctgatcggcatgagcccccaggtgaacgccgtgttccccgagagcaaggccgacctgatcctgatcgtggtggccgtggagcacgccctgctggccctgaagttcatcctggccttcgccatccccgacaagcccagacacatccagatgaagctggccagactggagttcgagagcctggaggccctgaagcagcagcagatgaagctggtgaccgagaacctgaaggaggagcccatggagagcggcaaggagaaggccacctag

SEQ ID NO: 81733 - DNA, 423 bp, Artificial Sequence
  derived and/or modified sequence
atgaaggtgaccctgagcgccctggacaccagcgagagcagcttcacccccctggtggtgatcgagctggcccaggacgtgaaggaggagaccaaggagtggctgaagaacagaatcatcgccaagaagaaggacggcggcgcccagctgctgttcagacccctgctgaacaagtacgagcaggagaccctggagaaccagaacctgtacctggtgggcgccagcaagatcagaatgctgctgggcgccgaggccgtgggcctggtgaaggagtgcaacgacaacaccatgagagccttcacctacagaaccagacagaacttcaagggcttcgacgacaacaacgacgacttcctgaccatggccgagtgccagttcatcatcaagcacgagctggagaacctgagagccaaggacgagtag

SEQ ID NO: 81734 - DNA, 339 bp, Artificial Sequence
  derived and/or modified sequence
atgaaggtgaccctgagcgccctggacaccagcgagagcagcttcacccccctggtggtgatcgagctggcccaggacgtgaaggaggagaccaaggagtggctgaagaacagaatcatcgccaagaagaaggacggcggcgcccagctgctgttcagacccctgctgaacaagtacgagcaggagaccctggagaaccagaacctgtacctggtgggcgccagcaagatcagaatgctgctgggcgccgaggccgtgggcctggtgaaggagtgcaacgacaacaccatgagagccttcacctacagaaccagacagaacttcaagggcttcgactag

SEQ ID NO: 81735 - DNA, 117 bp, Artificial Sequence
  derived and/or modified sequence
atgaaggtgaccctgagcgccctggacaccagcgagagcagcttcacccccctggtggtgatcgagctggcccaggacgtgaaggaggagaccaaggagtggctgaagaacagatag

SEQ ID NO: 81736 - DNA, 405 bp, Artificial Sequence
  derived and/or modified sequence
atgaaggtgaccctgagcgccctggacaccagcgagagcagcttcacccccctggtggtgatcgagctggcccaggacgtgaaggaggagaccaaggagtggctgaagaacagaatcatcgccaagaagaaggacggcggcgcccagctgctgttcagacccctgctgaacaagtacgagcaggagaccctggagaaccagaacctgtacctggtgggcgccagcaagatcagaatgctgctgggcgccgaggccgtgggcctggtgaaggagtgcaacgacaacaccatgagagccttcacctacagaaccagacagaacttcaagggcttcgacgacaacaacgacgacttcctgaccatggccgagtgccagttcatcatcaagcacgagctggagaactag

SEQ ID NO: 81737 - DNA, 441 bp, Artificial Sequence
  derived and/or modified sequence
atgaaggtgaccctgagcgccctggacaccagcgagagcagcttcacccccctggtggtgatcgagctggcccaggacgtgaaggaggagaccaaggagtggctgaagaacagaatcatcgccaagaagaaggacggcggcgcccagctgctgttcagacccctgctgaacaagtacgagcaggagaccctggagaaccagaacctgtacctggtgggcgccagcaagatcagaatgctgctgggcgccgaggccgtgggcctggtgaaggagtgcaacgacaacaccatgagagccttcacctacagaaccagacagaacttcaagggcttcgacgacaacaacgacgacttcctgaccatggccgagtgccagttcatcatcaagcacgagctggagaacctgagagccaaggacgagaagatgatccccggctactag

SEQ ID NO: 81738 - DNA, 426 bp, Artificial Sequence
  derived and/or modified sequence
atgaaggtgaccctgagcgccctggacaccagcgagagcagcttcacccccctggtggtgatcgagctggcccaggacgtgaaggaggagaccaaggagtggctgaagaacagaatcatcgccaagaagaaggacggcggcgcccagctgctgttcagacccctgctgaacaagtacgagcaggagaccctggagaaccagaacctgtacctggtgggcgccagcaagatcagaatgctgctgggcgccgaggccgtgggcctggtgaaggagtgcaacgacaacaccatgagagccttcacctacagaaccagacagaacttcaagggcttcgacgacaacaacgacgacttcctgaccatggccgagtgccagttcatcatcaagcacgagctggagaacctgagagccaaggacgagaagtag

SEQ ID NO: 81739 - DNA, 1743 bp, Artificial Sequence
  derived and/or modified sequence
atgaagcccgcccagagaaacctgtacagagacgtgatgctggagaactacagcaacctggtgaccgtgggctgccaggtgaccaagcccgacgtgatcttcaagctggagcaggaggaggagccctgggtgatggaggaggagatgttcggcagacactgccccgaggtgtgggaggtggacgagcagatcaagaagcagcaggagaccctggtgagaaaggtgaccagcatcagcaagaagatcctgatcaaggagaaggtgatcgagtgcaagaaggtggccaagatcttccccctgagcagcgacatcgtgaccagcagacagagcttctacgactgcgacagcctggacaagggcctggagcacaacctggacctgctgagatacgagaagggctgcgtgagagagaagcagagcaacgagttcggcaagcccttctaccactgcgccagctacgtggtgacccccttcaagtgcaaccagtgcggccaggacttcagccacaagttcgacctgatcagacacgagagaatccacgccggcgagaagccctacgagtgcaaggagtgcggcaaggccttcagcagaaaggagaacctgatcacccaccagaagatccacaccggcgagaagccctacaagtgcaacgagtgcggcaaggccttcatccagatgagcaacctgatcagacaccacagaatccacaccggcgagaagccctacgcctgcaaggactgctggaaggccttcagccagaagagcaacctgatcgagcacgagagaatccacaccggcgagaagccctacgagtgcaaggagtgcggcaagagcttcagccagaagcagaacctgatcgagcacgagaagatccacaccggcgagaagccctacgcctgcaacgagtgcggcagagccttcagcagaatgagcagcgtgaccctgcacatgagaagccacaccggcgagaagccctacaagtgcaacaagtgcggcaaggccttcagccagtgcagcgtgttcatcatccacatgagaagccacaccggcgagaagccctacgtgtgcagcgagtgcggcaaggccttcagccagagcagcagcctgaccgtgcacatgagaaaccacaccgccgagaagccctacgagtgcaaggagtgcggcaaggccttcagcagaaaggagaacctgatcacccaccagaagatccacaccggcgagaagccctacgagtgcagcgagtgcggcaaggccttcatccagatgagcaacctgatcagacaccagagaatccacaccggcgagaagccctacgcctgcaccgtgtgcggcaaggccttcagccagaagagcaacctgaccgagcacgagaagatccacaccggcgagaagccctaccactgcaaccagtgcggcaaggccttcagccagagacagaacctgctggagcacgagaagatccacaccggcgagaagcccttcaagtgcaacgagtgcggcaaggccttcagcagaatcagcagcctgaccctgcacgtgagaagccacaccggcgagaagccctacgagtgcaacaagtgcggcaaggccttcagccagtgcagcctgctgatcatccacatgagaagccacaccggcgagaagcccttcgagtgcaacgagtgcggcaaggccttcagccagagagccagcctgagcatccacaagagaggccacaccggcgagagacaccaggtgtactag

SEQ ID NO: 81740 - DNA, 1743 bp, Artificial Sequence
  derived and/or modified sequence
atgaaaccggcacagcggaatctttaccgggatgtcatgctggagaattacagtaacttggtgacagtcggatgccaggttacaaagcccgacgtgatttttaagctcgagcaggaggaggagccttgggtgatggaagaggagatgtttggaaggcattgccccgaagtatgggaagttgatgagcagatcaaaaaacaacaggagactctagttcgcaaagtcaccagtatcagtaagaagatcctgatcaaggaaaaggtcatcgagtgtaaaaaggtcgcaaagattttcccactttcctccgacattgttactagccgccagagcttctacgactgcgattccctggacaaaggattggaacataacctggacctgctgcgctacgaaaagggatgcgtcagggaaaagcagtccaatgaattcggtaagccattctatcactgtgcatcctatgttgtcaccccgttcaaatgtaatcagtgcggacaggactttagccacaagttcgacctgatccggcatgaacggatacatgctggcgagaaaccatacgagtgtaaggaatgcggcaaagcctttagccggaaggagaacctgatcacccaccagaagatccacactggggaaaagccctacaaatgtaatgaatgtggcaaagctttcatccagatgagtaatctgattaggcatcatcgcattcatacaggtgaaaagccttacgcctgcaaagattgctggaaagctttcagtcagaaatccaatcttattgaacacgagcgcattcataccggggagaagccctacgaatgtaaggagtgcgggaagtcttttagccagaaacagaatctgatagaacatgagaaaatccacactggggaaaagccctacgcgtgcaacgaatgcgggcgtgcattttcacgaatgagttccgttacgcttcatatgcgcagccacactggagagaagccatacaagtgtaataagtgcggtaaggcatttagccaatgtagcgttttcatcattcacatgagatcccacactggggaaaaaccatacgtgtgcagcgaatgtggaaaagcctttagccagagcagcagcctgacggtgcacatgaggaaccatacagccgagaaaccatatgaatgtaaggagtgcggtaaggcgttcagccggaaagagaatttgattacccatcaaaaaattcacacgggggagaaaccgtatgagtgctcagagtgcgggaaggcttttatacagatgtcaaatttgatccggcaccagcgtattcatacgggagagaaaccttacgcctgcaccgtgtgcggtaaggcctttagtcagaaatccaacctgacagagcatgagaaaatccacactggggaaaagccataccactgtaatcagtgcggaaaggcttttagccagaggcagaacctccttgaacacgagaaaattcatacaggcgagaaacctttcaagtgcaatgagtgcggaaaggccttcagcaggataagttctctgacactccacgttcggtctcacaccggcgagaagccttacgagtgcaacaaatgtggaaaagcttttagccagtgcagcctgcttattatccacatgcggagtcacaccggtgaaaagcccttcgaatgtaatgaatgtggaaaggccttttcccagcgcgcatctttatctattcataaaagaggacacacaggtgaaaggcaccaggtgtattag

SEQ ID NO: 81741 - DNA, 1743 bp, Artificial Sequence
  derived and/or modified sequence
atgaagccagcccagaggaacctgtacagagatgtgatgctggagaactacagcaacctggtgacagtgggctgccaggtgaccaagccagatgtgatcttcaagctggagcaggaggaggagccctgggtgatggaggaggagatgtttggccgccactgcccagaggtgtgggaggtggatgagcagatcaagaagcagcaggagaccctggtgaggaaggtgaccagcatcagcaagaagatcctgatcaaggagaaggtgattgagtgcaagaaggtggccaagatcttccccctgagcagtgacatcgtgaccagccggcagagcttctatgactgtgacagcctggacaagggcctggagcacaacctggacctgctgcgctatgagaagggctgtgtgcgggagaagcagagcaatgaatttgggaagcccttctaccactgtgccagctatgtggtgacccccttcaagtgcaaccagtgtggccaggacttcagccacaagtttgacctgatcagacatgagcgcatccatgctggggagaagccctatgagtgcaaggaatgtgggaaggccttcagcaggaaagaaaatctcatcacccaccagaagatccacactggagagaagccctacaagtgcaatgaatgtgggaaggccttcatccagatgagcaacctgatccgccaccaccgcatccacactggagagaagccctatgcctgcaaggactgctggaaggccttcagccagaagagcaacctgattgagcacgagcgcatccacactggagagaagccctatgagtgcaaggaatgtgggaagagcttcagccagaagcagaacctgattgagcacgagaagatccacactggagagaagccctatgcctgcaatgaatgtggccgggccttcagcaggatgagctctgtgaccctgcacatgaggagccacactggagagaagccctacaagtgcaacaagtgtgggaaggccttcagccagtgcagcgtcttcatcatccacatgaggagccacactggagagaagccctacgtgtgcagtgaatgtgggaaggccttcagccagagcagcagcctgactgtgcacatgaggaaccacacagctgagaagccctatgagtgcaaggaatgtgggaaggccttcagcaggaaagaaaatctcatcacccaccagaagatccacactggagagaagccctatgaatgttctgaatgtgggaaggccttcatccagatgagcaacctgatccgccaccagaggatccacactggagagaagccctatgcctgcaccgtgtgtgggaaggccttcagccagaagagcaacctgacagagcacgagaagatccacactggagagaagccctaccactgcaaccagtgtgggaaggccttcagccagaggcagaacctgctggagcacgagaagatccacactggagagaagcccttcaagtgcaatgaatgtgggaaggccttcagccgcatcagcagcctgaccctgcacgtgcgcagccacactggagagaagccctatgagtgcaacaagtgtgggaaggccttcagccagtgcagcctgctgatcatccacatgaggagccacactggagagaagccctttgaatgtaatgaatgtgggaaggccttcagccagagggccagcctgagcatccacaagaggggccacactggagagcggcaccaggtgtactag

SEQ ID NO: 81742 - DNA, 1743 bp, Artificial Sequence
  derived and/or modified sequence
atgaagcccgcccagcggaacctgtaccgggacgtgatgctggagaattattctaacctggtgaccgtggggtgccaggtgacaaaacctgatgtgatttttaaactggagcaagaagaggagccatgggtgatggaggaggagatgtttggccgtcattgccctgaggtttgggaggtcgacgagcagataaaaaagcaacaagagacactggtgagaaaagtgacttctataagcaagaagatattaatcaaggaaaaagtgattgaatgtaaaaaagtcgcaaaaatattccctctcagcagtgacatagtgacatcccggcagagcttctacgactgcgattcactggataagggactagagcacaatctggatttgctgcgatacgaaaaaggctgtgttcgggaaaaacagtcgaacgaatttggtaaacccttctaccactgcgcatcctatgtggtgacaccctttaagtgtaatcagtgtgggcaggacttttctcacaaatttgacttaatcaggcatgaacgaatccatgccggggagaagccatacgagtgcaaggagtgcggcaaagcgttttctcggaaggagaatctgatcactcaccaaaagatccacaccggtgaaaaaccatataagtgcaacgaatgcgggaaagcattcatccaaatgtctaacctgatcaggcaccatcgcatacatactggagaaaaaccttacgcctgcaaggattgctggaaagcctttagtcagaagtctaatctgatcgagcatgagaggatccacacaggcgagaaaccatacgagtgtaaggaatgtgggaaaagcttttcccagaagcagaatctgatagagcatgagaaaattcacacaggtgaaaagccctatgcatgcaatgagtgcggccgggctttcagtcgaatgagcagcgtcacgcttcatatgagatcgcataccggagagaaaccatacaaatgtaacaaatgcggcaaggcattttcacagtgttctgtgttcatcatacacatgcgatcccatacaggtgagaagccctatgtttgttctgagtgtggcaaggccttctcacaaagctccagcctgactgtgcacatgcgcaaccacacagccgagaagccatatgaatgtaaggagtgcggtaaggcttttagtcgcaaggagaatttgataacgcaccagaaaatccatacgggagaaaagccctacgagtgttccgaatgcggaaaggccttcatccaaatgagcaatctcatcagacaccagcggattcatactggtgagaagccctatgcctgcaccgtgtgcgggaaggcgtttagccaaaagagcaatctgactgaacatgagaaaatccacaccggtgagaagccctatcactgcaatcagtgtggaaaggccttcagccagcgccagaacctgctcgagcacgagaaaatccacaccggtgagaaaccattcaaatgcaacgaatgcggtaaggcttttagccgaattagttctttgactctgcacgtccgaagccatacaggtgagaagccatacgagtgtaacaaatgcggcaaagcttttagccagtgtagcctgctgataatccatatgagatcacacacgggagagaaacccttcgagtgcaatgagtgtgggaaggccttcagtcaacgggccagcctgtccattcataaaaggggccacacaggtgagagacaccaggtgtattag

SEQ ID NO: 81743 - DNA, 1743 bp, Artificial Sequence
  derived and/or modified sequence
atgaaaccagcacagcgaaacctgtatcgggacgttatgttggaaaactacagcaacctcgtaacagttggctgtcaggttactaagcccgatgtgatcttcaagctcgagcaagaagaagagccttgggtgatggaagaggagatgtttgggagacattgcccagaagtctgggaagtggacgagcagataaagaagcaacaggagacgttggtgcgcaaagttacgtccatctcaaagaaaatcctcattaaagagaaggtgattgagtgtaagaaagtggccaagatcttccccttgtcttccgatattgtcacaagcagacagtctttttatgattgtgacagtctggacaaaggacttgagcacaacttggaccttctgcgctacgagaagggatgtgttagagaaaaacagtccaacgaattcggaaaaccattttatcattgcgccagctacgtagtgaccccattcaaatgcaatcagtgtggtcaggactttagtcacaaattcgatctgattcgccatgagaggattcatgccggagagaaaccatacgagtgcaaagaatgcggtaaggcctttagcaggaaggagaacctgattactcatcagaagattcacaccggcgagaagccttacaagtgtaacgagtgtggaaaggctttcatccagatgtctaaccttatcagacatcacaggatccataccggcgagaaaccctatgcttgcaaagactgctggaaggcattctcccaaaaaagcaatctgatcgagcacgagaggatccataccggggaaaagccttatgaatgcaaagagtgcgggaagtcattctcgcaaaagcaaaatctgattgaacatgagaaaatacacactggcgagaaaccttacgcatgtaacgaatgtggccgtgcctttagccgcatgagcagcgtgaccctgcacatgagatcccacaccggcgagaagccttacaaatgcaacaagtgtggaaaggcctttagtcagtgctcggtctttatcatccacatgaggtctcatacgggcgaaaaaccgtatgtctgctccgaatgtggtaaagccttctctcagtcctctagcctgactgtgcatatgcgtaaccatacagccgaaaaaccgtatgagtgcaaggagtgtggaaaagctttctcacggaaagagaatctgatcacacaccagaagatccacaccggtgagaaaccttatgagtgctctgagtgcggaaaagctttcatacaaatgagcaatctgattagacaccagcgaatccataccggagaaaagccttatgcttgtaccgtttgcggcaaggcttttagccagaagagcaatctaactgaacacgaaaagatccatacaggcgagaagccttaccactgtaatcagtgcgggaaggctttttctcagcggcagaatttactagagcatgagaaaatccatacgggggaaaaaccgtttaagtgtaatgagtgtgggaaagccttctcgcgcatttcgtccctgaccttgcatgtccgatctcatacgggagagaagccttatgagtgcaacaagtgtggcaaagcattcagccaatgtagtctgctgattattcacatgcggtctcacaccggcgagaagccgtttgaatgcaacgagtgcggaaaagcattctctcagagggcttccctctcaattcacaagagaggccacaccggggaaagacaccaggtttattag

SEQ ID NO: 81744 - protein, 583 aa, Artificial Sequence
  derived and/or modified sequence
MTSQSSVISNSCVTMERLSHMMERKAWCSQESALSEEEEDTTRPLETVTFKDVAVDLTQEEWEQMKPAQRNLYRDVMLENYSNLVTVGCQVTKPDVIFKLEQEEEPWVMEEEMFGRHCPEPRRGENCCASEVMAEGLKFKDVVIYFSQKEWECLHSAQKDLYRDVMLENYGNLVLLGLSDTKPNVISLLEQKKEPWMVKRKETKEWCPDWEFGRETKNLSPKENIYEIRSPQQEKARVIREIRCQVERQQGHQEGHFRPAVIPFTSMQCTAHREYQWLHTGEKSCECRKCKNAFRYQSCPIQHEIIHNKEKEPECGECRKIFNSGSDLIKHQTLHESKKHSENNKCAFNHDSGITQPQSINTGEKPHKCKECGKAFRSSSQISQHQRMHLGEKPYKCRECGKAFPSTAQLNLHQRIHTDEKYYESKACGKAFTRPSHLFRHQRIHTGEKPHKCKECGKAFRYDTQLSLHQIIHTGERRYECRECGKVYSCASQLSLHQRIHTGEKPHECKECGKAFISDSHLIRHQSVHTGEKPCKCKECGKSFRRGSELTRHQRAHTGEKPYECKECEKAFTCSTELVRHQK

SEQ ID NO: 81745 - DNA, 1716 bp, Artificial Sequence
  derived and/or modified sequence
atgaagcccgcccagagaaacctgtacagagacgtgatgctggagaactacagcaacctggtgaccgtgggctgccaggtgaccaagcccgacgtgatcttcaagctggagcaggaggaggagccctgggtgatggaggaggagatgttcggcagacactgccccgagcccagaagaggcgagaactgctgcgccagcgaggtgatggccgagggcctgaagttcaaggacgtggtgatctacttcagccagaaggagtgggagtgcctgcacagcgcccagaaggacctgtacagagacgtgatgctggagaactacggcaacctggtgctgctgggcctgagcgacaccaagcccaacgtgatcagcctgctggagcagaagaaggagccctggatggtgaagagaaaggagaccaaggagtggtgccccgactgggagttcggcagagagaccaagaacctgagccccaaggagaacatctacgagatcagaagcccccagcaggagaaggccagagtgatcagagagatcagatgccaggtggagagacagcagggccaccaggagggccacttcagacccgccgtgatccccttcaccagcatgcagtgcaccgcccacagagagtaccagtggctgcacaccggcgagaagagctgcgagtgcagaaagtgcaagaacgccttcagataccagagctgccccatccagcacgagatcatccacaacaaggagaaggagcccgagtgcggcgagtgcagaaagatcttcaacagcggcagcgacctgatcaagcaccagaccctgcacgagagcaagaagcacagcgagaacaacaagtgcgccttcaaccacgacagcggcatcacccagccccagagcatcaacaccggcgagaagccccacaagtgcaaggagtgcggcaaggccttcagaagcagcagccagatcagccagcaccagagaatgcacctgggcgagaagccctacaagtgcagagagtgcggcaaggccttccccagcaccgcccagctgaacctgcaccagagaatccacaccgacgagaagtactacgagagcaaggcctgcggcaaggccttcaccagacccagccacctgttcagacaccagagaatccacaccggcgagaagccccacaagtgcaaggagtgcggcaaggccttcagatacgacacccagctgagcctgcaccagatcatccacaccggcgagagaagatacgagtgcagagagtgcggcaaggtgtacagctgcgccagccagctgagcctgcaccagagaatccacaccggcgagaagccccacgagtgcaaggagtgcggcaaggccttcatcagcgacagccacctgatcagacaccagagcgtgcacaccggcgagaagccctgcaagtgcaaggagtgcggcaagagcttcagaagaggcagcgagctgaccagacaccagagagcccacaccggcgagaagccctacgagtgcaaggagtgcgagaaggccttcacctgcagcaccgagctggtgagacaccagaaggtgcacaccggcgagagaccccacaagtgcaaggagtgcggcaaggccttcatcagaagaagcgagctgacccaccacgagagaagccacaccggcgagaagccctacgagtgcaaggagtgcggcaagcccttcggcggcggcagcgagctgagctag

SEQ ID NO: 81746 - DNA, 1752 bp, Artificial Sequence
  derived and/or modified sequence
atgaccagccagagcagcgtgatcagcaacagctgcgtgaccatggagagactgagccacatgatggagagaaaggcctggtgcagccaggagagcgccctgagcgaggaggaggaggacaccaccagacccctggagaccgtgaccttcaaggacgtggccgtggacctgacccaggaggagtgggagcagatgaagcccgcccagagaaacctgtacagagacgtgatgctggagaactacagcaacctggtgaccgtgggctgccaggtgaccaagcccgacgtgatcttcaagctggagcaggaggaggagccctgggtgatggaggaggagatgttcggcagacactgccccgagcccagaagaggcgagaactgctgcgccagcgaggtgatggccgagggcctgaagttcaaggacgtggtgatctacttcagccagaaggagtgggagtgcctgcacagcgcccagaaggacctgtacagagacgtgatgctggagaactacggcaacctggtgctgctgggcctgagcgacaccaagcccaacgtgatcagcctgctggagcagaagaaggagccctggatggtgaagagaaaggagaccaaggagtggtgccccgactgggagttcggcagagagaccaagaacctgagccccaaggagaacatctacgagatcagaagcccccagcaggagaaggccagagtgatcagagagatcagatgccaggtggagagacagcagggccaccaggagggccacttcagacccgccgtgatccccttcaccagcatgcagtgcaccgcccacagagagtaccagtggctgcacaccggcgagaagagctgcgagtgcagaaagtgcaagaacgccttcagataccagagctgccccatccagcacgagatcatccacaacaaggagaaggagcccgagtgcggcgagtgcagaaagatcttcaacagcggcagcgacctgatcaagcaccagaccctgcacgagagcaagaagcacagcgagaacaacaagtgcgccttcaaccacgacagcggcatcacccagccccagagcatcaacaccggcgagaagccccacaagtgcaaggagtgcggcaaggccttcagaagcagcagccagatcagccagcaccagagaatgcacctgggcgagaagccctacaagtgcagagagtgcggcaaggccttccccagcaccgcccagctgaacctgcaccagagaatccacaccgacgagaagtactacgagagcaaggcctgcggcaaggccttcaccagacccagccacctgttcagacaccagagaatccacaccggcgagaagccccacaagtgcaaggagtgcggcaaggccttcagatacgacacccagctgagcctgcaccagatcatccacaccggcgagagaagatacgagtgcagagagtgcggcaaggtgtacagctgcgccagccagctgagcctgcaccagagaatccacaccggcgagaagccccacgagtgcaaggagtgcggcaaggccttcatcagcgacagccacctgatcagacaccagagcgtgcacaccggcgagaagccctgcaagtgcaaggagtgcggcaagagcttcagaagaggcagcgagctgaccagacaccagagagcccacaccggcgagaagccctacgagtgcaaggagtgcgagaaggccttcacctgcagcaccgagctggtgagacaccagaagtag

SEQ ID NO: 81747 - DNA, 1716 bp, Artificial Sequence
  derived and/or modified sequence
atgaaacccgcccagcgcaacttgtaccgcgacgtgatgctggagaactattccaacctggtcacggtagggtgccaagtaaccaagcccgatgtgatcttcaagcttgaacaagaggaagagccttgggttatggaggaggagatgtttggccggcactgtccagagccaagaaggggagaaaattgctgcgcttctgaagtcatggcggagggcctcaagtttaaggatgtcgtgatatacttcagtcaaaaagagtgggagtgcctccatagtgctcagaaggacttgtaccgcgacgtgatgctggagaattacggaaatctagtccttctgggattatctgacaccaagcccaacgtcatatctctgctggagcagaaaaaagaaccctggatggtcaagagaaaggagaccaaggaatggtgccccgactgggagtttggaagagagaccaagaatttgtcccccaaggagaatatctatgagatccggagcccacagcaagaaaaggccagagtgatccgcgagattcggtgccaggttgagcgccaacagggacatcaggaaggacactttcgacctgcagtgatcccctttacgagcatgcagtgtacagcacaccgagaataccagtggctgcacacaggtgaaaagtcgtgcgaatgtcgaaagtgtaaaaatgcttttagataccagtcctgccctatacagcacgagattattcacaacaaagagaaagagccggaatgcggtgagtgcagaaaaattttcaacagcggcagcgatctcataaaacaccaaacattgcacgaatctaaaaagcactccgagaacaataaatgcgcttttaatcatgactctggcatcactcagcctcaatccatcaacaccggggaaaagccgcataagtgtaaagaatgcgggaaagcttttcgatcctctagccaaatatcgcagcaccagagaatgcatctgggcgagaaaccttacaagtgtcgggagtgtggcaaagcatttccgtctactgcacaacttaacctccaccaaaggattcacaccgacgagaaatactacgagagcaaggcttgtggaaaagcgttcacgagacctagccacttattccgccaccagcgcatacatacaggcgagaaacctcataagtgcaaggagtgcggcaaagcctttcgctacgacactcagctgtctctacatcagattattcacactggcgaacgacgatatgagtgccgagaatgtgggaaggtatattcttgcgctagtcagctttccttgcatcagcgaatccatacaggggagaagccccacgagtgtaaggaatgtggcaaagcttttatctcggatagccatctaattaggcatcagtctgttcatactggggagaagccctgtaaatgcaaggagtgtggcaaaagtttcagacgaggaagcgagcttacacggcaccaaagggcacatactggagagaagccatacgaatgtaaggagtgcgaaaaggccttcacttgctctacagagctagtccgccaccagaaagtgcataccggtgagagaccacacaagtgcaaagagtgcgggaaggctttcatccggcgtagcgaactgacccaccacgagcgctcccacacgggagagaagccctacgaatgtaaagagtgtgggaaaccgttcggcggagggtcagagctgagttag

SEQ ID NO: 81748 - DNA, 1752 bp, Artificial Sequence
  derived and/or modified sequence
atgacctcccaatcaagcgttattagcaattcatgcgtgaccatggagaggctgtcccacatgatggaaaggaaagcctggtgctcacaagaatctgcgctgtctgaagaggaagaagacactacgcggccactagagacagtcaccttcaaagatgtggctgtggatttaacacaggaggagtgggagcagatgaagcctgcccagagaaatctgtacagagatgtgatgttagaaaattatagtaacctggtgaccgtgggctgtcaggtaactaaacccgatgtaatattcaagctggaacaggaggaagagccctgggtcatggaggaggaaatgtttggacgacattgtcctgaaccacgtaggggcgagaattgctgtgcgtccgaagtgatggctgaaggcctgaaatttaaggacgtggtaatttatttctcccaaaaggaatgggaatgcctgcacagtgctcaaaaggacttgtatcgcgacgtgatgctggagaattatggtaatttagtgctgctgggcctgtctgataccaagccaaacgttattagtctgctggaacagaaaaaagaaccctggatggtgaagcgaaaagaaacaaaggagtggtgcccagattgggaattcggtagagagaccaaaaacctgtcccctaaagagaatatctacgaaatcagaagtcctcagcaggaaaaagcacgcgtgatcagagagatccggtgtcaagtcgaacggcagcagggtcaccaggagggtcatttccgcccagccgtcataccattcacctcaatgcagtgtactgcacatagagaataccagtggctgcacaccggagagaaaagctgtgaatgccgaaagtgcaagaacgccttcaggtaccagtcctgtccaattcagcacgagatcatccacaacaaggaaaaagaacccgaatgcggagaatgtagaaaaatcttcaactcagggtccgacctgattaaacaccagaccctgcatgaaagtaagaagcacagcgagaataacaagtgtgccttcaaccatgacagtgggatcactcagccccagtcaataaacacgggtgagaaacctcacaagtgtaaagaatgcggcaaagcatttagaagttcatcccaaatctctcagcaccagagaatgcacctgggggagaaaccatacaaatgtcgtgagtgcggcaaggctttccctagcactgcccagttaaacctgcatcagaggatacatacagacgaaaagtattatgagagcaaagcctgtggaaaagctttcactcggccttctcacctcttcagacaccagagaatccatacaggggagaaacctcataaatgcaaggagtgtggcaaagcgttccgttacgatacccagcttagtctgcatcaaatcatccatactggtgaacgacgatatgagtgtcgagagtgcggaaaggtgtacagctgtgcttctcagctgtccctgcaccagagaattcatacgggtgaaaaaccacatgaatgtaaggagtgcggcaaggcctttatttctgactcccaccttatccgtcatcaatctgtccacactggggaaaagccgtgtaagtgtaaagagtgcggcaagtcgttccgacgtggatctgagctgactcgccaccaacgggcccacactggggagaagccgtacgagtgcaaggaatgtgaaaaggccttcacttgttcaactgagctggtgcgacatcaaaagtag

SEQ ID NO: 81749 - DNA, 1716 bp, Artificial Sequence
  derived and/or modified sequence
atgaagccagcccagaggaacctgtacagagatgtgatgctggagaactacagcaacctggtgacagtgggctgccaggtgaccaagccagatgtgatcttcaagctggagcaggaggaggagccctgggtgatggaggaggagatgtttggccgccactgcccagagcccaggagaggagagaactgctgtgccagcgaggtgatggccgagggcctgaagttcaaggatgtggtgatctacttcagccagaaggagtgggagtgcctgcacagcgcccagaaggacctgtacagagatgtgatgctggagaactacggcaacctggtgctgctgggcctgagtgacaccaagcccaacgtcatcagcctgctggagcagaagaaggagccctggatggtgaagaggaaggagaccaaggagtggtgcccagactgggagtttggccgggagaccaagaacctgagccccaaggagaacatctatgagatccgcagcccccagcaggagaaggcccgggtcatccgggagatccgctgccaggtggagcggcagcagggccaccaggagggccacttccggcctgctgtgatccccttcacctccatgcagtgcacagcccaccgggagtaccagtggctgcacactggagagaagagctgtgagtgcaggaagtgcaagaatgccttccgctaccagagctgccccatccagcacgagatcatccacaacaaggagaaggagccagaatgtggagaatgtaggaagatcttcaacagcggcagtgacctgatcaagcaccagaccctgcacgagagcaagaagcacagcgagaacaacaagtgtgccttcaaccacgacagcggcatcacccagccccagagcatcaacacaggagagaagccccacaagtgcaaggaatgtgggaaggccttccgcagcagcagccagatcagccagcaccagaggatgcacctgggggagaagccctacaagtgcagagaatgtgggaaggccttccccagcacagcccagctgaacctgcaccagaggatccacacagatgagaagtactatgagagcaaggcctgtgggaaggccttcacccggcccagccacctgttccgccaccagaggatccacactggagagaagccccacaagtgcaaggaatgtgggaaggccttccgctatgacacccagctgagcctgcaccagatcatccacactggagagaggagatatgagtgcagagaatgtgggaaggtgtacagctgtgccagccagctgagcctgcaccagaggatccacactggagagaagccccatgagtgcaaggaatgtgggaaggccttcatcagtgacagccacctgatccgccaccagagcgtgcacactggagagaagccctgcaagtgcaaggaatgtgggaagagcttcagaagaggcagcgagctgaccaggcaccagagggcccacactggagagaagccctatgagtgcaaggaatgtgagaaggccttcacctgcagcacagagctggtgcgccaccagaaggtgcacactggagagcggccccacaagtgcaaggaatgtgggaaggccttcatccgccgctctgagctgacccaccacgagaggagccacactggagagaagccctatgagtgcaaggaatgtgggaagccctttggaggcggcagcgagctgtcctag

SEQ ID NO: 81750 - DNA, 1752 bp, Artificial Sequence
  derived and/or modified sequence
atgaccagccagagcagcgtcatcagcaacagctgtgtgaccatggagcggctgagccacatgatggagaggaaggcctggtgcagccaggagagcgccctgtctgaggaggaggaggacaccacccggcccctggagaccgtgaccttcaaggatgtggccgtggacctgacccaggaggagtgggagcagatgaagccagcccagaggaacctgtacagagatgtgatgctggagaactacagcaacctggtgacagtgggctgccaggtgaccaagccagatgtgatcttcaagctggagcaggaggaggagccctgggtgatggaggaggagatgtttggccgccactgcccagagcccaggagaggagagaactgctgtgccagcgaggtgatggccgagggcctgaagttcaaggatgtggtgatctacttcagccagaaggagtgggagtgcctgcacagcgcccagaaggacctgtacagagatgtgatgctggagaactacggcaacctggtgctgctgggcctgagtgacaccaagcccaacgtcatcagcctgctggagcagaagaaggagccctggatggtgaagaggaaggagaccaaggagtggtgcccagactgggagtttggccgggagaccaagaacctgagccccaaggagaacatctatgagatccgcagcccccagcaggagaaggcccgggtcatccgggagatccgctgccaggtggagcggcagcagggccaccaggagggccacttccggcctgctgtgatccccttcacctccatgcagtgcacagcccaccgggagtaccagtggctgcacactggagagaagagctgtgagtgcaggaagtgcaagaatgccttccgctaccagagctgccccatccagcacgagatcatccacaacaaggagaaggagccagaatgtggagaatgtaggaagatcttcaacagcggcagtgacctgatcaagcaccagaccctgcacgagagcaagaagcacagcgagaacaacaagtgtgccttcaaccacgacagcggcatcacccagccccagagcatcaacacaggagagaagccccacaagtgcaaggaatgtgggaaggccttccgcagcagcagccagatcagccagcaccagaggatgcacctgggggagaagccctacaagtgcagagaatgtgggaaggccttccccagcacagcccagctgaacctgcaccagaggatccacacagatgagaagtactatgagagcaaggcctgtgggaaggccttcacccggcccagccacctgttccgccaccagaggatccacactggagagaagccccacaagtgcaaggaatgtgggaaggccttccgctatgacacccagctgagcctgcaccagatcatccacactggagagaggagatatgagtgcagagaatgtgggaaggtgtacagctgtgccagccagctgagcctgcaccagaggatccacactggagagaagccccatgagtgcaaggaatgtgggaaggccttcatcagtgacagccacctgatccgccaccagagcgtgcacactggagagaagccctgcaagtgcaaggaatgtgggaagagcttcagaagaggcagcgagctgaccaggcaccagagggcccacactggagagaagccctatgagtgcaaggaatgtgagaaggccttcacctgcagcacagagctggtgcgccaccagaagtag

SEQ ID NO: 81751 - DNA, 1716 bp, Artificial Sequence
  derived and/or modified sequence
atgaagcccgcccagcggaacctgtaccgggacgtgatgctggagaattactctaacctagtgacggtgggctgccaggtgacaaaacctgatgtaatctttaaactggagcaggaagaggaaccctgggtaatggaagaggaaatgttcggtcggcactgtcctgagccacgacgtggcgagaactgttgtgccagcgaagtgatggccgagggccttaagttcaaggacgttgtgatttacttctcccagaaggaatgggagtgtctccacagcgctcaaaaggacctgtacagagacgtgatgttggagaattacggaaatctggtgttgctcggtctgagtgataccaagcccaacgtgatctctctcctggagcagaagaaggaaccctggatggtcaaacgcaaagaaactaaggagtggtgtcccgattgggagtttggaagggagacgaaaaacctcagtcccaaggagaatatatatgagatacggtctcctcagcaggaaaaggctcgggtaatccgggaaattagatgtcaagtggaacgacagcaagggcatcaggagggccattttcgccccgcagttattcccttcaccagcatgcagtgcactgcccacagggaataccagtggctgcatacgggagaaaaaagctgcgagtgccgtaaatgtaaaaacgcctttcggtatcagtcatgtccaatccagcatgagattatccacaataaagagaaagaaccagagtgcggggagtgccggaaaattttcaactctggcagcgatctgatcaagcatcaaaccttgcatgagagcaagaagcattctgaaaacaataagtgcgcctttaatcatgacagcggaataacacagcctcaatcaatcaatactggtgagaaacctcataaatgcaaagagtgtggtaaggcctttaggagctcatcacaaattagccagcaccagaggatgcacctgggcgaaaagccttataaatgtcgggaatgtggcaaagctttccctagcacggcacagctcaacctgcatcagcgtatccatacagacgagaaatattatgaatcaaaggcgtgtggaaaggcgtttacacggcccagccacttattcaggcaccagaggatacacaccggcgaaaaacctcacaagtgtaaagaatgcggtaaagcctttagatacgatacgcaactcagtcttcatcagatcattcacaccggcgaaagacgctacgagtgtagagaatgcggcaaggtgtattcatgcgctagccagctgtcgctgcatcaaaggatacacaccggggagaagccacacgagtgcaaggagtgtggcaaggccttcatttccgattcgcatttaattagacaccaatctgtacatacaggtgaaaagccctgtaagtgcaaggaatgtggaaagtcattccgtcggggctctgaactgacccggcaccagcgcgcccacactggggagaagccttatgagtgcaaggagtgcgaaaaagcatttacctgcagtaccgagttggtgagacaccagaaagtgcacaccggggagcgtccacataagtgcaaagaatgtgggaaagctttcatacgccgcagtgaactaacccaccacgagcggagtcacactggagaaaagccttatgagtgcaaggagtgtgggaagcccttcggcggggggagtgagctgagttag

SEQ ID NO: 81752 - DNA, 1752 bp, Artificial Sequence
  derived and/or modified sequence
atgaccagccagagcagcgtgatcagcaacagctgcgtgaccatggaacgtctctcacatatgatggagcggaaggcttggtgctcccaggagtcggctctcagtgaggaagaggaagacacgaccaggccactagagactgtcactttcaaggatgtggccgtggatcttacccaggaagagtgggagcagatgaaacctgcccagcgcaatctttaccgcgatgtcatgcttgagaattattcaaatctcgtgactgtaggttgtcaggttactaagcccgacgttatctttaaattggagcaggaggaagaaccttgggtgatggaggaggagatgttcgggcgccactgtccagagccaagacggggagagaattgttgtgctagtgaggttatggccgaaggattgaaattcaaagatgtcgtcatctacttctcccaaaaggagtgggaatgccttcattctgctcagaaagatctgtacagggatgtcatgcttgagaactatggcaacctggtgttactgggccttagcgacacaaaaccaaacgtcataagtcttctggaacaaaaaaaagagccctggatggtgaagcggaaagaaactaaagagtggtgcccagactgggaatttggccgagagacgaaaaacctgagtccgaaagaaaacatctatgagatcaggtccccacagcaggaaaaggctcgcgtaattcgcgagattcgatgccaagtcgagcgacagcagggccatcaggaggggcacttcaggccggcagtgatacccttcacatcgatgcaatgtaccgcacaccgggaataccagtggctgcatacaggagaaaaatcctgtgagtgccgcaaatgcaaaaacgccttccgctaccagagctgtcccatccagcacgagatcatacacaataaagaaaaggaacccgaatgtggagaatgcagaaaaatcttcaacagcggcagcgatttgattaaacatcagaccttgcatgagagcaaaaaacactccgagaacaacaaatgcgcattcaatcatgactctgggataacccagccgcagtcaattaatacgggcgaaaagcctcacaaatgcaaagagtgtggaaaggcgttcaggtctagcagccagatatcgcagcaccagaggatgcacctgggcgaaaagccttataaatgcagagagtgcggtaaggcttttccatctacagcccaactcaatttgcatcagcggatccacaccgatgagaagtactacgagtcgaaggcctgtggcaaggcattcacccgtccctcgcatcttttcagacaccagcgtatccatactggcgagaaaccacacaagtgcaaagagtgtggcaaggctttcagatatgatacacagttgagtctgcatcagattatccataccggcgagaggaggtatgaatgccgcgaatgtggaaaagtgtactcctgtgctagtcaactgtcactgcatcaaaggatccatacgggagagaaacctcatgaatgcaaagagtgtgggaaagcgttcattagcgatagtcatctcatccggcaccagagtgtgcacactggagaaaagccatgcaagtgcaaggagtgcggtaagagctttagacgcgggtcagagctgacgcggcaccaaagggcccacactggggaaaaaccctatgagtgcaaggagtgcgagaaagccttcacttgctccaccgagctagtgaggcaccagaaatag

SEQ ID NO: 81753 - DNA, 1716 bp, Artificial Sequence
  derived and/or modified sequence
atgaagcccgcacagcggaatctgtatcgggatgtcatgctagaaaactacagcaatctggttacagttggttgtcaggttacgaaacctgatgtgatatttaaacttgaacaagaagaagaaccatgggtgatggaagaagagatgttcgggcgtcactgccctgagccacgacgaggcgagaactgctgcgcttctgaagtgatggcagaagggctcaagtttaaagacgtggtcatctatttttcgcaaaaagaatgggagtgtctacatagtgcacagaaggatctgtaccgcgacgttatgctagagaattacgggaatcttgtgctgctcgggcttagcgacaccaagccgaacgttattagcctcctcgagcagaagaaggaaccgtggatggtcaagagaaaagagaccaaagaatggtgccccgactgggagtttggtagggagaccaagaacctatctccaaaagaaaatatctatgaaatcaggtcacctcagcaggagaaggctagggtgattagagaaatacgatgccaggtggaaagacagcaggggcaccaggagggccacttcaggcccgctgtgatccccttcacttccatgcagtgtaccgctcatcgcgagtaccagtggctgcatactggcgaaaagtcctgcgaatgcagaaagtgcaagaatgcgtttaggtaccagagttgccctatccagcatgagatcatccataacaaagagaaagagcctgaatgtggcgagtgtaggaaaatcttcaattccggatcagatttgattaagcatcaaaccctgcatgagtctaagaaacatagtgagaataataagtgcgcgtttaaccatgactctgggattactcagccccagagcatcaacactggcgagaaaccacacaaatgtaaagaatgtgggaaggcctttaggagcagttcgcagatatctcagcatcagagaatgcatctgggcgaaaaaccctacaagtgccgggaatgcggtaaagcctttccatccacagcccagttaaatctccaccaacgaattcacacggacgagaaatactacgagagcaaagcatgcggcaaagccttcacaagaccctctcatctattccggcatcagagaatacataccggggagaaaccgcataaatgtaaagagtgcgggaaggcattcaggtatgacacccagctgtctctccaccagattatccatacgggtgaacggcgttatgaatgccgcgagtgtgggaaagtttattcctgcgcatcacagctctctcttcaccagcgcatccacacaggtgagaaaccacatgagtgtaaggagtgcggaaaagccttcatttccgactcacacctaatacggcaccagagtgtccatacaggggaaaagccatgcaagtgtaaagagtgcgggaagtcatttcggcgaggcagtgagttaactaggcaccagcgagcacacaccggggaaaagccttatgagtgcaaagagtgcgaaaaagcttttacgtgcagcactgagctggtgcggcaccagaaagtgcacacaggggaacgccctcataagtgtaaggaatgcggcaaggcatttatacgaagatccgaactgacacatcacgagagaagccatactggggagaaaccatacgagtgtaaggagtgcggaaaaccttttggtggcggatctgagctgtcgtag

SEQ ID NO: 81754 - DNA, 1752 bp, Artificial Sequence
  derived and/or modified sequence
atgactagccaatcatctgtgatttctaacagctgcgtgactatggagcggttgagtcacatgatggaaagaaaggcatggtgttcgcaggagagtgctctgtcagaagaagaggaggatactactcgcccactggagaccgtcacctttaaagatgtggccgtcgatctgactcaggaagagtgggaacagatgaagccagcccagcgcaatctctaccgagatgtcatgttggaaaactacagcaatctggtgactgtgggctgtcaggtgactaaaccagacgtaatcttcaagttagagcaggaagaagaaccttgggtgatggaagaggagatgtttggaaggcattgcccagaaccccgacgtggcgagaactgttgtgcatccgaggtcatggcggaggggctcaagtttaaggacgtagtcatctacttctcccagaaagagtgggagtgcctccattcggcccagaaggatctctatcgagacgtgatgctagaaaactacggcaacctggtcctgctggggctgagtgacacgaagcccaatgttatctccctgctggaacagaaaaaagagccctggatggtgaagcgaaaagaaacaaaggagtggtgtcccgactgggagttcggaagagaaaccaaaaacctttcccccaaggaaaatatctacgaaatccgtagcccccagcaggaaaaggcaagagtgataagagaaatcaggtgtcaggtggagcggcagcaagggcatcaggaaggacacttccgcccagccgtcatcccttttacatccatgcagtgcaccgcccatcgcgagtatcaatggctgcacaccggagaaaagagctgtgaatgccgtaagtgtaagaatgctttcaggtaccagagttgcccgatccagcatgaaataatacacaacaaagagaaagaacccgaatgtggtgaatgtcggaagatcttcaactctggctcagatctcatcaaacatcagactctgcatgaatcaaagaaacacagcgaaaataataagtgcgcctttaatcacgatagtggcatcacccaaccccagtccattaacaccggtgaaaaacctcacaagtgtaaagaatgcggcaaagctttccgatcatcttcacagatctctcagcatcagcgaatgcacttgggagagaaaccctataagtgccgcgaatgtgggaaggccttcccctccaccgctcagttgaacctccaccagcggattcacacggatgagaaatattacgagtccaaagcctgcggaaaagcattcacacggcctagccacctgtttagacatcagcgcatccacacgggcgaaaaaccccacaagtgcaaagagtgcggtaaagcattccgctacgacacccagttatcactgcatcaaataatacatactggagaaagaagatatgaatgtcgagaatgcgggaaagtttattcctgtgctagtcagcttagcctccatcagaggatccacacaggcgagaagccacacgaatgcaaagagtgtggtaaagcttttattagtgattcccatcttattcgccaccagtcagtccacacgggtgagaagccatgcaaatgcaaagagtgtggtaagtcattccggagggggagcgaactgacacgacaccaacgagcccataccggtgagaagccttacgaatgtaaggagtgcgaaaaagcatttacttgcagcaccgagcttgtgcgacatcaaaagtag

SEQ ID NO: 81755 - DNA, 2378 bp, Artificial Sequence
  derived and/or modified sequence
attcgggtgtttccggcaggtgacgctgccgagtccccgcagcagggggcgagcaagggactcgcggttgacgggacacggatcctctaaggcccagagtgtcccgagtagcggcagtggggagtgctcagggtacgctaatgatctgtgtcttgtaaagagcatattgctgggcttacatccgtttatcttgtttgactgttattttaatagcttggtgttctcaagagtctgccctttccgaggaagaagaggatacaaccaggcctcttgaaacagtgacatttaaggatgtggctgttgaccttacccaggaggagtgggagcaaatgaaacctgctcaaagaaacttgtatcgagatgtgatgctggagaactacagcaacctagtcacagtgggctgtcaagtcaccaaaccggatgtgatattcaagttggagcaagaagaggagccctgggtgatggaggaagaaatgtttgggaggcactgtccagaacccagaagaggagagaactgctgtgcgtctgaagtgatggcggagggcttgaagttcaaagatgtggtcatttacttctctcaaaaggagtgggaatgcttgcactctgctcagaaggatttgtaccgagatgtaatgttggaaaattacggcaacctggtcttactggggctttctgatactaagccaaatgtgatctccttattggagcagaagaaagagccctggatggttaagaggaaggagacaaaagaatggtgtccagattgggagtttggaagagaaaccaagaatttatctccaaaggaaaacatttatgaaattagatcaccacaacaggagaaggccagagttatcagagaaatcagatgccaggtggagagacaacagggtcatcaggagggacatttcagaccagctgtaataccatttacttccatgcagtgcacagcccatagagaatatcagtggcttcatactggagagaaatcctgtgaatgcaggaaatgtaagaatgcttttaggtaccagtcatgtcctattcaacatgaaataattcataataaggaaaaagaacctgaatgtggagaatgtaggaaaatctttaatagtggatcagacttgattaagcatcagacgcttcatgaaagcaaaaaacatagtgaaaataacaaatgtgcctttaatcatgattctggaattactcaacctcagagcattaatactggagagaaacctcataaatgtaaggaatgtgggaaagcctttcgttccagctcacaaattagtcagcatcagaggatgcatcttggtgagaaaccctataagtgtagggagtgtgggaaagcctttccatccactgcacagcttaatctacatcagaggatccatactgatgagaaatactatgaaagtaaggcgtgtgggaaggcctttacccgtccctcacacctttttcgacatcaaagaatccatacgggtgagaaaccccataaatgtaaggaatgtggaaaggcttttcgttatgacacacagctgagccttcatcagataatccatactggtgaaagacgctatgaatgcagggagtgtggaaaggtgtacagttgtgcctcacagctgagtctacatcaaagaattcatactggtgagaaaccccatgaatgtaaggaatgtgggaaagcctttatctctgattcacatcttattcgacatcagagtgtccatactggggagaaaccctgtaagtgtaaggaatgtgggaagtcctttcgtcgtggctcagaacttacccgacatcagagagctcatactggtgaaaaaccctatgagtgtaaggaatgtgaaaaggcctttacttgtagcacagaacttgttcgacatcaaaaagttcacactggggagagaccccataagtgtaaggaatgtgggaaggctttcattcgaaggtcagaactcacacatcatgagagaagtcacactggtgagaaaccctacgagtgtaaggagtgtgggaagccctttggtggtggctcagaacttagttgacaccagaaaattcatactggtgagaaaccatatgaatgtcagcagtgtggaaaggccttcattcgggcctcacaccttagtcaacatcaaagaattcattcaggacagaggagtgaatgaagaaatgagggatggctcagaatttgattgacatgagaaagttcatactgatttggaaaaaaaaacttatgattctaagtgtgagacaccttataaatgttaggaattagcagggatttatttatgtttcagaatttattacacatcatgatacaactggtgaaaaattgaagacctccatgaatgtaaagaaagtagggaggcctttttggt

SEQ ID NO: 81756 - DNA, 2232 bp, Artificial Sequence
  derived and/or modified sequence
atggttcggcgctttaggcgtctgtcacagacctatctgcgggtcgccttcacccagcatctcagaaactgcgcgcgggatgaacattcgggtgtttccggcaggtgacgctgccgagtccccgcagcagggggcgagcaagggactcgcggttgacgggacacggatcctctaaggcccagagtgtcccgagtagcggcagtggggagtgctcagggtacgctaatgatctgtgtcttgtaaagagcatattgctgggcttacatccgtttatcttgtttgactgttattttaataggtcctggttccacaaggataaaacacatctgcagtgcaaatagaagtctgaggaacaggtgtcttatcatggaaggagacctgacctgagacctgccttagaggctggagagtcctgaaagagagtggaccctggagttgctggagcttgtcttgacccttctgcccagagcaggcagggtctgaatgacatctcaatcttcagtgatcagcaatagctgtgtgacaatggagcgtttgagccacatgatggaaaggaaagcttggtgttctcaagagtctgccctttccgaggaagaagaggatacaaccaggcctcttgaaacagtgacatttaaggatgtggctgttgaccttacccaggaggagtgggagcaaatgaaacctgctcaaagaaacttgtatcgagatgtgatgctggagaactacagcaacctagtcacagtgggctgtcaagtcaccaaaccggatgtgatattcaagttggagcaagaagaggagccctgggtgatggaggaagaaatgtttgggaggcactgtccagaacccagaagaggagagaactgctgtgcgtctgaagtgatggcggagggcttgaagttcaaagatgtggtcatttacttctctcaaaaggagtgggaatgcttgcactctgctcagaaggatttgtaccgagatgtaatgttggaaaattacggcaacctggtcttactggggctttctgatactaagccaaatgtgatctccttattggagcagaagaaagagccctggatggttaagaggaaggagacaaaagaatggtgtccagattgggagtttggaagagaaaccaagaatttatctccaaaggaaaacatttatgaaattagatcaccacaacaggagaaggccagagttatcagagaaatcagatgccaggtggagagacaacagggtcatcaggagggacatttcagaccagctgtaataccatttacttccatgcagtgcacagcccatagagaatatcagtggcttcatactggagagaaatcctgtgaatgcaggaaatgtaagaatgcttttaggtaccagtcatgtcctattcaacatgaaataattcataataaggaaaaagaacctgaatgtggagaatgtaggaaaatctttaatagtggatcagacttgattaagcatcagacgcttcatgaaagcaaaaaacatagtgaaaataacaaatgtgcctttaatcatgattctggaattactcaacctcagagcattaatactggagagaaacctcataaatgtaaggaatgtgggaaagcctttcgttccagctcacaaattagtcagcatcagaggatgcatcttggtgagaaaccctataagtgtagggagtgtgggaaagcctttccatccactgcacagcttaatctacatcagaggatccatactgatgagaaatactatgaaagtaaggcgtgtgggaaggcctttacccgtccctcacacctttttcgacatcaaagaatccatacgggtgagaaaccccataaatgtaaggaatgtggaaaggcttttcgttatgacacacagctgagccttcatcagataatccatactggtgaaagacgctatgaatgcagggagtgtggaaaggtgtacagttgtgcctcacagctgagtctacatcaaagaattcatactggtgagaaaccccatgaatgtaaggaatgtgggaaagcctttatctctgattcacatcttattcgacatcagagtgtccatactggggagaaaccctgtaagtgtaaggaatgtgggaagtcctttcgtcgtggctcagaacttacccgacatcagagagctcatactggtgaaaaaccctatgagtgtaaggaatgtgaaaaggcctttacttgtagcacagaacttgttcgacatcaaaaa

SEQ ID NO: 81757 - protein, 571 aa, Artificial Sequence
  derived and/or modified sequence
MKPAQRNLYRDVMLENYSNLVTVGCQVTKPDVIFKLEQEEEPWVMEEEMFGRHCPEPRRGENCCASEVMAEGLKFKDVVIYFSQKEWECLHSAQKDLYRDVMLENYGNLVLLGLSDTKPNVISLLEQKKEPWMVKRKETKEWCPDWEFGRETKNLSPKENIYEIRSPQQEKARVIREIRCQVERQQGHQEGHFRPAVIPFTSMQCTAHREYQWLHTGEKSCECRKCKNAFRYQSCPIQHEIIHNKEKEPECGECRKIFNSGSDLIKHQTLHESKKHSENNKCAFNHDSGITQPQSINTGEKPHKCKECGKAFRSSSQISQHQRMHLGEKPYKCRECGKAFPSTAQLNLHQRIHTDEKYYESKACGKAFTRPSHLFRHQRIHTGEKPHKCKECGKAFRYDTQLSLHQIIHTGERRYECRECGKVYSCASQLSLHQRIHTGEKPHECKECGKAFISDSHLIRHQSVHTGEKPCKCKECGKSFRRGSELTRHQRAHTGEKPYECKECEKAFTCSTELVRHQKVHTGERPHKCKECGKAFIRRSELTHHERSHTGEKPYECKECGKPFGGGSELS

SEQ ID NO: 81758 - DNA, 588 bp, Artificial Sequence
  derived and/or modified sequence
atgctgagagacggcaggtttgcctgtgctatttgcccccatcgcccggttcttgacaccctggcaatgctgactgcccaccgggctggaaaaaagcacttatcctccctgcagctgttttacgggaaaaagcagcccggtaaagagagaaaacagaacccaaagcatcagaacgaactcagaagagaagaaactaaagctgaagcccccctgctgacccagaccagattgattacacaaagcgcactgcatagggcaccacattacaactcttgttgtaggaggaagtatcgcccggaggctcccggcccgagtgtgtcactatctcccatgcccccatccgaggtgaaactacaatccggtaaaatctcccgagagccagaacctgccgcaggccctcaagccgaagaaagcgccactgtcagtgctcccgccccgatgtcccccacacgtcgccgcgctctagatcattaccttactctgagatcaagcggctggattccagacggaagaggacgctgggtaaaagacgagaacgtggaattcgattccgacgaggaggagcctccagacctcccgttggactag

SEQ ID NO: 81759 - DNA, 588 bp, Artificial Sequence
  derived and/or modified sequence
atgctgagagatggccgctttgcctgtgccatctgcccccacaggcctgtgctggacaccctggccatgctgacagcccacagagctgggaagaagcacctgagcagcctgcagctgttctacggcaagaagcagcccgggaaggagaggaagcagaaccccaagcaccagaatgagctgcggcgggaggagaccaaggccgaggcccccctgctgacccagaccaggctcatcacccagagcgccctgcaccgggccccccactacaacagctgctgcaggaggaagtacagacctgaggcccctggccccagcgtgtccctgagccccatgccacccagcgaggtgaagctgcagagcggcaagatcagccgggagcctgagcctgctgctggcccccaggccgaggagagcgccaccgtgtctgccccagcccccatgagccccacccggcggcgggccctggaccactacctgaccctgcggagcagcggctggatcccagatggccggggccgctgggtgaaggatgaaaatgtggagtttgacagtgatgaggaggagcccccagacctgcccctggactag

SEQ ID NO: 81760 - DNA, 588 bp, Artificial Sequence
  derived and/or modified sequence
atgctgcgggacggccggttcgcctgcgccatctgcccccaccggccggtgctcgataccctcgccatgctgactgcacatcgagccggaaagaagcatctgtccagcctccagcttttttacggaaaaaagcagccaggcaaggagcgtaaacaaaatcctaaacaccagaacgaacttcgtagagaagagaccaaagcagaggcaccattattgacccaaacaaggcttattacacaaagcgccctacatagggcccctcattacaatagctgctgcaggcggaagtaccggcccgaagcacccggcccgagcgtgagcttgtcccccatgcccccatccgaggtaaagctccagtcaggaaagatttcaagggagcccgaaccagccgccgggccgcaagccgaggagagcgcaaccgtgtcagcccccgcaccaatgtccccaacgcgtcgcagagccctggaccactacctgaccctccgcagttccggttggatccctgatgggcgcgggaggtgggtgaaggacgaaaatgtggaatttgactctgatgaagaagaacctcctgatctcccccttgattag

SEQ ID NO: 81761 - DNA, 588 bp, Artificial Sequence
  derived and/or modified sequence
atgctaagagacgggagattcgcatgcgctatttgtccccacaggccggtactggacacactggccatgttgacagcgcaccgggctgggaaaaagcacttaagttcccttcagctgttctacggcaagaaacagccaggtaaagagaggaaacaaaacccaaaacaccagaatgaacttcggcgtgaggaaaccaaggccgaggccccactattaacccagacacggctgattacccaaagtgccttgcacagggccccacattacaacagctgctgccgcaggaagtaccggccagaagcacccggtccctccgtgtccctttccccaatgcctccgtctgaggtcaaattgcagagtggcaagattagtagggaacccgagcccgcagccggtccacaagccgaagaatctgccactgtgagcgcccctgctcccatgtcccctacacgtcgcagagcacttgatcactatctcacgctcaggtcctctggatggatacctgatggtcgcggtcggtgggtcaaggacgaaaacgtggaattcgactctgacgaggaggaaccgcctgacctgccgttggattag

SEQ ID NO: 81762 - DNA, 588 bp, Artificial Sequence
  derived and/or modified sequence
atgctgagagacggcagattcgcctgcgccatctgcccccacagacccgtgctggacaccctggccatgctgaccgcccacagagccggcaagaagcacctgagcagcctgcagctgttctacggcaagaagcagcccggcaaggagagaaagcagaaccccaagcaccagaacgagctgagaagagaggagaccaaggccgaggcccccctgctgacccagaccagactgatcacccagagcgccctgcacagagccccccactacaacagctgctgcagaagaaagtacagacccgaggcccccggccccagcgtgagcctgagccccatgccccccagcgaggtgaagctgcagagcggcaagatcagcagagagcccgagcccgccgccggcccccaggccgaggagagcgccaccgtgagcgcccccgcccccatgagccccaccagaagaagagccctggaccactacctgaccctgagaagcagcggctggatccccgacggcagaggcagatgggtgaaggacgagaacgtggagttcgacagcgacgaggaggagccccccgacctgcccctggactag

SEQ ID NO: 81763 - protein, 96 aa, Artificial Sequence
  derived and/or modified sequence
MYVKLISSDGHEFIVKREHALTSGTIKAMLSGPGQFAENETNEVNFREIPSHVLSKVCMYFTYKVRYTNSSTEIPEFPIAPEIALELLMAANFLDC

SEQ ID NO: 81764 - DNA, 291 bp, Artificial Sequence
  derived and/or modified sequence
atgtacgtgaagctgatcagcagcgacggccacgagttcatcgtgaagagagagcacgccctgaccagcggcaccatcaaggccatgctgagcggccccggccagttcgccgagaacgagaccaacgaggtgaacttcagagagatccccagccacgtgctgagcaaggtgtgcatgtacttcacctacaaggtgagatacaccaacagcagcaccgagatccccgagttccccatcgcccccgagatcgccctggagctgctgatggccgccaacttcctggactgctag

SEQ ID NO: 81765 - DNA, 291 bp, Artificial Sequence
  derived and/or modified sequence
atgtatgtgaaattgatatcgagtgatgggcatgaatttatagtgaaacgggaacatgcccttactagcggaacaattaaggccatgttgagcggacctgggcagtttgccgaaaatgagacgaacgaggtaaattttcgggaaatcccgtcccacgtgctgtctaaggtgtgcatgtattttacctataaggtgaggtatacaaactcctctaccgagatcccggagttccctattgcccccgagatcgcgctggagctcctgatggccgcgaactttctggattgttag

SEQ ID NO: 81766 - DNA, 291 bp, Artificial Sequence
  derived and/or modified sequence
atgtatgtgaagctgatcagcagtgatggccacgagttcatcgtgaagcgggagcacgccctgaccagcggcaccatcaaggccatgctgagcggccctggccagtttgctgaaaatgagaccaatgaggtgaacttccgggagatccccagccacgtgctgagcaaggtgtgcatgtacttcacctacaaggtgcgctacaccaacagcagcacagagatccctgagttccccatcgcccctgagatcgccctggagctgctgatggccgccaacttcctggactgctag

SEQ ID NO: 81767 - DNA, 291 bp, Artificial Sequence
  derived and/or modified sequence
atgtacgtgaagctgatcagcagcgacggccacgagttcatcgtgaaaagagagcacgcccttaccagtgggactatcaaggcaatgttgtcgggtccaggacagttcgccgaaaatgagaccaacgaggtgaatttcagagaaatacctagccacgtgctcagtaaagtgtgtatgtatttcacttacaaagtcagatacactaattcttccacagagataccggaatttccgatagctccagagattgcacttgagctgcttatggcggccaacttcctggactgttag

SEQ ID NO: 81768 - DNA, 291 bp, Artificial Sequence
  derived and/or modified sequence
atgtacgtgaagttgatatcatcagatggacacgaattcatcgtgaagagagagcatgcactgacctccggtaccatcaaggctatgctgagtggtccgggacagtttgcagagaacgaaacgaacgaggtcaacttcagagaaatccccagtcacgttttaagtaaagtgtgtatgtactttacctataaggtcagatacactaattccagtactgagatcccagaattccctatcgcaccggagattgcgttagaactgctgatggccgctaacttcctggattgctag

SEQ ID NO: 81769 - DNA, 615 bp, Artificial Sequence
  derived and/or modified sequence
atggccctggtgagcggcatcagcctggaccccgaggccgccatcggcgtgaccaagagacccccccccaagtgggtggacggcgtggacgagatccagtacgacgtgggcagaatcaagcagaagatgaaggagctggccagcctgcacgacaagcacctgaacagacccaccctggacgacagcagcgaggaggagcacgccatcgagatcaccacccaggagatcacccagctgttccacagatgccagagagccgtgcaggccctgcccagcagagccagagcctgcagcgagcaggagggcagactgctgggcaacgtggtggccagcctggcccaggccctgcaggagctgagcaccagcttcagacacgcccagagcggctacctgaagagaatgaagaacagagaggagagaagccagcacttcttcgacaccagcgtgcccctgatggacgacggcgacgacaacaccctgtaccacagaggcttcaccgaggaccagctggtgctggtggagcagaacaccctgatggtggaggagagagagagagagatcagacagatcgtgcagagcatcagcgacctgaacgagatcttcagagacctgtag

SEQ ID NO: 81770 - DNA, 756 bp, Artificial Sequence
  derived and/or modified sequence
atggccctggtgagcggcatcagcctggaccccgaggccgccatcggcgtgaccaagagacccccccccaagtgggtggacggcgtggacgagatccagtacgacgtgggcagaatcaagcagaagatgaaggagctggccagcctgcacgacaagcacctgaacagacccaccctggacgacagcagcgaggaggagcacgccatcgagatcaccacccaggagatcacccagctgttccacagatgccagagagccgtgcaggccctgcccagcagagccagagcctgcagcgagcaggagggcagactgctgggcaacgtggtggccagcctggcccaggccctgcaggagctgagcaccagcttcagacacgcccagagcggctacctgaagagaatgaagaacagagaggagagaagccagcacttcttcgacaccagcgtgcccctgatggacgacggcgacgacaacaccctgtaccacagaggcttcaccgaggaccagctggtgctggtggagcagaacaccctgatggtggaggagagagagagagagatcagacagatcgtgcagagcatcagcgacctgaacgagatcttcagagacctgggcgccatgatcgtggagcagggcaccgtgctggacagaatcgactacaacgtggagcagagctgcatcaagaccgaggacggcctgaagcagctgcacaaggccgagcagtaccagaagaagaacagaaagatgctggtgtag

SEQ ID NO: 81771 - DNA, 819 bp, Artificial Sequence
  derived and/or modified sequence
atggccctggtgagcggcatcagcctggaccccgaggccgccatcggcgtgaccaagagacccccccccaagtgggtggacggcgtggacgagatccagtacgacgtgggcagaatcaagcagaagatgaaggagctggccagcctgcacgacaagcacctgaacagacccaccctggacgacagcagcgaggaggagcacgccatcgagatcaccacccaggagatcacccagctgttccacagatgccagagagccgtgcaggccctgcccagcagagccagagcctgcagcgagcaggagggcagactgctgggcaacgtggtggccagcctggcccaggccctgcaggagctgagcaccagcttcagacacgcccagagcggctacctgaagagaatgaagaacagagaggagagaagccagcacttcttcgacaccagcgtgcccctgatggacgacggcgacgacaacaccctgtaccacagaggcttcaccgaggaccagctggtgctggtggagcagaacaccctgatggtggaggagagagagagagagatcagacagatcgtgcagagcatcagcgacctgaacgagatcttcagagacctgggcgccatgatcgtggagcagggcaccgtgctggacagaatcgactacaacgtggagcagagctgcatcaagaccgaggacggcctgaagcagctgcacaaggccgagcagtaccagaagaagaacagaaagatgctggtgatcctgatcctgttcgtgatcatcatcgtgctgatcgtggtgctggtgggcgtgaagagcagatag

SEQ ID NO: 81772 - DNA, 366 bp, Artificial Sequence
  derived and/or modified sequence
atggccctggtgagcggcatcagcctggaccccgaggccgccatcggcgtgaccaagagacccccccccaagtgggtggacggcgtggacgagatccagtacgacgtgggcagaatcaagcagaagatgaaggagctggccagcctgcacgacaagcacctgaacagacccaccctggacgacagcagcgaggaggagcacgccatcgagatcaccacccaggagatcacccagctgttccacagatgccagagagccgtgcaggccctgcccagcagagccagagcctgcagcgagcaggagggcagactgctgggcaacgtggtggccagcctggcccaggccctgcaggagctgagcacctag

SEQ ID NO: 81773 - DNA, 420 bp, Artificial Sequence
  derived and/or modified sequence
atgaagaacagagaggagagaagccagcacttcttcgacaccagcgtgcccctgatggacgacggcgacgacaacaccctgtaccacagaggcttcaccgaggaccagctggtgctggtggagcagaacaccctgatggtggaggagagagagagagagatcagacagatcgtgcagagcatcagcgacctgaacgagatcttcagagacctgggcgccatgatcgtggagcagggcaccgtgctggacagaatcgactacaacgtggagcagagctgcatcaagaccgaggacggcctgaagcagctgcacaaggccgagcagtaccagaagaagaacagaaagatgctggtgatcctgatcctgttcgtgatcatcatcgtgctgatcgtggtgctggtgggcgtgaagagcagatag

SEQ ID NO: 81774 - DNA, 660 bp, Artificial Sequence
  derived and/or modified sequence
ggcatcagcctggaccccgaggccgccatcggcgtgaccaagagacccccccccaagtgggtggacggcgtggacgagatccagtacgacgtgggcagaatcaagcagaagatgaaggagctggccagcctgcacgacaagcacctgaacagacccaccctggacgacagcagcgaggaggagcacgccatcgagatcaccacccaggagatcacccagctgttccacagatgccagagagccgtgcaggccctgcccagcagagccagagcctgcagcgagcaggagggcagactgctgggcaacgtggtggccagcctggcccaggccctgcaggagctgagcaccagcttcagacacgcccagagcggctacctgaagagaatgaagaacagagaggagagaagccagcacttcttcgacaccagcgtgcccctgatggacgacggcgacgacaacaccctgtaccacagaggcaccgtgctggacagaatcgactacaacgtggagcagagctgcatcaagaccgaggacggcctgaagcagctgcacaaggccgagcagtaccagaagaagaacagaaagatgctggtgatcctgatcctgttcgtgatcatcatcgtgctgatcgtggtgctggtgggcgtgaagagcagatag

SEQ ID NO: 81775 - DNA, 369 bp, Artificial Sequence
  derived and/or modified sequence
atggccctggtgagcggcatcagcctggaccccgaggccgccatcggcgtgaccaagagacccccccccaagtgggtggacggcgtggacgagatccagtacgacgtgggcagaatcaagcagaagatgaaggagctggccagcctgcacgacaagcacctgaacagacccaccctggacgacagcagcgaggaggagcacgccatcgagatcaccacccaggagatcacccagctgttccacagatgccagagagccgtgcaggccctgcccagcagagccagagcctgcagcgagcaggagggcagactgctgggcaacgtggtggccagcctggcccaggccctgcaggagctgagcaccagctag

SEQ ID NO: 81776 - DNA, 615 bp, Artificial Sequence
  derived and/or modified sequence
atggccctggtgagcggtataagcttagaccctgaagcggccataggtgtaacgaaacggccgcctcctaaatgggtagatggggtggatgaaattcagtatgacgttggccgaatcaagcaaaaaatgaaggagctggcgtctctgcacgacaagcacctgaaccggccaactcttgacgacagctccgaggaagagcatgctatagaaataaccacgcaggaaattacccaactatttcatcgctgtcagagggctgtgcaagctcttccttctagggcaagagcatgtagcgaacaagagggccgtctgctgggcaacgtcgtcgcctccctcgcccaggctctccaggagctctctacgagctttcgacacgctcaatctggatatctgaagcggatgaagaaccgggaggagagatcacagcactttttcgacacgtctgttccactgatggatgatggggatgataatacactgtaccatcgcgggttcacagaggaccagctcgtcctggtggaacagaacactctgatggtggaggaaagggaacgtgaaatcaggcagatcgtgcagtctatctccgaccttaatgaaattttccgagatttgtag

SEQ ID NO: 81777 - DNA, 756 bp, Artificial Sequence
  derived and/or modified sequence
atggctttggtttctgggatatcactcgatccagaggcagcaattggcgtaactaaacgcccaccacccaagtgggtggacggagtggacgaaattcagtatgatgtgggtagaatcaagcagaagatgaaggaactcgcttctctccacgataaacacctgaatcggcccactcttgacgactcaagcgaagaggaacacgctatagaaattactacgcaagagattacccagctctttcatcgatgtcaaagggccgtgcaggcgctacctagcagagctcgcgcctgtagcgagcaggaagggagattactcggcaacgtggtcgctagcttggcccaggccctgcaggaactgtctactagttttcgccatgcccagtccgggtacctcaagcgcatgaaaaatagagaggaacgctcgcagcatttcttcgataccagcgttcccttgatggatgatggcgacgacaatactctgtatcaccggggttttaccgaagaccagttagtgctcgtagagcagaacaccctaatggtggaagagcgggagcgcgaaatccggcagattgtgcagtccatctctgatcttaacgaaatctttcgagacctaggggccatgattgtggaacagggtactgtacttgaccgcattgactacaacgtagaacagtcttgtattaagaccgaggatggactgaagcagctccataaagccgaacagtaccagaagaagaaccggaaaatgttggtgtag

SEQ ID NO: 81778 - DNA, 819 bp, Artificial Sequence
  derived and/or modified sequence
atggctctggtgtcaggtatctctctggaccccgaagctgctattggagttaccaagagacctcctcccaagtgggtggatggtgtcgacgagatccagtacgacgtgggaagaattaaacaaaagatgaaagaattagcttctctgcacgataaacacctcaaccgacccacgctggacgacagttctgaggaggaacacgcaatcgagatcacaactcaagaaattacccaactctttcatcgctgccagcgggccgtgcaagcacttccaagcagggctcgggcctgcagcgaacaggagggaagactcttaggtaatgtggtcgcatctctggctcaggctcttcaggagctgagcacttctttcagacacgcacagtctggctatctgaagaggatgaaaaatagagaggaaaggtcacagcacttcttcgacacatcggtgcctttaatggacgacggagacgataacacgctgtatcaccgcggattcacagaagatcaattagtgcttgtagaacagaacaccctcatggtggaggaacgtgaacgcgaaatccgacagattgttcagagtattagtgacctcaacgagattttccgagatctcggagccatgatcgtcgagcagggcacagtgctagaccgcatcgattacaatgtagagcagagctgcattaagaccgaggacggtctcaaacaactgcataaagctgaacagtatcaaaaaaagaatcgaaagatgctggtgattcttatacttttcgtgatcatcatcgtcctgatcgtcgtcctggtcggtgtgaaatccagatag

SEQ ID NO: 81779 - DNA, 366 bp, Artificial Sequence
  derived and/or modified sequence
atggcacttgtaagcggcatctccctggatccggaggccgctatcggcgtgacaaaacgtccccctccaaaatgggtggatggcgtagacgagattcaatacgacgtgggccggatcaaacaaaagatgaaagaactcgcaagccttcacgacaagcacttgaaccggcctacactggatgattcttctgaggaggaacacgcaattgagatcaccacccaggagatcactcagctgtttcacagatgccagcgcgcggttcaggcactacccagtcgggcccgggcatgcagcgagcaggagggccggctcctcggcaacgtggtcgcctccctggctcaggcccttcaggaactcagcacgtag

SEQ ID NO: 81780 - DNA, 420 bp, Artificial Sequence
  derived and/or modified sequence
atgaaaaacagagaggagcggagccaacattttttcgacaccagcgtgccattgatggatgacggagatgacaacaccctataccacagggggttcaccgaggaccagttggtgctggtcgagcagaataccctgatggtggaagagcgggagagagaaatccgtcagatcgtgcagtcgatatcagatctcaacgaaatcttcagggatctgggcgcaatgatcgtcgagcagggaaccgtgcttgaccgcattgactacaacgtcgagcaatcatgtatcaagactgaggacggactgaagcagctccacaaagccgagcagtatcagaaaaaaaacagaaagatgcttgtgatcctgatcctattcgtaatcattatcgttcttatagtggtattggtgggcgtgaagagtcgatag

SEQ ID NO: 81781 - DNA, 660 bp, Artificial Sequence
  derived and/or modified sequence
ggaatttcactggatcctgaggcagccattggcgtgacaaaaagacccccccccaagtgggtggacggcgtggacgagattcagtacgatgtaggaagaataaagcaaaaaatgaaagagctagcctcactgcacgacaaacacctgaaccgaccgactctggacgactcctccgaggaagagcatgcaatagagattactactcaagaaattactcagctgtttcataggtgccagagggccgtgcaggcacttccatctagggcacgagcctgtagtgaacaggagggacgattactggggaatgttgtagcatcattagctcaggccttgcaggaattgagcacctccttcagacacgcccagagcggctacctcaagcggatgaagaacagagaagagcgatcccagcacttcttcgatactagcgtgcctctcatggatgatggggatgacaataccctatatcaccggggaacagtcttagatcgtatcgactataatgtcgagcagagctgcattaaaaccgaggatgggttaaagcagctgcacaaggccgaacaataccaaaaaaaaaacaggaagatgttggtgatacttattctgtttgtaattatcattgtgttaatagtggtgctggtcggggtcaagtctaggtag

SEQ ID NO: 81782 - DNA, 369 bp, Artificial Sequence
  derived and/or modified sequence
atggccctggtgtccggtatcagcttggaccctgaggctgctataggggtcactaagcggcctcccccgaaatgggttgacggggtggatgagattcagtatgacgtgggacggattaaacagaaaatgaaggaattggctagcctgcacgacaagcaccttaatcgtcccacgctggatgactctagcgaggaagagcatgccatagagattaccacgcaagaaatcacacaactgttccatagatgtcaaagagctgtgcaggcccttccgtcccgggcccgggcctgcagcgagcaggaggggagactcctcgggaacgttgtagctagtcttgcacaggccctgcaagaactgtcaacttcttag

SEQ ID NO: 81783 - DNA, 615 bp, Artificial Sequence
  derived and/or modified sequence
atggccctggtgtctggcatcagcctggaccctgaggccgccatcggcgtgaccaagaggcccccacccaagtgggtggatggagtggatgagatccagtatgatgtgggccgcatcaagcagaagatgaaggagctggccagcctgcatgacaagcacctgaaccggcccaccctggatgacagcagcgaggaggagcacgccatcgagatcaccacccaggagatcacccagctgttccaccgctgccagagagctgtgcaggccctgcccagccgggcccgggcctgcagcgagcaggagggccgcctgctgggcaatgtggtggccagcctggcccaggccctgcaggagctgagcaccagcttcagacatgcccagagcggctacctgaagaggatgaagaaccgggaggagaggagccagcacttctttgacacctctgtgcccctgatggatgatggagatgacaacaccctgtaccaccggggcttcacagaggaccagctggtgctggtggagcagaacaccctgatggtggaggagcgggagcgggagatccggcagatcgtgcagagcatcagtgacctgaatgagatcttccgggacctgtag

SEQ ID NO: 81784 - DNA, 756 bp, Artificial Sequence
  derived and/or modified sequence
atggccctggtgtctggcatcagcctggaccctgaggccgccatcggcgtgaccaagaggcccccacccaagtgggtggatggagtggatgagatccagtatgatgtgggccgcatcaagcagaagatgaaggagctggccagcctgcatgacaagcacctgaaccggcccaccctggatgacagcagcgaggaggagcacgccatcgagatcaccacccaggagatcacccagctgttccaccgctgccagagagctgtgcaggccctgcccagccgggcccgggcctgcagcgagcaggagggccgcctgctgggcaatgtggtggccagcctggcccaggccctgcaggagctgagcaccagcttcagacatgcccagagcggctacctgaagaggatgaagaaccgggaggagaggagccagcacttctttgacacctctgtgcccctgatggatgatggagatgacaacaccctgtaccaccggggcttcacagaggaccagctggtgctggtggagcagaacaccctgatggtggaggagcgggagcgggagatccggcagatcgtgcagagcatcagtgacctgaatgagatcttccgggacctgggcgccatgattgtggagcagggcaccgtgctggacagaattgactacaacgtggagcagagctgcatcaagacagaagatggcctgaagcagctgcacaaggccgagcagtaccagaagaagaacaggaagatgctggtgtag

SEQ ID NO: 81785 - DNA, 819 bp, Artificial Sequence
  derived and/or modified sequence
atggccctggtgtctggcatcagcctggaccctgaggccgccatcggcgtgaccaagaggcccccacccaagtgggtggatggagtggatgagatccagtatgatgtgggccgcatcaagcagaagatgaaggagctggccagcctgcatgacaagcacctgaaccggcccaccctggatgacagcagcgaggaggagcacgccatcgagatcaccacccaggagatcacccagctgttccaccgctgccagagagctgtgcaggccctgcccagccgggcccgggcctgcagcgagcaggagggccgcctgctgggcaatgtggtggccagcctggcccaggccctgcaggagctgagcaccagcttcagacatgcccagagcggctacctgaagaggatgaagaaccgggaggagaggagccagcacttctttgacacctctgtgcccctgatggatgatggagatgacaacaccctgtaccaccggggcttcacagaggaccagctggtgctggtggagcagaacaccctgatggtggaggagcgggagcgggagatccggcagatcgtgcagagcatcagtgacctgaatgagatcttccgggacctgggcgccatgattgtggagcagggcaccgtgctggacagaattgactacaacgtggagcagagctgcatcaagacagaagatggcctgaagcagctgcacaaggccgagcagtaccagaagaagaacaggaagatgctggtgatcctgatcctcttcgtcatcatcatcgtgctgattgtggtgctggtgggcgtgaagagcaggtag

SEQ ID NO: 81786 - DNA, 366 bp, Artificial Sequence
  derived and/or modified sequence
atggccctggtgtctggcatcagcctggaccctgaggccgccatcggcgtgaccaagaggcccccacccaagtgggtggatggagtggatgagatccagtatgatgtgggccgcatcaagcagaagatgaaggagctggccagcctgcatgacaagcacctgaaccggcccaccctggatgacagcagcgaggaggagcacgccatcgagatcaccacccaggagatcacccagctgttccaccgctgccagagagctgtgcaggccctgcccagccgggcccgggcctgcagcgagcaggagggccgcctgctgggcaatgtggtggccagcctggcccaggccctgcaggagctgagcacctag

SEQ ID NO: 81787 - DNA, 420 bp, Artificial Sequence
  derived and/or modified sequence
atgaagaaccgggaggagaggagccagcacttctttgacacctctgtgcccctgatggatgatggagatgacaacaccctgtaccaccggggcttcacagaggaccagctggtgctggtggagcagaacaccctgatggtggaggagcgggagcgggagatccggcagatcgtgcagagcatcagtgacctgaatgagatcttccgggacctgggcgccatgattgtggagcagggcaccgtgctggacagaattgactacaacgtggagcagagctgcatcaagacagaagatggcctgaagcagctgcacaaggccgagcagtaccagaagaagaacaggaagatgctggtgatcctgatcctgtttgtgatcatcatcgtgctgattgtggtgctggtgggcgtgaagagcaggtag

SEQ ID NO: 81788 - DNA, 660 bp, Artificial Sequence
  derived and/or modified sequence
ggcatcagcctggaccctgaggccgccatcggcgtgaccaagaggcccccacccaagtgggtggatggagtggatgagatccagtatgatgtgggccgcatcaagcagaagatgaaggagctggccagcctgcatgacaagcacctgaaccggcccaccctggatgacagcagcgaggaggagcacgccatcgagatcaccacccaggagatcacccagctgttccaccgctgccagagagctgtgcaggccctgcccagccgggcccgggcctgcagcgagcaggagggccgcctgctgggcaatgtggtggccagcctggcccaggccctgcaggagctgagcaccagcttcagacatgcccagagcggctacctgaagaggatgaagaaccgggaggagaggagccagcacttctttgacacctctgtgcccctgatggatgatggagatgacaacaccctgtaccaccggggcaccgtgctggacagaattgactacaacgtggagcagagctgcatcaagacagaagatggcctgaagcagctgcacaaggccgagcagtaccagaagaagaacaggaagatgctggtgatcctgatcctgtttgtgatcatcatcgtgctgattgtggtgctggtgggcgtgaagagcaggtag

SEQ ID NO: 81789 - DNA, 369 bp, Artificial Sequence
  derived and/or modified sequence
atggccctggtgtctggcatcagcctggaccctgaggccgccatcggcgtgaccaagaggcccccacccaagtgggtggatggagtggatgagatccagtatgatgtgggccgcatcaagcagaagatgaaggagctggccagcctgcatgacaagcacctgaaccggcccaccctggatgacagcagcgaggaggagcacgccatcgagatcaccacccaggagatcacccagctgttccaccgctgccagagagctgtgcaggccctgcccagccgggcccgggcctgcagcgagcaggagggccgcctgctgggcaatgtggtggccagcctggcccaggccctgcaggagctgagcaccagctag

SEQ ID NO: 81790 - DNA, 615 bp, Artificial Sequence
  derived and/or modified sequence
atggccctggtgagcggcatcagcctggaccccgaggccgccatcggggtcactaagagaccacccccaaagtgggtggatggtgttgacgagatccaatatgatgtcggacggataaaacagaagatgaaagagctcgccagtcttcatgacaagcacctcaatcgcccaacgctggatgactcctctgaagaagaacatgcgatagagattacgacacaggagatcacccagctcttccaccggtgccagagagctgttcaagccctcccctcaagagctcgcgcttgcagcgagcaagaagggagactcctgggcaacgtggttgcaagcttggctcaagcactccaggagctgtctacttcgttccgtcacgcacagtctggctacctgaaacgtatgaagaacagggaagagcgaagccaacattttttcgatacttcagttccgttgatggatgatggcgatgataatacactctaccatcggggcttcaccgaggaccagctcgtgctggtggaacagaataccttgatggtcgaagaacgtgaacgggagatccgccaaatagtgcagtcaatcagtgatctgaacgagattttcagagacctgtag

SEQ ID NO: 81791 - DNA, 756 bp, Artificial Sequence
  derived and/or modified sequence
atggccctggtgagcggcatcagcctggaccccgaggccgccatcggtgtgacaaaacgacctcctcccaagtgggtggatggcgtggatgaaatccagtatgatgtggggcggatcaaacagaaaatgaaagagctggctagcctccatgataagcacttgaacaggcctacgctggacgactccagcgaggaagaacatgcaatcgaaatcacgacccaggagatcacacagctgtttcacaggtgccagcgggccgtgcaggctctgccttccagagcaagagcatgtagcgagcaggagggacgtctgttagggaacgtggtggcttctttggcccaagcgttgcaggaactaagcactagcttccgccatgcccagtcgggatacctgaagcggatgaaaaacagagaggaacgcagtcagcatttcttcgatacttccgtccctctcatggacgatggggacgataacacattgtatcacaggggatttaccgaggaccagctggttctcgtcgaacaaaacactctgatggttgaagaacgggaaagagagatcaggcagattgtccagagcatctccgaccttaacgaaatttttcgcgatttaggagccatgattgtggaacaggggaccgttctggaccgcatcgattataacgttgagcaatcctgtatcaagaccgaagacgggttgaagcaactccataaagcggaacagtaccagaagaaaaatcgcaagatgctggtttag

SEQ ID NO: 81792 - DNA, 819 bp, Artificial Sequence
  derived and/or modified sequence
atggccctggtgagcggcatcagcctggaccccgaggccgccatcggagtcactaagaggcccccgccgaagtgggttgacggcgtggatgagatccaatacgatgtaggcaggattaaacagaagatgaaagagctcgcctccctgcacgacaaacacctaaatcggccgacactcgacgactcctcggaggaggaacatgcaattgaaatcacgactcaggagatcacacagttgtttcatcgctgtcagcgggccgtgcaggcattgccatcaagagcccgcgcctgctccgaacaggagggccgcttgttggggaacgtggtcgcgagcctggcgcaagccctgcaggagctctctaccagttttaggcacgcacagtctggctatctgaagcggatgaagaatcgcgaagaaagatctcagcatttttttgacactagcgtgcccctcatggacgacggagacgacaataccctgtatcaccgcggctttaccgaggatcagcttgttctggttgaacaaaatacattgatggtcgaagagcgcgagcgcgagataagacaaattgttcagtccatctccgacctcaacgagatcttccgggacttaggcgcaatgattgtggaacagggaacagtgctcgatcgaatcgattacaacgtagagcagtcgtgcattaaaacagaagatggtcttaagcagctccacaaggccgagcagtatcagaagaagaatcgcaagatgctggtaattctcattctgtttgtcattatcatcgtgttaatcgtggttctggtcggggtgaaatctaggtag

SEQ ID NO: 81793 - DNA, 366 bp, Artificial Sequence
  derived and/or modified sequence
atggccctggtgagcggcatcagcctggaccccgaggccgccatcggtgttacgaagaggccgccaccaaagtgggtggacggcgtggatgagatccagtacgatgtaggcagaataaagcagaagatgaaagagttggcgagtttacacgataaacacctcaatcgacctaccctagacgatagttctgaggaggagcacgcgatcgagatcaccacccaggaaatcacccagctgtttcatcgctgccagcgcgcagttcaggcactgcctagcagagctcgggcttgcagtgagcaggaagggcgactactgggaaatgtggtggcctcacttgcacaggctcttcaggaactctcgacctag

SEQ ID NO: 81794 - DNA, 420 bp, Artificial Sequence
  derived and/or modified sequence
atgaagaaccgggaggagcggagccagcacttcttcgacaccagcgtgccgctgatggacgatggtgatgacaataccttataccaccgcggtttcacagaggaccagctggtgctggtcgagcagaacaccctgatggtggaggaacgggaaagggagatcaggcaaatcgtgcaatcaatttctgacctgaacgaaatctttcgcgatctgggagctatgatcgttgagcagggcactgtgctagacagaatagactataatgtggaacagagttgtatcaagaccgaggacgggctcaagcagctgcacaaagctgagcagtaccagaaaaaaaaccgaaaaatgcttgttatcctgattctctttgtgattattatagtgctgattgtggtgctagtcggagttaaatctcgctag

SEQ ID NO: 81795 - DNA, 660 bp, Artificial Sequence
  derived and/or modified sequence
ggcatcagcctggaccccgaggccgccatcggcgtgaccaagcggccacctcccaagtgggtcgatggggttgacgagatccaatatgacgtgggcagaattaagcaaaagatgaaggagctggcctcactgcacgacaaacaccttaatcgacccacactggatgattcttccgaggaagagcacgccatcgaaataacaacacaggagattactcagttattccaccgctgccagagggcggtgcaggcgcttccaagtcgcgctcgcgcgtgctcggagcaggagggaaggttgctaggcaacgtcgtggccagcttggcacaggccctccaggaactctccacttctttccgacatgctcagagcggatatctaaaacgcatgaaaaaccgcgaagagagatctcagcacttcttcgatacctcagtgccgctgatggatgacggcgatgacaacacactttatcaccggggtactgtgctggaccgcatagactacaatgttgagcagtcctgcattaaaactgaagacgggctaaagcagctccacaaggctgaacaataccagaaaaagaaccgaaagatgctggtgatcctaatcctgtttgtaataattattgtgttgatcgtggtactggttggggtgaagtcaaggtag

SEQ ID NO: 81796 - DNA, 369 bp, Artificial Sequence
  derived and/or modified sequence
atggccctggtgagcggcatcagcctggaccccgaggccgccatcggcgtcacaaagcgccctcctcctaagtgggtggatggggtggacgagatacagtacgatgtgggacggattaaacagaaaatgaaagagcttgcctcattacacgacaaacatctgaataggccgaccctggacgattctagtgaggaggaacatgcaatagaaattacgactcaggagattactcaactgttccaccggtgtcagcgtgctgtgcaggcactccccagcagagcccgagcctgctcggagcaggaggggaggctcctcggcaacgtcgtggcctcgcttgctcaggcactacaagaattgagcacttcttag

SEQ ID NO: 81797 - DNA, 615 bp, Artificial Sequence
  derived and/or modified sequence
atggctcttgtttcaggtattagcctcgatccagaggcagccattggagtcaccaagaggcctccgccaaagtgggtagacggcgtcgacgagattcaatacgatgttggcaggatcaaacagaagatgaaggaattagcctctctccacgacaaacacctgaaccgccctacgctggacgatagctctgaggaagagcacgcgatcgaaatcaccacacaggagatcacacagctattccacaggtgtcagcgcgcagttcaagccctgccctctcgggctcgagcgtgttcagaacaggagggcaggcttctaggcaatgtcgtagcgagcctggctcaggccctgcaggagctgagcacatcgtttagacatgcacagtctggatacctcaagcggatgaagaatcgggaggagcgatcgcagcatttcttcgatacaagcgtgccactaatggatgacggggatgacaatacactgtatcatagaggattcaccgaagatcagctggtactagtggaacaaaatactttaatggtcgaagagagagagcgggagatacggcagattgtgcagtcgattagtgatcttaacgaaatctttcgggatctctag

SEQ ID NO: 81798 - DNA, 756 bp, Artificial Sequence
  derived and/or modified sequence
atggcgctagtgtcaggtatttctctagaccccgaagccgcaatcggtgtcactaagcgaccgcctcccaagtgggtggacggagtggacgaaatacagtacgatgtcggcaggattaagcagaagatgaaagaattggcctctttgcacgataaacacttgaatcgtcctacactggatgactcttccgaagaggagcacgccattgagataacgacacaggagatcacccagctctttcacagatgtcagcgggctgtccaggcactaccaagccgtgctagagcttgtagcgagcaagaggggcgattgctggggaacgtcgtcgcttctctagcccaggccttgcaggagttatcaacatccttcagacatgctcagtcaggttaccttaagcgcatgaaaaaccgcgaggagcgcagtcagcacttctttgatacttctgtgcctctgatggacgacggtgacgacaataccctgtatcataggggcttcacggaagaccagttggtccttgtggaacagaatacgttgatggtggaagagagggaaagagagattcggcagatagtgcagtcaatcagcgatctcaacgagatattccgcgacctgggagccatgatcgtggagcaggggacagtgctggacaggatcgattataatgtcgagcagtcttgtattaagaccgaagacgggctcaagcaacttcacaaggctgagcagtaccaaaagaaaaataggaagatgttggtctag

SEQ ID NO: 81799 - DNA, 819 bp, Artificial Sequence
  derived and/or modified sequence
atggccctcgtgtccggcatctcattagaccctgaagcagctataggcgtgacaaaacgccctccaccgaaatgggtggacggggtcgacgagatacagtacgacgtcgggaggatcaagcagaagatgaaggagctggccagcttgcacgacaagcatctcaaccgtcctacactggacgatagttcagaagaggagcacgcgattgagatcacaacccaggaaatcacacagctcttccatagatgtcaacgcgcagttcaggctttaccatcaagggcacgggcatgcagtgaacaggaggggagactcctcggaaacgtggtcgcaagcctggcacaggccctccaggagttgtctacctccttccgccatgctcagtccggctatttgaaacgcatgaaaaatagagaagagcgatcccagcacttctttgacacatctgtcccattgatggacgatggcgatgacaacacactgtaccatcgaggctttacagaggatcagttagtgctcgtggaacagaatacccttatggtggaagaaagagaacgcgagatcaggcaaattgtgcagagcatatctgacctgaacgagatcttcagagatttaggcgcaatgatagtggaacaggggacagtgctggatcggattgattacaacgtggaacagtcttgcattaagacagaggacgggctcaaacaactgcacaaggcggagcagtaccaaaagaagaaccggaagatgctggttattctgattctgttcgtgataatcatagtcctgatagttgtgctcgttggcgtgaaaagcagatag

SEQ ID NO: 81800 - DNA, 366 bp, Artificial Sequence
  derived and/or modified sequence
atggcactcgttagtgggattagcctggatccagaagcagcgattggtgtcaccaagagaccccctcccaagtgggtggatggagtggatgagattcagtacgacgttggacgcattaagcagaagatgaaggagctggctagccttcatgacaagcacctcaacaggcctactctggacgactccagcgaagaggaacacgccattgagattacaacacaggagatcactcagctgttccacagatgccagcgtgcagtgcaggccctgccgtcacgtgcaagagcatgttccgaacaggagggcaggctgttgggcaacgtcgtggcatcgttagcacaggcgctgcaggaactgtccacctag

SEQ ID NO: 81801 - DNA, 420 bp, Artificial Sequence
  derived and/or modified sequence
atgaaaaaccgcgaagagagatctcagcattttttcgacaccagcgtcccccttatggacgacggcgatgacaacactctgtatcatcgcggttttactgaggaccaactggtcctcgtcgaacagaatacccttatggtggaggaacgggaacgggagatcagacagatcgtgcagtcaatcagtgacttgaacgagatattcagagatttaggagcaatgatcgtggaacagggcacagtgctggacagaattgattataacgtcgaacagagctgtatcaagacagaggatggcctcaaacaactacataaagccgagcagtatcaaaaaaagaaccggaagatgctggtgatcctgattctgttcgttataatcatcgtcttgatcgtcgtactggtcggtgtcaagtcacggtag

SEQ ID NO: 81802 - DNA, 660 bp, Artificial Sequence
  derived and/or modified sequence
ggcatcagcctggaccctgaagcggcaattggcgtcacgaagcgacccccacccaagtgggtggacggcgttgatgaaatccaatacgacgtgggaagaatcaagcaaaaaatgaaagagcttgctagccttcatgacaagcacctgaacagaccaaccctggacgattccagcgaagaggaacatgccatcgagatcactacccaggagataactcagctgttccaccgctgtcagagggctgtgcaggccctcccgtcacgtgctagagcatgtagtgaacaggagggacgtcttctaggcaatgttgtggccagcctggcccaggcccttcaggaactgagcacgagtttccgacatgcacaatccggctatttaaagaggatgaaaaacagagaggagcgatcccaacattttttcgatacctctgtgccattgatggacgacggggacgataacacactgtatcatagagggacagtcctagataggatagactacaatgtggaacagagctgtatcaagacggaggatggactcaaacaactgcataaagcagagcaatatcaaaagaaaaatcggaaaatgctggttattttaatcctattcgtgataataattgtactcatcgtagtcctcgtgggcgtcaagagccggtag

SEQ ID NO: 81803 - DNA, 369 bp, Artificial Sequence
  derived and/or modified sequence
atggccctggtcagcggcatctccctggatcctgaggcggcaattggagtcacaaaacgaccgcctcccaaatgggtggatggggtggatgaaattcagtacgacgtgggcagaattaaacaaaaaatgaaagagttagcaagtctccatgataagcacttgaacagaccgacactggacgatagttccgaagaggaacatgccatcgaaatcactacacaagaaatcacacaactatttcataggtgtcagcgcgctgtgcaggctctacctagccgggcaagagcttgctctgagcaggaaggacgtctcctcgggaacgttgtggcctcgctcgcacaggcattacaggagttaagcacatcttag

SEQ ID NO: 81804 - DNA, 843 bp, Artificial Sequence
  derived and/or modified sequence
tagatccagaagcagcgattggtgtgacaaaacggccacctcctaagtgggtggatggagtggatgaaattcagtatgatgttggccggattaagcagaagatgaaagaattggccagccttcatgacaagcatttaaacagacccaccctggatgacagcagcgaagaggaacatgccattgagataactacccaagagatcactcaggcatgaagaatcgagaggaaagatcccagcattttttcgacacatcagtaccactaatggatgatggagacgataacactctttaccatcggggttttacagaggaccagttagttctggtggagcagaacacactgatggtggaagagcgggaacgagagattcgccagattgtacagtccatttctgacctgaatgaaatattcagggacttaggggcgatgattgtagaacagggtacagtccttgacagaattgactataacgttgaacagtcctgtatcaaaactgaagatggtttgaaacagcttcacaaggcagaacagtatcaaaagaagaatcggaagatgcttgtgattttaatattatttgtcatcatcattgtgctcattgttgtcctcgttggcgtgaagtctcgataagtggcattgggttttcgtgtgtgccgcgcgtgtggatctcccgggtgtgaggggcttggcctgcgccccgccagctgcccgcagaggtgcagcctcgaggaatctgagggcgtcggggcagcgaacctttgcatccacggactcctccttccctagtcctgctcaagcggtccggggaatgggtttttgtttttccttcattgttgagaatt

SEQ ID NO: 81805 - DNA, 855 bp, Artificial Sequence
  derived and/or modified sequence
ggcatcagcttagatccagaagcagcgattggtgtgacaaaacggccacctcctaagtgggtggatggagtggatgaaattcagtatgatgttggccggattaagcagaagatgaaagaattggccagccttcatgacaagcatttaaacagacccaccctggatgacagcagcgaagaggaacatgccattgagataactacccaagagatcactcagctcttccacaggtgccagcgtgccgtgcaggccctgccgagccgggcccgggcctgctccgagcaggaggggcggctgcttgggaacgtggtggcctcgctggcgcaggccctgcaggaactctccaccagcttccggcacgcacagtcaggctacctcaaacgcatgaagaatcgagaggaaagatcccagcattttttcgacacatcagtaccactaatggatgatggagacgataacactctttaccatcggggtacagtccttgacagaattgactataacgttgaacagtcctgtatcaaaactgaagatggtttgaaacagcttcacaaggcagaacagtatcaaaagaagaatcggaagatgcttgtgattttaatattatttgtcatcatcattgtgctcattgttgtcctcgttggcgtgaagtctcgataagtggcattgggttttcgtgtgtgccgcgcgtgtggatctcccgggtgtgaggggcttggcctgcgccccgccagctgcccgcagaggtgcagcctcgaggaatctgagggcgtcggggcagcgaacctttgcatccacggactcctccttccctagtcctgctcaagcggtccggggaatgggtttttgtttttc

SEQ ID NO: 81806 - protein, 155 aa, Artificial Sequence
  derived and/or modified sequence
MRWFLPWTLAAVTAAAASTVLATALSPAPTTMDFTPAPLEDTSSRPQFCKWPCECPPSPPRCPLGVSLITDGCECCKMCAQQLGDNCTEAAICDPHRGLYCDYSGDRPRYAIGVCARREEVSGCVPARGIHELHTCGLHQHTLLSTQVLWSLHGQ

SEQ ID NO: 81807 - DNA, 468 bp, Artificial Sequence
  derived and/or modified sequence
atgagatggttcctgccctggaccctggccgccgtgaccgccgccgccgccagcaccgtgctggccaccgccctgagccccgcccccaccaccatggacttcacccccgcccccctggaggacaccagcagcagaccccagttctgcaagtggccctgcgagtgcccccccagcccccccagatgccccctgggcgtgagcctgatcaccgacggctgcgagtgctgcaagatgtgcgcccagcagctgggcgacaactgcaccgaggccgccatctgcgacccccacagaggcctgtactgcgactacagcggcgacagacccagatacgccatcggcgtgtgcgccagaagagaggaggtgagcggctgcgtgcccgccagaggcatccacgagctgcacacctgcggcctgcaccagcacaccctgctgagcacccaggtgctgtggagcctgcacggccagtag

SEQ ID NO: 81808 - DNA, 468 bp, Artificial Sequence
  derived and/or modified sequence
atgagatggttcctgccctggaccctggccgcggtcacagccgctgccgcctctaccgtcctcgctaccgctctctcaccagcccccactaccatggatttcactcctgcgcccctcgaggatacctcgagcagaccccagttctgtaaatggccatgcgaatgcccaccctctcctccacggtgtcctttgggtgtaagcctcataactgatggctgtgaatgctgtaagatgtgtgcgcagcaactgggggataattgtaccgaggctgcaatttgcgacccccaccggggcctgtactgtgactactctggtgatcgcccccgatatgccatcggtgtctgcgctcggcgggaagaggtgtccgggtgcgtgcccgcccgcggcattcatgaactgcacacctgtggtctgcaccaacataccctcctctctactcaggtactctggtctcttcacgggcagtag

SEQ ID NO: 81809 - DNA, 468 bp, Artificial Sequence
  derived and/or modified sequence
atgcgctggttcctgccctggaccctggccgctgtgacagctgctgctgccagcacagtgctggccacagccctgagccctgcccccaccaccatggacttcaccccagcccccctggaggacaccagcagccggccccagttctgcaagtggccctgtgagtgcccccccagccccccacgctgccccctgggcgtgtccctcatcacagatggctgtgagtgctgcaagatgtgtgcccagcagctgggggacaactgcacagaggccgccatctgtgacccccaccggggcctgtactgtgactacagcggggaccggcccaggtatgccatcggcgtgtgtgcccggcgggaggaggtgtctggctgtgtgcctgcccggggcatccacgagctgcacacctgtggcctgcaccagcacaccctgctgagcacccaggtgctgtggagcctgcacggccagtag

SEQ ID NO: 81810 - DNA, 468 bp, Artificial Sequence
  derived and/or modified sequence
atgcggtggttcctgccctggaccctggccgccgtgaccgccgccgccgcgtccaccgtattggcaaccgcactatcccccgcgccaacaacaatggactttacaccagcgcccttggaagacacttcttcccgcccccaattttgtaaatggccgtgtgaatgccctcccagcccgcctcgttgtcccctgggagtttccctgattaccgatggttgcgaatgctgtaagatgtgtgctcaacaactgggagacaactgcactgaagcagcaatatgtgatccacatcgtggattatattgcgactattcaggagatagaccccgctacgccatcggggtctgcgcacgcagagaggaggtctccggatgtgttcccgcgcgtggcatccatgaactgcatacctgtggccttcatcagcacacactgctctcaacacaggtgttgtggagcctgcatgggcaatag

SEQ ID NO: 81811 - DNA, 468 bp, Artificial Sequence
  derived and/or modified sequence
atgaggtggtttctcccatggacgctggccgctgtaaccgcagccgcagcgagcacggttctggccaccgctctgtctccagctccaaccaccatggacttcactccagcgcctctagaggatacaagtagtcgaccccagttttgcaaatggccatgtgaatgccccccttcgccacctagatgcccgctgggcgtgtccttaatcacagatggatgcgaatgttgcaaaatgtgcgctcagcagctgggagacaactgtaccgaggccgctatctgcgaccctcaccgaggactgtactgcgattactctggcgacaggcctaggtatgcgatcggggtttgcgccaggagagaagaggtgtctggatgtgtgcccgcaagaggcattcacgaactccacacgtgtggactgcaccagcataccctcctgtcaacacaggttctttggtctcttcatggacagtag

SEQ ID NO: 81812 - DNA, 716 bp, Artificial Sequence
  derived and/or modified sequence
ccgagaggtggtcggatcctctgggctgctcggtcgatgcctgtgccactgacgtccaggcatgaggtggttcctgccctggacgctggcagcagtgacagcagcagccgccagcaccgtcctggccacggccctctctccagcccctacgaccatggactttaccccagctccactggaggacacctcctcacgcccccaattctgcaagtggccatgtgagtgcccgccatccccaccccgctgcccgctgggggtcagcctcatcacagatggctgtgagtgctgtaagatgtgcgctcagcagcttggggacaactgcacggaggctgccatctgtgacccccaccggggcctctactgtgactacagcggggaccgcccgaggtacgcaataggagtgtgtgcacgcagggaagaagtgtctggctgtgtaccagccagaggcatccatgaacttcacacttgcgggctgcatcagcacacgctcctatcaacccaagtactgtggagtttgcatggacaataggtgctgcatcccctacaagtctaagactatcgacgtgtccttccagtgtcctgatgggcttggcttctcccgccaggtcctatggattaatgcctgcttctgtaacctgagctgtaggaatcccaatgacatctttgctgacttggaatcctaccctgacttctcagaaattgccaactaggcaggc

SEQ ID NO: 81813 - protein, 122 aa, Artificial Sequence
  derived and/or modified sequence
MRWFLPWTLAAVTAAAASTVLATAGKKCLAVYQPEASMNFTLAGCISTRSYQPKYCGVCMDNRCCIPYKSKTIDVSFQCPDGLGFSRQVLWINACFCNLSCRNPNDIFADLESYPDFSEIAN

SEQ ID NO: 81814 - DNA, 369 bp, Artificial Sequence
  derived and/or modified sequence
atgagatggttcctgccctggaccctggccgccgtgaccgccgccgccgccagcaccgtgctggccaccgccggcaagaagtgcctggccgtgtaccagcccgaggccagcatgaacttcaccctggccggctgcatcagcaccagaagctaccagcccaagtactgcggcgtgtgcatggacaacagatgctgcatcccctacaagagcaagaccatcgacgtgagcttccagtgccccgacggcctgggcttcagcagacaggtgctgtggatcaacgcctgcttctgcaacctgagctgcagaaaccccaacgacatcttcgccgacctggagagctaccccgacttcagcgagatcgccaactag

SEQ ID NO: 81815 - DNA, 369 bp, Artificial Sequence
  derived and/or modified sequence
atgaggtggtttttaccatggacactggccgccgtgactgccgccgctgctagcaccgttcttgcaacagccggcaagaaatgcctggcagtataccagcccgaagcctccatgaacttcactctcgctgggtgcatcagcaccagaagttatcagcccaaatattgcggcgtttgcatggataaccggtgctgtatcccttacaagagcaaaaccattgacgttagtttccagtgccctgacggcctgggcttcagccgccaagtgctctggatcaatgcgtgcttctgtaatttgtcttgtcggaacccaaacgatattttcgccgatctggaatcatatcctgacttctcagagatagcgaattag

SEQ ID NO: 81816 - DNA, 369 bp, Artificial Sequence
  derived and/or modified sequence
atgcgctggttcctgccctggaccctggccgctgtgacagctgctgctgccagcacagtgctggccacagctgggaagaagtgcctggccgtgtaccagcctgaggcctccatgaacttcaccctggccggctgcatcagcaccaggagctaccagcccaagtactgcggcgtgtgcatggacaaccgctgctgcatcccctacaagagcaagaccattgatgtgtccttccagtgcccagatggcctgggcttcagccggcaggtgctgtggatcaatgcctgcttctgcaacctgagctgcaggaaccccaatgacatctttgctgacctggagagctacccagacttcagcgagatcgccaactag

SEQ ID NO: 81817 - DNA, 369 bp, Artificial Sequence
  derived and/or modified sequence
atgcggtggttcctgccctggaccctggccgccgtgaccgccgccgccgcctccaccgtgctagccacagccgggaagaaatgtcttgccgtctatcagcccgaggccagcatgaacttcaccctggcaggctgcatttccacacggtcttaccagccgaaatattgcggggtgtgtatggataaccgctgctgtatcccgtacaagtcaaagaccatagacgtttcctttcagtgtcctgacggactgggattttctcggcaggtcctttggatcaatgcctgtttttgtaatctgtcctgcagaaacccaaacgacatatttgctgatctggagagttatcctgattttagcgagattgccaactag

SEQ ID NO: 81818 - DNA, 369 bp, Artificial Sequence
  derived and/or modified sequence
atgaggtggttcctaccgtggacacttgctgctgttactgctgcagcggcatcaacagtcctggccaccgcaggaaaaaagtgcttggcagtatatcagccagaagccagcatgaattttactctcgcaggctgcatttcaacaaggtcttaccaaccaaagtactgcggggtttgtatggataatcgctgctgcattccatacaagtccaagacgattgacgtttcatttcaatgtccagacgggctgggattcagtagacaggtactctggatcaatgcctgtttctgtaaccttagctgccgcaacccgaatgatatcttcgccgatcttgaaagctaccccgacttcagcgagattgctaactag

SEQ ID NO: 81819 - DNA, 545 bp, Artificial Sequence
  derived and/or modified sequence
ctgggcccagctcccccgagaggtggtcggatcctctgggctgctcggtcgatgcctgtgccactgacgtccaggcatgaggtggttcctgccctggacgctggcagcagtgacagcagcagccgccagcaccgtcctggccacggcagggaagaagtgtctggctgtgtaccagccagaggcatccatgaacttcacacttgcgggctgcatcagcacacgctcctatcaacccaagtactgtggagtttgcatggacaataggtgctgcatcccctacaagtctaagactatcgacgtgtccttccagtgtcctgatgggcttggcttctcccgccaggtcctatggattaatgcctgcttctgtaacctgagctgtaggaatcccaatgacatctttgctgacttggaatcctaccctgacttctcagaaattgccaactaggcaggcacaaatcttgggtcttggggactaacccaatgcctgtgaagcagtcagcccttatggccaataacttttcaccaatgagccttagttaccctga

SEQ ID NO: 81820 - protein, 495 aa, Artificial Sequence
  derived and/or modified sequence
MELHGGNRGGYQPKALEQSGCWLWQAALSTLNPNPTDSCPLYLNYATVAALPCRVSRHNSPSAAHFITRLVRTCLPPGAHRCIVMVCEQPEVFASACALARAFPLFTHRSGASRRLEKKTVTVEFFLVGQDNGPVEVSTLQCLANATDGVRLAARIVDTPCNEMNTDTFLEEINKVGKELGIIPTIIRDEELKTRGFGGIYGVGKAALHPPALAVLSHTPDGATQTIAWVGKGIVYDTGGLSIKGKTTMPGMKRDCGGAAAVLGAFRAAIKQGFKDNLHAVFCLAENSVGPNATRPDDIHLLYSGKTVEINNTDAEGRLVLADGVSYACKDLGADIILDMATLTGAQGIATGKYHAAVLTNSAEWEAACVKAGRKCGDLVHPLVYCPELHFSEFTSAVADMKNSVADRDNSPSSCAGLFIASHIGFDWPGVWVHLDIAAPVHAGERATGFGVALLLALFGRASEDPLLNLVSPLGCEVDVEEGDLGRDSKRRRLV

SEQ ID NO: 81821 - DNA, 1488 bp, Artificial Sequence
  derived and/or modified sequence
atggagctgcacggcggcaacagaggcggctaccagcccaaggccctggagcagagcggctgctggctgtggcaggccgccctgagcaccctgaaccccaaccccaccgacagctgccccctgtacctgaactacgccaccgtggccgccctgccctgcagagtgagcagacacaacagccccagcgccgcccacttcatcaccagactggtgagaacctgcctgccccccggcgcccacagatgcatcgtgatggtgtgcgagcagcccgaggtgttcgccagcgcctgcgccctggccagagccttccccctgttcacccacagaagcggcgccagcagaagactggagaagaagaccgtgaccgtggagttcttcctggtgggccaggacaacggccccgtggaggtgagcaccctgcagtgcctggccaacgccaccgacggcgtgagactggccgccagaatcgtggacaccccctgcaacgagatgaacaccgacaccttcctggaggagatcaacaaggtgggcaaggagctgggcatcatccccaccatcatcagagacgaggagctgaagaccagaggcttcggcggcatctacggcgtgggcaaggccgccctgcacccccccgccctggccgtgctgagccacacccccgacggcgccacccagaccatcgcctgggtgggcaagggcatcgtgtacgacaccggcggcctgagcatcaagggcaagaccaccatgcccggcatgaagagagactgcggcggcgccgccgccgtgctgggcgccttcagagccgccatcaagcagggcttcaaggacaacctgcacgccgtgttctgcctggccgagaacagcgtgggccccaacgccaccagacccgacgacatccacctgctgtacagcggcaagaccgtggagatcaacaacaccgacgccgagggcagactggtgctggccgacggcgtgagctacgcctgcaaggacctgggcgccgacatcatcctggacatggccaccctgaccggcgcccagggcatcgccaccggcaagtaccacgccgccgtgctgaccaacagcgccgagtgggaggccgcctgcgtgaaggccggcagaaagtgcggcgacctggtgcaccccctggtgtactgccccgagctgcacttcagcgagttcaccagcgccgtggccgacatgaagaacagcgtggccgacagagacaacagccccagcagctgcgccggcctgttcatcgccagccacatcggcttcgactggcccggcgtgtgggtgcacctggacatcgccgcccccgtgcacgccggcgagagagccaccggcttcggcgtggccctgctgctggccctgttcggcagagccagcgaggaccccctgctgaacctggtgagccccctgggctgcgaggtggacgtggaggagggcgacctgggcagagacagcaagagaagaagactggtgtag

SEQ ID NO: 81822 - DNA, 1488 bp, Artificial Sequence
  derived and/or modified sequence
atggagttgcacgggggcaatcgcgggggctaccaacccaaggctctagagcaatccggttgctggctctggcaggctgcactgtcaaccctcaacccaaatcccacagactcttgtcccctgtacttgaactatgccaccgttgccgcgctgccctgtagggtttctcggcacaactcgcccagtgctgcccacttcatcacccggttggtgaggacctgcctgcccccaggcgcccataggtgcatcgtgatggtttgtgaacagcccgaggtgttcgcttccgcttgcgccctcgcccgcgccttcccactttttactcaccgctctggtgcatcaaggcggcttgagaaaaagaccgtgaccgtagagttcttccttgtgggccaggataacgggccagtggaggtttcaactctgcagtgtctggccaacgccacagacggggtccgcctcgccgctagaatagtggacaccccttgcaatgagatgaatactgataccttcctggaggaaatcaataaagtcgggaaggagctgggaattatccccaccatcatccgcgacgaagagttgaagaccagaggattcggggggatctatggcgtgggcaaggcggcgctgcacccccccgctttggccgtgttgagtcacacgcccgacggtgccacccagaccattgcctgggtgggcaaaggcattgtgtacgacaccgggggcttgtccattaaaggaaaaacaaccatgcccggcatgaagagggattgcggtggggccgccgccgtgcttggcgcgtttcgcgcagctattaagcaaggctttaaggacaacctgcacgcagtgttttgtctggcggagaacagtgtcggacctaacgccaccaggccagatgatatccatctgctttattccggaaagactgttgagattaacaacactgacgccgaagggcgattagttctggctgacggcgtgtcgtatgcctgtaaagatctaggcgctgatattattctggacatggctacactgactggggcccagggaatcgcaaccggaaaatatcatgctgctgtcctgactaactccgccgagtgggaagccgcgtgcgtgaaagccggacgcaaatgcggggacctagtgcacccactggtgtattgtcccgagctccattttagtgagttcacctctgctgtggccgatatgaaaaatagtgtggccgatcgggacaactccccaagcagctgtgctggtttgttcatcgcatcccatatcggtttcgactggcctggtgtgtgggtgcacttagatatcgctgctcccgtacacgcgggcgagagagcaaccgggtttggggtggccttgttgctggccttgtttggtagggcctccgaggacccgctcctgaacctcgtgtcaccgctcggctgcgaggtagatgtggaagaaggtgatctgggccgggatagcaagcgcagacgcctcgtgtag

SEQ ID NO: 81823 - DNA, 1488 bp, Artificial Sequence
  derived and/or modified sequence
atggagctgcacggcggcaacagaggaggctaccagcccaaggccctggagcagagcggctgctggctgtggcaggccgccctgagcaccctgaaccccaaccccacagacagctgccccctgtacctgaactatgccaccgtggccgccctgccctgccgggtgagccgccacaacagccccagcgctgcccacttcatcacccggctggtgaggacctgcctgcccccaggggcccaccgctgcatcgtgatggtgtgtgagcagcctgaggtgtttgccagcgcctgtgccctggcccgggccttccccctcttcacccacaggtctggggccagccggcggctggagaagaagacagtgacagtggagttcttcctggtgggccaggacaatggacctgtggaggtgtccaccctgcagtgcctggccaatgccacagatggagtgcggctggccgcccgcatcgtggacaccccctgcaatgagatgaacacagacaccttcctggaggagatcaacaaggtgggcaaggagctgggcatcatccccaccatcatcagagatgaggagctgaagacccggggctttggaggcatctatggagtgggcaaggccgccctgcaccccccagccctggccgtgctgagccacaccccagatggagccacccagaccatcgcctgggtgggcaagggcatcgtgtatgacaccggcggcctgagcatcaagggcaagaccaccatgcctggcatgaagagggactgtggcggcgctgctgctgtgctgggcgccttccgggccgccatcaagcagggcttcaaggacaacctgcatgctgtgttctgcctggccgagaacagcgtgggccccaatgccaccaggccagatgacatccacctgctgtacagcggcaagacagtggagatcaacaacacagatgctgagggccgcctggtgctggctgatggagtgtcctatgcctgcaaggacctgggcgctgacatcatcctggacatggccaccctgaccggggcccagggcatcgccaccgggaagtaccacgccgctgtgctgaccaacagcgctgagtgggaggccgcctgtgtgaaggccggcaggaaatgtggggacctggtgcaccccctggtgtactgcccagagctgcacttcagcgagttcaccagcgctgtggccgacatgaagaacagcgtggccgaccgggacaacagccccagcagctgtgccggcctcttcatcgccagccacatcggctttgactggccaggagtgtgggtgcacctggacattgctgcccctgtgcatgctggggagcgggccaccggcttcggcgtggccctgctgctggccctgtttggccgggccagcgaggaccccctgctgaacctggtgagccccctgggctgtgaggtggatgtggaggagggggacctgggccgggacagcaagagaagaaggctggtgtag

SEQ ID NO: 81824 - DNA, 1488 bp, Artificial Sequence
  derived and/or modified sequence
atggagctgcacggcggcaaccggggcggctaccagcccaaggccttagagcagagtggctgttggttgtggcaggcagcactgtctacactgaacccgaacccaacagatagttgtcccctttacctgaattatgctaccgtagcggcgctaccttgtcgtgtatcacgacataatagccccagtgctgctcatttcattacacgactcgtgcgaacgtgcctcccacccggtgcgcaccggtgcattgttatggtgtgtgaacagcccgaggtgtttgcatcagcttgtgcactagctcgagccttccctttgtttacgcaccgctctggggccagcaggcggctggagaagaaaaccgtgaccgtcgaatttttcctcgtcggacaggataacgggcccgtggaagtttctaccctacagtgccttgctaatgcgaccgatggggtgaggctggcggctcgtatcgtagacactccatgtaatgaaatgaataccgacacgttcttagaggaaataaacaaggttgggaaggagctcggcatcatacctacgatcatccgagatgaggaattaaagactagaggttttggcgggatttatggagtgggcaaggctgcgctgcatccgcccgctctcgcagtgcttagccacacgccagatggggctacccagacaattgcgtgggttggcaagggcatcgtctatgatacaggcggtctctccatcaaggggaaaactacaatgcccgggatgaaacgagactgtgggggcgccgcagccgtgctgggtgcatttagggccgccattaagcagggctttaaagataacctgcacgctgtcttctgtctggctgagaatagcgtaggccccaacgcaacgcgtccagatgatatacatcttttgtattctggtaagacagtcgaaattaataacaccgacgcagaaggccgcctcgtgttggccgacggcgtctcgtatgcatgcaaggatttaggagcggacattattcttgacatggccactctgaccggtgcgcagggcattgccacaggtaagtatcacgcagctgtgctgacaaactccgccgagtgggaagccgcttgcgttaaagcaggtcgaaagtgtggggatctcgtccaccctttggtgtattgcccagaactacactttagtgaattcacaagcgccgttgccgatatgaaaaactctgtcgcggatagggacaattccccatcgtcctgtgcggggctctttatcgcttcccacatagggtttgattggcctggagtgtgggtgcacctcgacatcgccgcccccgtgcatgcgggcgaaagagcgaccggctttggcgtcgcgctgctgcttgcacttttcggtcgggccagcgaggacccattactgaatctggttagccccttgggctgtgaggtcgacgttgaagaaggcgacctggggagggatagcaagcgtcgtaggctcgtgtag

SEQ ID NO: 81825 - DNA, 1488 bp, Artificial Sequence
  derived and/or modified sequence
atggagcttcacggcggaaaccgcggagggtaccagccaaaggccttggagcaatccggctgctggctgtggcaagctgccctgagtacactgaaccctaaccctacggacagctgtcctctgtatttaaattacgccacggtggccgctctgccatgtagggtgagcagacacaatagccctagcgccgcacacttcattacgaggctcgtcaggacttgcctgcctcccggtgcacataggtgtatcgttatggtatgcgagcaacccgaggtgttcgcatccgcttgcgcgttggcacgggcttttcctcttttcacccaccgctcaggcgctagccgccgtctcgaaaagaagaccgttacagtagaattcttcctcgttggtcaggacaatgggcctgtggaggtcagtactctccagtgcctggctaatgcaaccgacggtgtgcgcctcgctgctcggatcgtcgacaccccctgtaacgagatgaacacagatacctttctggaggaaatcaacaaagtgggtaaagagctcggaatcattccaaccatcataagagatgaagaactgaagacacgcggattcggaggcatttatggcgtgggaaaagccgcactgcatcccccagcactggcagtcctgtctcatacacccgatggcgcaacccaaacgatagcctgggtagggaaaggcatcgtgtacgataccgggggactgtccattaagggcaaaactactatgccgggtatgaagagggactgcggcggagcagccgcagtgctgggggcattcagggccgcaattaaacaaggatttaaggataatttgcacgccgtcttttgtcttgcagagaactctgtcggccctaatgcaacccgacccgacgacatccacttactctatagcggcaagaccgtggagatcaataacaccgatgccgaaggcaggctagtactggctgacggtgtctcctacgcctgtaaggacctgggcgcagatatcattctcgacatggcaacgttgactggcgctcagggcatagccaccggcaagtatcatgccgctgtgcttactaatagtgctgaatgggaggcagcctgcgtgaaggcagggaggaagtgtggtgatttggtccaccctcttgtctactgccctgagctgcatttttccgagtttactagcgccgtggcggatatgaaaaactcagtggcggaccgggacaactctccttcatcttgcgctggcctattcatagcatcccacatcggattcgattggcccggagtttgggtccacttagacatcgccgctccggtgcatgctggcgagagggcaacaggattcggagtggccctgcttcttgccttgtttggcagagcaagcgaagaccccctccttaacttggtgtcccctttgggatgcgaggtggacgtagaggagggcgatctcggaagagactccaaacgacgcaggctggtctag

SEQ ID NO: 81826 - DNA, 1917 bp, Artificial Sequence
  derived and/or modified sequence
cttccttgcttccacttcaggcctgcctgaggcacttccactggtctccagttacttgcaaggtcaagtacaacctgcaaggctggttatgaagaagaaactcaaaataacaggagtggcttatggaactacatggaggtaacagaggagggtaccaaccaaaggcccttgagcaatcaggatgttggctctggcaggctgccctgagcacgctcaaccccaaccccacggacagctgtcccctctacctgaactacgccaccgtggctgccctgccctgcagggtgagccggcacaacagcccctcggccgcccacttcatcacgcggctggtgcggacctgcctgccgcccggagcgcatcgctgcattgtgatggtctgcgagcagccggaggtctttgcttccgcctgtgccctggcccgggccttcccgctgttcacccaccgctcaggtgcctctcggcgcttggagaagaagacggtcaccgtggagtttttcctggtgggacaagacaacgggccggtggaggtgtccacattgcagtgcttagcgaatgccacagacggcgtgcggctagcagcccgcatcgtggacacaccctgcaatgagatgaacaccgacaccttcctcgaggagattaacaaagttggaaaggagctggggatcatcccaaccatcatccgggatgaggaactgaagacgagaggatttggaggaatctatggggttggcaaagccgccctgcatcccccagccctggccgtcctcagccacaccccagatggagccacgcagaccatcgcctgggtgggcaaaggcatcgtctatgacactggaggcctcagcatcaaagggaagactaccatgccggggatgaagcgagactgcgggggtgctgcggccgtcctgggggccttcagagccgcaatcaagcagggtttcaaagacaacctccacgctgtgttctgcttggctgagaactcggtggggcccaatgcgacaaggccagatgacatccacctgctgtactcagggaagacggtggaaatcaacaacacggatgccgagggcaggctggtgctggcagatggcgtgtcctatgcttgcaaggacctgggggccgacatcatcctggacatggccaccctgaccggggctcagggcattgccacagggaagtaccacgccgcggtgctcaccaacagcgctgagtgggaggccgcctgtgtgaaggcgggcaggaagtgtggggacctggtgcacccgctggtctactgccccgagctgcacttcagcgagttcacctcagctgtggcggacatgaagaactcagtggcggaccgagacaacagccccagctcctgtgctggcctcttcatcgcctcacacatcggcttcgactggcccggagtctgggtccacctggacattgctgcaccggtgcatgctggtgagcgagccacaggcttcggtgtggccctcctgctggcgctcttcggccgtgcctctgaggaccctctgctgaacctggtgtccccactgggctgtgaggtggatgtcgaggagggggacctggggagggactccaagagacgcaggcttgtgtgagcctcctgcctcggccctgacaaacggggatcttttacctcactttgcactgattaattttaagcaattgaaagattgcccttcatatgggttttggtttgtctttctggtcgtcagcgtggtggtggaaacagctgaagttttaggagacagcttagggtttggtgcgggccacggggaggggaccgggaagcgctggggcttgtttctgtttgttacttacaggactgagacatcttctgtaaactgctacccctggggccttctgcaccccggggtgaggcctcctgcctgcctggtgccctgt

SEQ ID NO: 81827 - protein, 475 aa, Artificial Sequence
  derived and/or modified sequence
MELWQAALSTLNPNPTDSCPLYLNYATVAALPCRVSRHNSPSAAHFITRLVRTCLPPGAHRCIVMVCEQPEVFASACALARAFPLFTHRSGASRRLEKKTVTVEFFLVGQDNGPVEVSTLQCLANATDGVRLAARIVDTPCNEMNTDTFLEEINKVGKELGIIPTIIRDEELKTRGFGGIYGVGKAALHPPALAVLSHTPDGATQTIAWVGKGIVYDTGGLSIKGKTTMPGMKRDCGGAAAVLGAFRAAIKQGFKDNLHAVFCLAENSVGPNATRPDDIHLLYSGKTVEINNTDAEGRLVLADGVSYACKDLGADIILDMATLTGAQGIATGKYHAAVLTNSAEWEAACVKAGRKCGDLVHPLVYCPELHFSEFTSAVADMKNSVADRDNSPSSCAGLFIASHIGFDWPGVWVHLDIAAPVHAGERATGFGVALLLALFGRASEDPLLNLVSPLGCEVDVEEGDLGRDSKRRRLV

SEQ ID NO: 81828 - DNA, 1428 bp, Artificial Sequence
  derived and/or modified sequence
atggagctgtggcaggccgccctgagcaccctgaaccccaaccccaccgacagctgccccctgtacctgaactacgccaccgtggccgccctgccctgcagagtgagcagacacaacagccccagcgccgcccacttcatcaccagactggtgagaacctgcctgccccccggcgcccacagatgcatcgtgatggtgtgcgagcagcccgaggtgttcgccagcgcctgcgccctggccagagccttccccctgttcacccacagaagcggcgccagcagaagactggagaagaagaccgtgaccgtggagttcttcctggtgggccaggacaacggccccgtggaggtgagcaccctgcagtgcctggccaacgccaccgacggcgtgagactggccgccagaatcgtggacaccccctgcaacgagatgaacaccgacaccttcctggaggagatcaacaaggtgggcaaggagctgggcatcatccccaccatcatcagagacgaggagctgaagaccagaggcttcggcggcatctacggcgtgggcaaggccgccctgcacccccccgccctggccgtgctgagccacacccccgacggcgccacccagaccatcgcctgggtgggcaagggcatcgtgtacgacaccggcggcctgagcatcaagggcaagaccaccatgcccggcatgaagagagactgcggcggcgccgccgccgtgctgggcgccttcagagccgccatcaagcagggcttcaaggacaacctgcacgccgtgttctgcctggccgagaacagcgtgggccccaacgccaccagacccgacgacatccacctgctgtacagcggcaagaccgtggagatcaacaacaccgacgccgagggcagactggtgctggccgacggcgtgagctacgcctgcaaggacctgggcgccgacatcatcctggacatggccaccctgaccggcgcccagggcatcgccaccggcaagtaccacgccgccgtgctgaccaacagcgccgagtgggaggccgcctgcgtgaaggccggcagaaagtgcggcgacctggtgcaccccctggtgtactgccccgagctgcacttcagcgagttcaccagcgccgtggccgacatgaagaacagcgtggccgacagagacaacagccccagcagctgcgccggcctgttcatcgccagccacatcggcttcgactggcccggcgtgtgggtgcacctggacatcgccgcccccgtgcacgccggcgagagagccaccggcttcggcgtggccctgctgctggccctgttcggcagagccagcgaggaccccctgctgaacctggtgagccccctgggctgcgaggtggacgtggaggagggcgacctgggcagagacagcaagagaagaagactggtgtag

SEQ ID NO: 81829 - DNA, 1428 bp, Artificial Sequence
  derived and/or modified sequence
atggagctctggcaggcagccctttccaccctgaaccccaaccccaccgactcgtgtccgttgtaccttaattatgcaactgtggccgccttgccatgtagagtgtctaggcataacagtccatcagccgcccatttcatcactcgcttggttcgtacatgcctccctccaggggcacacaggtgcatcgtgatggtgtgtgaacagccagaggtatttgccagcgcttgcgcgctggcacgggcattcccgttgtttacccaccgatctggagcctcacgccggctcgagaaaaaaacagtgaccgttgaattcttccttgttgggcaggacaatggccccgtggaagtgtccaccctccagtgtttggctaatgcaaccgatggggtacggctcgctgcgcgcatcgtggatacaccgtgtaatgagatgaatacagacacattcctagaagagatcaataaggtgggcaaggagctcggaatcatccccactattattcgcgatgaagaattaaaaacccgcggatttggtggtatttatggcgtggggaaggcagctctgcatccccccgcactggcagtgttaagccacactcctgatggcgccacacagacgattgcctgggttggaaagggcatcgtttatgacactggcggtctttcaataaaaggaaagactacaatgccaggtatgaagcgcgactgcgggggagccgcagccgtcctgggtgcctttagggcagcaatcaagcagggcttcaaagataaccttcatgccgttttctgcttggcagaaaattctgtgggccccaacgccacccgccccgatgacattcatcttctctacagtgggaaaacagtcgagataaacaacactgatgcagagggtaggctggtgctcgcggatggcgttagctatgcatgtaaggatttaggagcggacattatcctcgatatggcgaccctcaccggcgcacaggggatcgcgactggaaaatatcatgccgccgtcctgaccaactcagcagagtgggaagcagcttgtgtcaaagcaggcaggaagtgcggggacttagttcaccccttggtttattgccccgaactgcatttttcagagttcaccagcgctgtggccgatatgaagaatagcgttgccgaccgagataattcaccctccagctgcgctggcctttttattgcttcccacatcgggtttgattggcccggcgtctgggtacatctcgatatcgcagcccctgtgcacgccggcgagagagcaacaggattcggagtcgccctgcttttagccctgttcggccgagccagcgaggaccccttgctgaaccttgtatcccccctcggctgcgaggtcgacgttgaggagggggacctagggagagattccaagagacggaggctcgtgtag

SEQ ID NO: 81830 - DNA, 1428 bp, Artificial Sequence
  derived and/or modified sequence
atggagctgtggcaggccgccctgagcaccctgaaccccaaccccacagacagctgccccctgtacctgaactatgccaccgtggccgccctgccctgccgggtgagccgccacaacagccccagcgctgcccacttcatcacccggctggtgaggacctgcctgcccccaggggcccaccgctgcatcgtgatggtgtgtgagcagcctgaggtgtttgccagcgcctgtgccctggcccgggccttccccctcttcacccacaggtctggggccagccggcggctggagaagaagacagtgacagtggagttcttcctggtgggccaggacaatggacctgtggaggtgtccaccctgcagtgcctggccaatgccacagatggagtgcggctggccgcccgcatcgtggacaccccctgcaatgagatgaacacagacaccttcctggaggagatcaacaaggtgggcaaggagctgggcatcatccccaccatcatcagagatgaggagctgaagacccggggctttggaggcatctatggagtgggcaaggccgccctgcaccccccagccctggccgtgctgagccacaccccagatggagccacccagaccatcgcctgggtgggcaagggcatcgtgtatgacaccggcggcctgagcatcaagggcaagaccaccatgcctggcatgaagagggactgtggcggcgctgctgctgtgctgggcgccttccgggccgccatcaagcagggcttcaaggacaacctgcatgctgtgttctgcctggccgagaacagcgtgggccccaatgccaccaggccagatgacatccacctgctgtacagcggcaagacagtggagatcaacaacacagatgctgagggccgcctggtgctggctgatggagtgtcctatgcctgcaaggacctgggcgctgacatcatcctggacatggccaccctgaccggggcccagggcatcgccaccgggaagtaccacgccgctgtgctgaccaacagcgctgagtgggaggccgcctgtgtgaaggccggcaggaaatgtggggacctggtgcaccccctggtgtactgcccagagctgcacttcagcgagttcaccagcgctgtggccgacatgaagaacagcgtggccgaccgggacaacagccccagcagctgtgccggcctcttcatcgccagccacatcggctttgactggccaggagtgtgggtgcacctggacattgctgcccctgtgcatgctggggagcgggccaccggcttcggcgtggccctgctgctggccctgtttggccgggccagcgaggaccccctgctgaacctggtgagccccctgggctgtgaggtggatgtggaggagggggacctgggccgggacagcaagagaagaaggctggtgtag

SEQ ID NO: 81831 - DNA, 1428 bp, Artificial Sequence
  derived and/or modified sequence
atggagctgtggcaggccgccctgagcaccctgaaccccaaccccaccgattcatgtcccctgtacctgaattatgctaccgtggctgcattgccttgccgggtctcacgacacaattcaccaagtgcagcccattttatcaccagactggttagaacctgcctcccacctggggctcatcgttgtattgttatggtgtgtgaacagcctgaggtattcgcctctgcttgcgccctcgcccgcgctttcccactctttacccataggagtggagcaagcagacggcttgaaaagaaaaccgtcacggtcgagttttttctggtcgggcaggacaacggacctgtggaagttagtacattgcaatgtttggccaatgctactgacggagtcaggctagctgcccgcatcgttgatacgccatgcaacgaaatgaacacagatacattcctcgaggaaatcaataaggtcgggaaggagctgggaatcattcctacaataatcagggatgaggaacttaaaactaggggcttcggcgggatttatggcgtggggaaagcggcattacaccctccagcactcgcggtgctgtcacataccccggacggtgccactcaaacaatcgcatgggttggcaagggaatcgtatatgatacgggagggttatctatcaaaggaaagacgacaatgcccgggatgaagcgcgattgtggaggtgccgctgctgtactgggtgcctttcgagctgcgattaaacagggtttcaaggacaatctgcacgccgtcttctgtctggccgaaaactcagtcggccctaacgctacccgccccgatgatattcatctgttatacagtggaaagacagttgagataaacaatacagacgccgagggaagactcgtgctggccgacggagtgtcctatgcctgtaaggatctgggggcggacattattctagatatggcaacgctgaccggggcccagggcatcgcgaccgggaaataccacgcagctgtgttaaccaattcagccgaatgggaagcggcttgtgtcaaggccgggaggaaatgcggcgacctcgtccatccactcgtgtattgcccggaactgcatttttctgaattcacgtccgcggtggccgacatgaagaacagcgtagcagacagggataatagtccctcgagctgcgcaggtctctttatcgcttcacatatcggcttcgattggccaggagtctgggtgcatttggatattgccgcccccgtgcacgccggcgagcgcgcaacggggttcggagtcgccctgctattagccttgtttgggagggcctccgaagaccctctactaaatcttgtaagtcctctgggctgcgaggtagacgtcgaagagggggaccttggtcgggactctaagaggagacggcttgtgtag

SEQ ID NO: 81832 - DNA, 1428 bp, Artificial Sequence
  derived and/or modified sequence
atggagctctggcaggcagcgctttcaacactgaatcctaaccctactgattcgtgccctttgtacctgaattatgctaccgtggcggctctcccctgtagagtctcacgccacaatagtccatccgctgcacacttcatcacaagactcgtcaggacctgtctgccccctggagctcaccggtgcattgttatggtgtgtgagcagccagaagtttttgcatcggcatgtgccctcgctagggccttccctctgtttacccaccgctcaggggctagcagaaggctggagaagaaaacagtgacagtggagtttttcctggtcgggcaggataatggtcctgtggaagtcagcaccctccaatgtttagccaatgctacagatggtgtgaggctggcagctcgcatcgtcgatactccatgtaacgaaatgaacaccgatactttcctggaagaaattaacaaggtgggcaaagagctcggaatcattcctactatcattagggacgaggagctcaagacccgcggattcggaggcatttatggcgttggcaaggccgcacttcacccccctgccttagcggtgctgtcccatacccccgatggagccacccagactatcgcctgggtggggaaaggaatcgtttatgatactggagggctaagtatcaaggggaaaacaacaatgccagggatgaagagagattgtggaggcgcagccgctgtgctgggagcctttagggccgctattaagcagggcttcaaggacaatttgcatgccgtcttttgcttggcagagaattccgttgggcctaatgctactagacctgacgatatccacctcctctactccggaaagaccgtggaaattaataacacggacgctgaggggcgtctggtgttagccgacggggtatcttacgcttgcaaggatctcggcgctgacataatattggatatggcaacactgacaggagctcaaggcatcgcgactgggaaatatcatgccgctgtgctgaccaactcggcggagtgggaagccgcatgtgtgaaagctgggcgaaaatgtggcgaccttgtgcaccccctcgtctactgtccagaactgcatttttccgagtttacaagtgctgtggcggacatgaagaactctgttgctgaccgagacaactcgccttcgtcttgtgccggactatttatcgcgagccatattggttttgattggccaggggtgtgggtgcatctggacatagcggcacccgtacatgctggagagcgtgccacaggctttggggtagctttgctcctagcactgtttgggcgagcctccgaggacccgctgctgaacctcgtatcccccctgggttgtgaggtggacgtggaggagggggatcttggaagagatagcaagaggaggagactcgtttag

SEQ ID NO: 81833 - DNA, 1780 bp, Artificial Sequence
  derived and/or modified sequence
cttgcttccacttcaggcctgcctgaggcacttccactggtctccagttacttgcaaggtcaagtacaacctgcaaggctggttatgaagaagaaactcaaaataacaggagtggcttatggaactacatggagctctggcaggctgccctgagcacgctcaaccccaaccccacggacagctgtcccctctacctgaactacgccaccgtggctgccctgccctgcagggtgagccggcacaacagcccctcggccgcccacttcatcacgcggctggtgcggacctgcctgccgcccggagcgcatcgctgcattgtgatggtctgcgagcagccggaggtctttgcttccgcctgtgccctggcccgggccttcccgctgttcacccaccgctcaggtgcctctcggcgcttggagaagaagacggtcaccgtggagtttttcctggtgggacaagacaacgggccggtggaggtgtccacattgcagtgcttagcgaatgccacagacggcgtgcggctagcagcccgcatcgtggacacaccctgcaatgagatgaacaccgacaccttcctcgaggagattaacaaagttggaaaggagctggggatcatcccaaccatcatccgggatgaggaactgaagacgagaggatttggaggaatctatggggttggcaaagccgccctgcatcccccagccctggccgtcctcagccacaccccagatggagccacgcagaccatcgcctgggtgggcaaaggcatcgtctatgacactggaggcctcagcatcaaagggaagactaccatgccggggatgaagcgagactgcgggggtgctgcggccgtcctgggggccttcagagccgcaatcaagcagggtttcaaagacaacctccacgctgtgttctgcttggctgagaactcggtggggcccaatgcgacaaggccagatgacatccacctgctgtactcagggaagacggtggaaatcaacaacacggatgccgagggcaggctggtgctggcagatggcgtgtcctatgcttgcaaggacctgggggccgacatcatcctggacatggccaccctgaccggggctcagggcattgccacagggaagtaccacgccgcggtgctcaccaacagcgctgagtgggaggccgcctgtgtgaaggcgggcaggaagtgtggggacctggtgcacccgctggtctactgccccgagctgcacttcagcgagttcacctcagctgtggcggacatgaagaactcagtggcggaccgagacaacagccccagctcctgtgctggcctcttcatcgcctcacacatcggcttcgactggcccggagtctgggtccacctggacattgctgcaccggtgcatgctggtgagcgagccacaggcttcggtgtggccctcctgctggcgctcttcggccgtgcctctgaggaccctctgctgaacctggtgtccccactgggctgtgaggtggatgtcgaggagggggacctggggagggactccaagagacgcaggcttgtgtgagcctcctgcctcggccctgacaaacggggatcttttacctcactttgcactgattaattttaagcaattgaaagattgcccttcatatgggttttggtttgtctttctggtcgtcagcgtggtggtggaaacagctgaagttttaggagacagcttagggtttggtgcgggccacggggaggggaccgggaagcgctggggcttgtttctgtttgttacttaca

SEQ ID NO: 81834 - protein, 421 aa, Artificial Sequence
  derived and/or modified sequence
MSALRRSGYGPSDGPSYGRYYGPGGGDVPVHPPPPLYPLRPEPPQPPISWRVRGGGPAETTWLGEGGGGDGYYPSGGAWPEPGRAGGSHQSLNSYTNGAYGPTYPPGPGANTASYSGAYYAPGYTQTSYSTEVPSTYRSSGNSPTPVSRWIYPQQDCQTEAPPLRGQVPGYPPSQNPGMTLPHYPYGDGNRSVPQSGPTVRPQEDAWASPGAYGMGGRYPWPSSAPSAPPGNLYMTESTSPWPSSGSPQSPPSPPVQQPKDSSYPYSQSDQSMNRHNFPCSVHQYESSGTVNNDDSDLLDSQVQYSAEPQLYGNATSDHPNNQDQSSSLPEECVPSDESTPPSIKKIIHVLEKVQYLEQEVEEFVGKKTDKAYWLLEEMLTKELLELDSVETGGQDSVRQARKEAVCKIQAILEKLEKKGL

SEQ ID NO: 81835 - DNA, 1266 bp, Artificial Sequence
  derived and/or modified sequence
atgagcgccctgagaagaagcggctacggccccagcgacggccccagctacggcagatactacggccccggcggcggcgacgtgcccgtgcacccccccccccccctgtaccccctgagacccgagcccccccagccccccatcagctggagagtgagaggcggcggccccgccgagaccacctggctgggcgagggcggcggcggcgacggctactaccccagcggcggcgcctggcccgagcccggcagagccggcggcagccaccagagcctgaacagctacaccaacggcgcctacggccccacctacccccccggccccggcgccaacaccgccagctacagcggcgcctactacgcccccggctacacccagaccagctacagcaccgaggtgcccagcacctacagaagcagcggcaacagccccacccccgtgagcagatggatctacccccagcaggactgccagaccgaggccccccccctgagaggccaggtgcccggctacccccccagccagaaccccggcatgaccctgccccactacccctacggcgacggcaacagaagcgtgccccagagcggccccaccgtgagaccccaggaggacgcctgggccagccccggcgcctacggcatgggcggcagatacccctggcccagcagcgcccccagcgccccccccggcaacctgtacatgaccgagagcaccagcccctggcccagcagcggcagcccccagagcccccccagcccccccgtgcagcagcccaaggacagcagctacccctacagccagagcgaccagagcatgaacagacacaacttcccctgcagcgtgcaccagtacgagagcagcggcaccgtgaacaacgacgacagcgacctgctggacagccaggtgcagtacagcgccgagccccagctgtacggcaacgccaccagcgaccaccccaacaaccaggaccagagcagcagcctgcccgaggagtgcgtgcccagcgacgagagcaccccccccagcatcaagaagatcatccacgtgctggagaaggtgcagtacctggagcaggaggtggaggagttcgtgggcaagaagaccgacaaggcctactggctgctggaggagatgctgaccaaggagctgctggagctggacagcgtggagaccggcggccaggacagcgtgagacaggccagaaaggaggccgtgtgcaagatccaggccatcctggagaagctggagaagaagggcctgtag

SEQ ID NO: 81836 - DNA, 1266 bp, Artificial Sequence
  derived and/or modified sequence
atgtccgctctgcggaggagtggatacggcccgtcagatgggcctagctatggacgttactacggaccaggcggcggtgatgtacccgttcaccccccccctcctctctaccctctgagacccgagccacctcagccccctatcagctggcgagtacgaggaggggggcctgccgaaaccacatggcttggagaaggcggtggtggggacggatactaccccagtggcggcgcttggcctgaaccaggcagggcaggagggagccaccagtccttgaattcctatacaaacggcgcgtacgggcctacctaccctccaggtcctggtgcaaacacagcttcctacagcggggcctattacgcacccggctacacacaaacctcctactcgaccgaagtgccttcgacctacagaagcagtggcaacagtcccacccccgtctctagatggatatacccccagcaagactgtcagactgaagcaccgcccttaagggggcaagtgccaggatatcctccctcgcaaaatccaggcatgaccctgccacactatccatatggtgacggaaaccgctctgtgcctcagagcgggccaaccgttcggcctcaggaggacgcatgggcctcacccggggcctacggcatggggggaaggtatccttggccaagctcagcaccttccgcccctcctgggaatctgtacatgacggaaagtactagtccctggcctagttcaggttcaccacagtcacctccgtcgcccccggttcaacagcctaaggattctagctacccttacagtcagagcgaccagtcaatgaatcggcataatttcccatgcagtgtccaccaatacgaaagctctggcaccgtgaataatgatgactctgacctcctggattctcaagtccagtattcagccgaaccacagctgtacggtaatgccacctctgaccaccccaataaccaggatcagagtagcagccttcctgaagagtgcgtgccaagtgatgaatcgaccccaccaagcatcaagaaaatcattcacgtgctggagaaagtgcagtatttagagcaggaggtggaagagtttgtcggaaaaaagactgacaaggcctactggttattggaagagatgctgaccaaggagctgctggagttggatagtgttgaaacaggcggtcaggattctgtccggcaggctaggaaagaagccgtctgtaagattcaggcgatcctggagaagctggagaagaaaggactgtag

SEQ ID NO: 81837 - DNA, 1266 bp, Artificial Sequence
  derived and/or modified sequence
atgtctgccctgcggcgcagcggctacggccccagtgatggccccagctatggccgctactacggccctggaggaggagatgtgcctgtgcaccccccaccacccctgtaccccctgcggcctgagcccccccagccccccatctcctggagggtgcggggcggcggccctgctgagaccacctggctgggggagggcggcggcggagatggctactaccccagcggcggggcctggccagagcccggccgggccggcggcagccaccagagcctgaacagctacaccaatggagcctacggccccacctacccacctggccctggggccaacacagccagctacagcggggcctactatgcccctggctacacccagaccagctacagcacagaggtgcccagcacctaccgcagcagcggcaacagccccacccctgtgagccgctggatctacccccagcaggactgccagacagaggccccacccctgcggggccaggtgcccggctacccacccagccagaaccctggcatgaccctgccccactacccctatggagatggcaacagatctgtgccccagagcggccccaccgtgcggccccaggaggatgcctgggccagccctggggcctacggcatgggcggccgctacccctggcccagcagcgcccccagcgcccctcctggcaacctgtacatgacagagagcaccagcccctggcccagcagcggcagcccccagagcccccccagcccccctgtgcagcagcccaaggacagcagctacccctacagccagagcgaccagagcatgaacagacacaacttcccctgcagcgtgcaccagtatgagagcagcggcaccgtgaacaatgatgacagcgacctgctggacagccaggtgcagtacagcgctgagccccagctgtatggaaatgccaccagtgaccaccccaacaaccaggaccagagcagcagcctgcctgaggagtgtgtgcccagtgatgagagcaccccacccagcatcaagaagatcatccacgtgctggagaaggtgcagtacctggagcaggaggtggaggagtttgtgggcaagaagacagacaaggcctactggctgctggaggagatgctgaccaaggagctgctggagctggacagcgtggagaccggcggccaggacagcgtgcggcaggccaggaaggaggccgtgtgcaagatccaggccatcctggagaagctggagaagaagggcctgtag

SEQ ID NO: 81838 - DNA, 1266 bp, Artificial Sequence
  derived and/or modified sequence
atgagcgccctgcggcggagcggctacggccccagcgacggcccctcatacggtcggtactatggacccgggggaggcgatgtgccggtccatcctccaccacccctgtatcctctgagacctgagccaccacagcccccaatctcttggcgcgtgaggggaggcggtcccgctgagacaacatggctcggagagggggggggcggtgatggctactatccaagcggcggggcctggcccgagccgggtagagctgggggatctcatcagagcctgaacagttacaccaatggcgcatatggtccgacatatccccctggacctggcgctaacacagccagttactcgggagcttattatgcgcccgggtacacccagacttcctattccacagaagtgccctccacttacagatcatctggaaactcccctacgcctgtgtccagatggatctatccccagcaggattgccaaaccgaagcccccccactgcgggggcaggtacccggataccccccctctcagaaccctggtatgacactaccccattatccgtacggcgatggaaaccggtcagttccacagtccggtcctactgttagacctcaagaggatgcttgggcttctcccggagcttatggcatgggcggaaggtacccctggccctcatccgcgccatccgctccaccaggcaacctgtacatgacagaatcaacatctccctggccctccagtggaagtccgcagagtccaccatctccccctgtgcaacagccaaaagattctagctacccatactctcaaagtgatcagtcaatgaatagacataatttcccttgctcggtccatcagtatgagtcaagcgggactgtgaataatgatgactcagacctactcgattcacaggttcagtatagcgctgagccccagttatatggcaatgccacatctgaccaccccaataatcaggaccagagctcctcattgccagaggagtgtgtcccatccgacgagagtactccgcccagcattaagaagatcatccacgtattggaaaaagtgcaatatttggagcaggaggtcgaggagtttgtcggtaaaaagactgacaaggcctactggttactagaggaaatgcttaccaaagaactgctggaactggattctgttgaaaccggaggccaagactccgttcggcaggcccgtaaggaagcggtgtgtaaaattcaagccatcctggagaagctggagaagaagggactgtag

SEQ ID NO: 81839 - DNA, 1266 bp, Artificial Sequence
  derived and/or modified sequence
atgagcgccctccggcgatcaggctatggcccttccgacggcccttcttatggacgatattacggcccaggaggaggggatgtgcccgtccaccctccgcctcctctgtaccctctcaggcccgagccccctcaacccccaatttcctggcgagttcgtggtggtggccctgccgagacaacctggttgggtgaaggtggaggaggcgacggttattacccatcagggggtgcttggcccgagcccggacgcgcagggggtagtcatcagtccctcaacagttacaccaatggagcatatggaccaacatatcctcccggaccaggcgctaatacagcaagctatagcggtgcctattatgcgcctggatatacccagacaagttacagcactgaagtgccctccacttatcgctcctctgggaattcccctacacccgtgtctcgatggatctacccacagcaggactgtcagaccgaggcccctccactgcgcggacaggtccccggatatcccccatcacagaatccaggcatgactcttccacattatccatacggcgacggcaaccggagcgtaccccagtcagggcctacagtccgcccacaggaagacgcatgggcgtcccctggtgcttacggcatggggggtcgttacccctggccatcaagcgcacctagcgccccacctggtaatttgtacatgaccgaaagcacaagcccatggcccagctcaggctcgcctcagtccccaccttcacctccagtccagcagccgaaggatagttcctatccatattcccagtctgaccaaagtatgaacagacacaacttcccctgtagcgttcaccagtacgaatcaagcggcactgtcaacaatgacgacagcgatctgctggattcccaggtgcagtattcagccgagcctcaactatacgggaacgcgacctccgatcacccaaacaaccaggatcagtcaagcagtctacccgaggaatgcgtaccctctgacgaatcaaccccaccatcaatcaaaaaaatcatccatgtcctcgagaaggttcagtacctcgaacaggaggtggaggaatttgtcggtaagaaaacagataaggcatattggctcctggaggagatgctgactaaagagcttctggaactggattctgtggagactgggggtcaggacagcgtcaggcaggcgagaaaagaagccgtctgtaaaattcaggccatcctggagaaactggagaaaaaaggattgtag

SEQ ID NO: 81840 - DNA, 1943 bp, Artificial Sequence
  derived and/or modified sequence
aggtaagaggaaactccattggataaatggcgaggaaacgtatactccctcttaaggaacacggtgtcttccttcgtctccgggttcccgagaccccagagtcactgacctccgtccctcagctttcggggttcggcagcagaaggggcgggcccgggcctgggattggctggcgtcgtccgacccccttcgctgctctccattcgcaatcgcccgcgggcgcctgcgcgatgggtcggccgtggggagcggggcgggaagcgcttcagggcagcggatcccatgtcggccctgaggcgctcgggctacggccccagtgacggtccgtcctacggccgctactacgggcctgggggtggagatgtgccggtacacccacctccacccttatatcctcttcgccctgaacctccccagcctcccatttcctggcgggtgcgcgggggcggcccggcggagaccacctggctgggagaaggcggaggaggcgatggctactatccctcgggaggcgcctggccagagcctggtcgagccggaggaagccaccagagtttgaattcttatacaaatggagcgtatggtccaacataccccccaggccctggggcaaatactgcctcatactcaggggcttattatgcacctggttatactcagaccagttactccacagaagttccaagtacttaccgttcatctggcaacagcccaactccagtctctcgttggatctatccccagcaggactgtcagactgaagcaccccctcttagggggcaggttccaggatatccgccttcacagaaccctggaatgaccctgccccattatccttatggagatggtaatcgtagtgttccacaatcaggaccgactgtacgaccacaagaagatgcgtgggcttctcctggtgcttatggaatgggtggccgttatccctggccttcatcagcgccctcagcaccacccggcaatctctacatgactgaaagtacttcaccatggcctagcagtggctctccccagtcacccccttcacccccagtccagcagcccaaggattcttcatacccctatagccaatcagatcaaagcatgaaccggcacaactttccttgcagtgtccatcagtacgaatcctcggggacagtgaacaatgatgattcagatcttttggattcccaagtccagtatagtgctgagcctcagctgtatggtaatgccaccagtgaccatcccaacaatcaagatcaaagtagcagtcttcctgaagaatgtgtaccttcagatgaaagtactcctccgagtattaaaaaaatcatacatgtgctggagaaggtccagtatcttgaacaagaagtagaagaatttgtaggaaaaaagacagacaaagcatactggcttctggaagaaatgctaaccaaggaacttttggaactggattcagttgaaactgggggccaggactctgtacggcaggccagaaaagaggctgtttgtaagattcaggccatactggaaaaattagaaaaaaaaggattatgaaaggatttagaacaaagtggaagcctgttactaacttgaccaaagaacacttgatttggttaattaccctctttttgaaatgcctgttgatgacaagaagcaatacattccagctttcctttgattttatacttgaaaaactggcaaaggaatggaagaatattttagtcatgagttgttttcagttttcagacgaatgaatgtaataggaaactatggagttaccaatattgccaagtagactcactccttaaaaaatttatggatatctacaagctgcttcttaccagcaggagggaaacacacttcacacaacaggcttatcagaaacctaccagatgaaactggatataatctgagacaaacaggatgtgtttttttaaacatctggatat

SEQ ID NO: 81841 - protein, 470 aa, Artificial Sequence
  derived and/or modified sequence
MLRAAARFGPRLGRRLLSAAATQAVPAPNQQPEVFCNQIFINNEWHDAVSRKTFPTVNPSTGEVICQVAEGDKALETLDNGKPYVISYLVDLDMVLKCLRYYAGWADKYHGKTIPIDGDFFSYTRHEPVGVCGQIIPWNFPLLMQAWKLGPALATGNVVVMKVAEQTPLTALYVANLIKEAGFPPGVVNIVPGFGPTAGAAIASHEDVDKVAFTGSTEIGRVIQVAAGSSNLKRVTLELGGKSPNIIMSDADMDWAVEQAHFALFFNQGQCCCAGSRTFVQEDIYDEFVERSVARAKSRVVGNPFDSKTEQGPQVDETQFKKILGYINTGKQEGAKLLCGGGIAADRGYFIQPTVFGDVQDGMTIAKEEIFGPVMQILKFKTIEEVVGRANNSTYGLAAAVFTKDLDKANYLSQALQAGTVWVNCYDVFGAQSPFGGYKMSGSGRELGEYGLQAYTEVKTVTVKVPQKNS

SEQ ID NO: 81842 - DNA, 1413 bp, Artificial Sequence
  derived and/or modified sequence
atgctgagagccgcggcccgcttcgggcccaggctgggccgccgcctgctaagtgccgcagccacacaggctgtcccggctcccaaccagcagcctgaagtattctgcaaccagatcttcataaataacgagtggcatgatgcagtttctagaaaaacctttcccactgtcaatccatccactggcgaggttatatgtcaggttgccgagggggacaaagccctggaaaccctggacaatggtaagccctatgtgattagttacctcgttgacctggatatggtgcttaagtgtctacgctattacgccggctgggcagataagtaccacggtaaaacaattcctattgacggcgatttcttttcctatacgcggcacgagcctgtgggggtgtgcggccagatcatcccatggaacttcccactgctgatgcaggcctggaaactgggtccggcactggctacaggaaatgttgtggtaatgaaagttgcggaacagacccccctcaccgcgctctatgtcgccaatctgatcaaggaggctgggtttccccccggggtggtgaacatagtcccgggctttgggcccacggcgggcgctgccatagcgagccacgaagatgtcgacaaggtggcgtttacaggctccaccgagattggaagggtcattcaggtcgccgcagggagctccaacttgaaacgagtgactctcgaattaggcggaaaaagccctaatatcatcatgtcggatgccgacatggactgggcagttgagcaggcgcattttgcgttattcttcaaccagggccagtgttgctgcgccgggtcccggacctttgtacaggaagatatctatgacgagttcgtcgaacgatccgttgccagggccaagtctcgcgttgttggtaacccattcgacagtaaaaccgagcagggtcctcaggtggatgaaacgcagtttaagaagattttgggctacatcaatacaggcaagcaggagggggcaaaattgctgtgtggcggtggaatcgccgctgaccggggttactttatacaacccactgtatttggagacgtccaagatggtatgacaatcgccaaggaagagatcttcggtccggtcatgcagatacttaagtttaagaccatcgaggaggtggtggggcgagcaaacaactccacctacggtctggccgccgccgtcttcaccaaggacctggacaaagcaaactatctgagccaggccctccaggctggcactgtgtgggtcaattgctacgatgttttcggggcccagtccccatttggggggtataaaatgtctggtagtggtcgggaacttggggaatatggactccaggcctacaccgaggtgaagacggtgaccgtcaaggtgccccagaagaattcttag

SEQ ID NO: 81843 - DNA, 1413 bp, Artificial Sequence
  derived and/or modified sequence
atgctgcgggctgctgcccgcttcggcccccggctgggccggcggctgctgtctgctgctgccacccaggccgtgcctgcccccaaccagcagcctgaggtgttctgcaaccagatcttcatcaacaatgagtggcatgatgctgtgtccaggaagaccttccccaccgtgaaccccagcactggagaggtgatctgccaggtggccgagggggacaaggccctggagaccctggacaacgggaagccctacgtgatctcctacctggtggacctggacatggtgctgaagtgcctgcgctactatgccggctgggccgacaagtaccacggcaagaccatccccattgatggagacttcttctcctacaccaggcatgagcctgtgggcgtgtgtggccagatcatcccctggaacttccccctgctgatgcaggcctggaagctgggccctgccctggccactggaaatgtggtggtgatgaaggtggccgagcagacccccctgacagccctgtatgtggccaacctgatcaaggaggccggcttccccccaggagtggtgaacatcgtgcccggcttcggccccacagctggggccgccatcgccagccatgaagatgtggacaaggtggccttcaccggcagcacagaaattggccgggtcatccaggtggccgccggcagcagcaacctgaagagggtgaccctggagctgggcggcaagagccccaacatcatcatgtctgatgctgacatggactgggccgtggagcaggcccactttgccctcttcttcaaccagggccagtgctgctgtgccggcagcaggacctttgtgcaggaggacatctatgatgaatttgtggagaggtctgtggcccgggccaagagccgggtggtgggcaacccctttgacagcaagacagagcagggcccccaggtggatgagacccagttcaagaagatcctgggctacatcaacacaggcaagcaggagggcgccaagctgctgtgtggcggcggcattgctgctgaccggggctacttcatccagcccaccgtgtttggagatgtgcaggacggcatgaccatcgccaaggaggagatctttggacctgtgatgcagatcctgaagttcaagaccatcgaggaggtggtgggccgggccaacaacagcacctacggcctggccgctgctgtgttcaccaaggacctggacaaggccaactacctgagccaggccctgcaggccggcaccgtgtgggtgaactgctatgatgtgtttggagcccagagcccctttggaggctacaagatgagcggcagcggccgggagctgggggagtatggcctgcaggcctacacagaggtgaagacagtgacagtgaaggtgccccagaagaacagctag

SEQ ID NO: 81844 - DNA, 1572 bp, Artificial Sequence
  derived and/or modified sequence
attggctgccgcgcggggcggggagcggggtcggctcagtggccctgagaccctagctctgctctcggtccgctcgctgtccgctagcccgctgcgatgttgcgcgctgccgcccgcttcgggccccgcctgggccgccgcctcttgtcagccgccgccacccaggccgtgcctgcccccaaccagcagcccgaggtcttctgcaaccagattttcataaacaatgaatggcacgatgccgtcagcaggaaaacattccccaccgtcaatccgtccactggagaggtcatctgtcaggtagctgaaggggacaaggccttggagaccctggacaatggcaagccctatgtcatctcctacctggtggatttggacatggtcctcaaatgtctccggtattatgccggctgggctgataagtaccacgggaaaaccatccccattgacggagacttcttcagctacacacgccatgaacctgtgggggtgtgcgggcagatcattccgtggaatttcccgctcctgatgcaagcatggaagctgggcccagccttggcaactggaaacgtggttgtgatgaaggtagctgagcagacacccctcaccgccctctatgtggccaacctgatcaaggaggctggctttccccctggtgtggtcaacattgtgcctggatttggccccacggctggggccgccattgcctcccatgaggatgtggacaaagtggcattcacaggctccactgagattggccgcgtaatccaggttgctgctgggagcagcaacctcaagagagtgaccttggagctgggggggaagagccccaacatcatcatgtcagatgccgatatggattgggccgtggaacaggcccacttcgccctgttcttcaaccagggccagtgctgctgtgccggctcccggaccttcgtgcaggaggacatctatgatgagtttgtggagcggagcgttgcccgggccaagtctcgggtggtcgggaacccctttgatagcaagaccgagcaggggccgcaggtggatgaaactcagtttaagaagatcctcggctacatcaacacggggaagcaagagggggcgaagctgctgtgtggtgggggcattgctgctgaccgtggttacttcatccagcccactgtgtttggagatgtgcaggatggcatgaccatcgccaaggaggagatcttcgggccagtgatgcagatcctgaagttcaagaccatagaggaggttgttgggagagccaacaattccacgtacgggctggccgcagctgtcttcacaaaggatttggacaaggccaattacctgtcccaggccctccaggcgggcactgtgtgggtcaactgctatgatgtgtttggagcccagtcaccctttggtggctacaagatgtcggggagtggccgggagttgggcgagtacgggctgcaggcatacactgaagtgaaaactgtcacagtcaaagtgcctcagaagaactcataagaatcatgcaagcttcctccctcagccattgatggaaagttcagcaagatcagcaacaaaacc

SEQ ID NO: 81845 - DNA, 1413 bp, Artificial Sequence
  derived and/or modified sequence
atgctgcgggccgccgcccggttcggcccccggctgggccggcggctgctcagtgcagccgccacccaggctgtgccagccccgaatcaacagccggaggtattctgcaaccaaatctttatcaataatgagtggcatgatgccgtgtctaggaaaacatttccgacagttaatcccagcaccggcgaggtaatctgccaggtcgcagagggcgacaaggccctcgagacacttgacaatggaaagccttatgttatctcttatcttgtggatctcgacatggtgctcaagtgtttacgttattatgccggctgggcggacaagtaccacgggaaaacaattccaatcgatggggacttcttttcatatacccgtcacgagcctgtgggcgtttgtgggcagattattccctggaatttccctctgttgatgcaggcctggaaactcggtcccgccctggcaaccggcaacgtggtagtaatgaaggtggctgagcaaacacctctcactgcgttgtacgtcgcgaatctgatcaaggaagcgggctttccccccggggtggtaaacattgtacccggctttggacctactgccggtgccgccatcgcaagtcatgaggatgtagacaaagtggcttttactggcagtactgaaatcggccgcgttatccaagtcgccgcgggcagctctaacctgaaaagagtcaccttggaactcgggggcaagagccccaatatcattatgagcgacgctgacatggactgggcagtcgaacaggctcattttgctctgttttttaaccagggccagtgttgctgcgcaggaagcagaacctttgtgcaggaagacatttatgatgagtttgtcgagcgctctgtggcccgggctaagagccgtgtggtcgggaatcccttcgactccaagaccgaacagggccctcaggtcgacgaaactcaattcaaaaagatcctcggatacattaacaccggcaagcaggaaggggctaagcttctatgtggcggaggcattgcagcggatcggggctactttatccaacccacagtgtttggcgacgttcaggacggaatgacaatcgccaaagaggaaattttcggcccggtgatgcagattctgaagtttaaaacaatcgaagaagtggtgggaagagcaaacaattctacctacgggttagccgccgcggtgtttacaaaggatctcgacaaagctaactatttatctcaggctctccaggctggcacagtctgggtgaattgctacgatgttttcggggctcagtctccatttggaggctataagatgagtgggtccgggagagaactgggagaatatgggctgcaggcctatacagaagtgaaaaccgtgacggtcaaggtcccacagaagaattcctag

SEQ ID NO: 81846 - DNA, 1413 bp, Artificial Sequence
  derived and/or modified sequence
atgctgagggccgcagcgaggtttggcccacgcctggggagacggctcctgtcggccgctgccactcaggctgtacccgctcctaaccagcaacctgaggtcttctgcaatcagatttttattaacaatgagtggcatgatgcggtgagtcgtaagactttcccaactgtgaatccgtctacaggcgaggtgatctgccaggtcgcagaaggcgacaaggcactcgagactctcgacaatgggaaaccttacgttatttcgtacctggtggatcttgatatggtgctgaagtgccttcgatactacgcgggatgggctgataagtaccacggcaaaaccattcccattgacggagactttttcagctacaccaggcacgaacccgttggcgtgtgcgggcaaattatcccctggaattttccactgctgatgcaggcctggaagctcggaccggctttagccaccggaaatgtggtggtgatgaaagtggctgaacaaactccccttacagccttatacgtcgcaaacctgatcaaggaagccggatttccacccggtgtcgtcaacattgtgcctggctttggaccgactgcaggtgcggcaatcgcatcgcacgaagacgttgataaggtcgctttcacgggttcaactgagattggcagagtgatccaagttgccgctgggtcgtcaaacctgaagcgcgtcactttagaacttgggggaaagagcccaaacattattatgtccgacgctgatatggactgggctgttgagcaagcccacttcgccctgtttttcaatcagggccagtgctgttgcgcgggttctcggacattcgtgcaggaagatatctatgacgagttcgtagagagatcagtggcccgtgcgaagagcagggttgtaggaaatccctttgattcaaaaactgaacagggcccacaggtcgacgaaacccagttcaagaagatcctgggctacataaatacaggtaaacaagagggggctaagctcctgtgtgggggtggcattgccgcagacagggggtactttatccagcccacagtattcggtgatgtccaggatggtatgacaatcgccaaggaggaaattttcggacctgtgatgcagatcctgaaatttaagacaatcgaagaagtggttggacgagcaaacaactctacgtatgggttggccgcagccgttttcactaaggacctggataaagctaactatctctcgcaggcccttcaggctggcacagtctgggtgaactgctatgacgttttcggagctcagtcccctttcggcggttacaaaatgtccgggagcggaagggaactgggcgaatatgggcttcaggcatataccgaggtgaagacagtaaccgtgaaagtccctcaaaagaatagctag

SEQ ID NO: 81847 - DNA, 1413 bp, Artificial Sequence
  derived and/or modified sequence
atgctgagagccgccgccagattcggccccagactgggcagaagactgctgagcgccgccgccacccaggccgtgcccgcccccaaccagcagcccgaggtgttctgcaaccagatcttcatcaacaacgagtggcacgacgccgtgagcagaaagaccttccccaccgtgaaccccagcaccggcgaggtgatctgccaggtggccgagggcgacaaggccctggagaccctggacaacggcaagccctacgtgatcagctacctggtggacctggacatggtgctgaagtgcctgagatactacgccggctgggccgacaagtaccacggcaagaccatccccatcgacggcgacttcttcagctacaccagacacgagcccgtgggcgtgtgcggccagatcatcccctggaacttccccctgctgatgcaggcctggaagctgggccccgccctggccaccggcaacgtggtggtgatgaaggtggccgagcagacccccctgaccgccctgtacgtggccaacctgatcaaggaggccggcttcccccccggcgtggtgaacatcgtgcccggcttcggccccaccgccggcgccgccatcgccagccacgaggacgtggacaaggtggccttcaccggcagcaccgagatcggcagagtgatccaggtggccgccggcagcagcaacctgaagagagtgaccctggagctgggcggcaagagccccaacatcatcatgagcgacgccgacatggactgggccgtggagcaggcccacttcgccctgttcttcaaccagggccagtgctgctgcgccggcagcagaaccttcgtgcaggaggacatctacgacgagttcgtggagagaagcgtggccagagccaagagcagagtggtgggcaaccccttcgacagcaagaccgagcagggcccccaggtggacgagacccagttcaagaagatcctgggctacatcaacaccggcaagcaggagggcgccaagctgctgtgcggcggcggcatcgccgccgacagaggctacttcatccagcccaccgtgttcggcgacgtgcaggacggcatgaccatcgccaaggaggagatcttcggccccgtgatgcagatcctgaagttcaagaccatcgaggaggtggtgggcagagccaacaacagcacctacggcctggccgccgccgtgttcaccaaggacctggacaaggccaactacctgagccaggccctgcaggccggcaccgtgtgggtgaactgctacgacgtgttcggcgcccagagccccttcggcggctacaagatgagcggcagcggcagagagctgggcgagtacggcctgcaggcctacaccgaggtgaagaccgtgaccgtgaaggtgccccagaagaacagctag

SEQ ID NO: 81848 - protein, 186 aa, Artificial Sequence
  derived and/or modified sequence
MSAAPLVGYSSSGSEDESEDGMRTRPGDGSHRRGQSPLPRQRFPVPDSVLNMFPGTEEGPEDDSTKHGGRVRTFPHERGNWATHVYVPYEAKEEFLDLLDVLLPHAQTYVPRLVRMKVFHLSLSQSVVLRHHWILPFVQALKARMTSFHSPHPGPHCLIGTKDAPVTQEIPKDLGALRQEPGSQTR

SEQ ID NO: 81849 - DNA, 561 bp, Artificial Sequence
  derived and/or modified sequence
atgtctgcagctcctttagttgggtactcaagtagcggaagtgaggacgaaagcgaagatgggatgcgcacgagacctggcgatggctctcaccggaggggccaaagccctcttcccaggcagagattcccggtaccggatagtgtactgaatatgttccctgggacggaggaagggcctgaggatgatagcacaaagcacggagggcgtgttcggaccttcccccacgagaggggcaattgggctacccatgtgtacgtcccttatgaggccaaagaagagtttttggacctgttggacgtgctcctcccgcacgcccagacgtatgtgcccagactggtccggatgaaggtctttcatctgtctttaagccagtcagtggtcctgagacatcactggatcttgcctttcgttcaggcactcaaggcgcggatgacaagtttccactcaccccaccctgggcctcactgtctgatcgggacaaaggacgcacctgttacccaagagatcccaaaggatctgggtgccctccggcaggaacctggctcccagaccaggtag

SEQ ID NO: 81850 - DNA, 561 bp, Artificial Sequence
  derived and/or modified sequence
atgtctgctgcccccctggtgggctacagcagcagcggctctgaagatgaaagtgaagatggcatgaggaccaggcctggagatggcagccaccggcggggccagagccccctgccccggcagcgcttccctgtgcctgacagcgtgctgaacatgtttcctggaacagaggagggcccagaagatgacagcaccaagcatggaggccgggtgaggaccttcccccatgagcggggcaactgggccacccacgtgtatgtgccctatgaggccaaggaggagttcctggacctgctggatgtgctgctgccccacgcccagacctacgtgccccggctggtgaggatgaaggtgttccacctgagcctgagccagagcgtggtgctgcggcaccactggatcctgccctttgtgcaggccctgaaggccaggatgaccagcttccacagcccccaccctggcccccactgcctgattggcaccaaggatgcccctgtgacccaggagatccccaaggacctgggcgccctgcggcaggagcccggcagccagaccaggtag

SEQ ID NO: 81851 - DNA, 561 bp, Artificial Sequence
  derived and/or modified sequence
atgagcgccgcccccctggtgggctacagcagcagcggcagcgaggacgaatccgaagatggcatgaggaccagacccggagacggttcccacagacggggccagtccccgctccctagacagcgctttccagtccctgactccgttttaaacatgttcccaggtacagaagaagggcctgaggatgacagtaccaaacatggggggcgagtgagaacattcccccacgaaagaggaaactgggctacacacgtctatgtaccgtatgaggcaaaggaagagtttcttgatcttctggacgtcctcctgcctcacgcccaaacctacgtcccccggttggtcaggatgaaggtattccatctttcgctctctcaatcagtagtcttaaggcatcattggattctgcctttcgtgcaagcacttaaggcacgtatgacaagtttccactcccctcaccctggccctcactgcctgatcggcaccaaagatgctcccgttacacaagagatccccaaagaccttggcgcactcagacaggaaccaggctctcagaccagatag

SEQ ID NO: 81852 - DNA, 561 bp, Artificial Sequence
  derived and/or modified sequence
atgtcagctgctccactggtgggctattcatcgtccggtagcgaggatgaaagcgaagatgggatgagaaccagacctggggatgggagccacaggagaggacaaagtcctctcccaagacagcggttcccagtccccgacagcgtgctgaacatgtttcctggcacagaagaagggccagaggacgattctactaagcacgggggtagagtgcggacctttccacacgaacgcggtaattgggctactcacgtttatgtgccctatgaagctaaagaggagttcctggatctgctagacgtgctgctgcctcacgcgcagacttatgtgcccaggctggtgcgcatgaaggtgtttcatctgagtttgtctcagagcgttgtgttgcgacatcattggattctccccttcgtccaggcgctgaaagcgcgaatgacaagcttccattctccccacccagggccacactgcctgataggaaccaaggacgcccctgtgacacaggaaatcccaaaagaccttggtgcccttcgccaagagccaggatcccagacacggtag

SEQ ID NO: 81853 - DNA, 1201 bp, Artificial Sequence
  derived and/or modified sequence
aactccgggtgccggttgaggttgctggtggacctgctctggtggtcttggatgaggccccatgagcgcggcgcccctggtgggctacagcagcagcggctccgaggatgagtccgaggacgggatgcggaccaggccgggggatgggagccaccgtcgtggccagagcccccttcccaggcagagatttccagtacctgacagtgtgctgaacatgttcccgggcaccgaggaggggcctgaagatgacagcacaaaacacgggggacgggtgcgcaccttcccccacgagcgaggcaactgggccacccacgtctatgtaccatatgaagccaaggaggagttcctggatctgcttgatgtgttgctgccccatgcccagacatatgtcccccggctggtaaggatgaaggtgttccacctcagcctgtcccagagtgtggttctgcgccaccactggatcctccccttcgtgcaggctctgaaagcccgtatgacctccttccacagcccccatccaggacctcattgcctcattggaaccaaagatgcccctgtcacccaggaaattccaaaggatttaggagctctgcgtcaggagccaggatcacagaccagataatagaacaaaagatgctcctagcacccctgctgcttaggaaatgacacaggttttaggatctctgtgtcaggaactggaggctgagaccaacacatatgttatcatttcacagtgataggtcaaacaggtcatggtaatggtgggagctacctcactgggggcctatgggggtgaaaggagatcatgggtgccctcagcacaccacttgggtgaagggttagtaccagaccccacttctggttttgtctgccagcctggggctttttttttccccttacctattagattatttcataactcttttcctaccagaaatgcatctcctgctagactggtccagatcaaaaccctgctctttcactgaggctctcccggttggcatatcctgcagaatccctccgtccagagatcagtcggtcctgtggttgtttcacaggtgactcctctgtccagagatcagtcggtcctgtggttgtttcacaggtgacacctccgtccagagatcagttggccctgtggttgtttcacaggtgacccctccatccagagatcagttggtcctgtggttctttacccctg

SEQ ID NO: 81854 - DNA, 561 bp, Artificial Sequence
  derived and/or modified sequence
atgagcgccgcccccctggtgggctacagcagcagcggcagcgaggacgagagcgaggacggcatgagaaccagacccggcgacggcagccacagaagaggccagagccccctgcccagacagagattccccgtgcccgacagcgtgctgaacatgttccccggcaccgaggagggccccgaggacgacagcaccaagcacggcggcagagtgagaaccttcccccacgagagaggcaactgggccacccacgtgtacgtgccctacgaggccaaggaggagttcctggacctgctggacgtgctgctgccccacgcccagacctacgtgcccagactggtgagaatgaaggtgttccacctgagcctgagccagagcgtggtgctgagacaccactggatcctgcccttcgtgcaggccctgaaggccagaatgaccagcttccacagcccccaccccggcccccactgcctgatcggcaccaaggacgcccccgtgacccaggagatccccaaggacctgggcgccctgagacaggagcccggcagccagaccagatag

SEQ ID NO: 81855 - protein, 347 aa, Artificial Sequence
  derived and/or modified sequence
MDEQPRLMHSHAGVGMAGHPGLSQHLQDGAGGTEGEGGRKQDIGDILQQIMTITDQSLDEAQARKHALNCHRMKPALFNVLCEIKEKTVLSIRGAQEEEPTDPQLMRLDNMLLAEGVAGPEKGGGSAAAAAAAAASGGAGSDNSVEHSDYRAKLSQIRQIYHTELEKYEQACNEFTTHVMNLLREQSRTRPISPKEIERMVSIIHRKFSSIQMQLKQSTCEAVMILRSRFLDARRKRRNFNKQATEILNEYFYSHLSNPYPSEEAKEELAKKCGITVSQVSNWFGNKRIRYKKNIGKFQEEANIYAAKTAVTATNVSAHGSQANSPSTPNSAGGYPSPCYQPDRRIQ

SEQ ID NO: 81856 - protein, 339 aa, Artificial Sequence
  derived and/or modified sequence
MDEQPRLMHSHAGVGMAGHPGLSQHLQDGAGGTEGEGGRKQDIGDILQQIMTITDQSLDEAQARKHALNCHRMKPALFNVLCEIKEKTVLSIRGAQEEEPTDPQLMRLDNMLLAEGVAGPEKGGGSAAAAAAAAASGGAGSDNSVEHSDYRAKLSQIRQIYHTELEKYEQACNEFTTHVMNLLREQSRTRPISPKEIERMVSIIHRKFSSIQMQLKQSTCEAVMILRSRFLDARRKRRNFNKQATEILNEYFYSHLSNPYPSEEAKEELAKKCGITVSQVDTLRHVISQTGGYSDGLAASQMYSPQGISANGGWQDATTPSSVTSPTEGPGSVHSDTSN

SEQ ID NO: 81857 - DNA, 513 bp, Artificial Sequence
  derived and/or modified sequence
atggacgagcaaccccgactcatgcatagccacgccggcgtagggatggctgggcatccaggccttagtcagcacctccaggacggcgcaggaggaaccgaaggggagggcggtaggaagcaggacattggtgacatccttcagcagatcatgacaatcactgatcagtctctggacgaagcccaggcccgaaagcacgcactgaattgtcaccgtatgaagcccgctctgttcaatgtactgtgcgagattaaggagaagacagttttgtccatacgcggtgctcaggaggaggagccaacagatcctcaactgatgaggctggacaatatgctcctggccgagggtgtggccggccccgaaaaaggcggtggatccgccgcggcggcagctgctgctgctgcaagtggcggcgcagggtcagataattcggtcgagcactccgactatagagcaaaactgagccagatccgccagatctatcatacagagctggagaagtatgaacagtag

SEQ ID NO: 81858 - DNA, 1044 bp, Artificial Sequence
  derived and/or modified sequence
atggacgaacagccccggctgatgcattcccacgccggggtgggaatggccgggcatccaggactcagccagcatctgcaggacggggctggtggaaccgaaggggagggaggcagaaagcaagatataggcgacattctgcagcagattatgaccattaccgatcagagcctggacgaagcccaagcaagaaagcacgccctcaactgtcataggatgaaaccagcactattcaatgtgctgtgtgagatcaaggagaagaccgttctttcaattcgcggggcgcaggaagaggagcccacggatccacagctgatgagacttgacaacatgttactcgccgagggagtggccggccctgagaagggtggaggatctgcagccgccgcagccgctgcagccgcttccggtggcgccggaagcgacaattcagtggagcattcggattaccgcgccaaattaagtcaaattcgccagatctaccatacagagctggagaaatacgagcaggcttgcaatgagttcaccacacacgtgatgaacctcctaagagaacagagccggacccggcccatttccccgaaggagatcgagagaatggtgtcaatcattcatcggaaatttagctctatccaaatgcagctgaagcaatccacatgcgaagcggtgatgatcctgcgctcaaggttcctcgatgcacgacgcaaaaggcggaattttaacaagcaggccaccgaaatactgaatgagtacttctacagccatctttcaaacccctacccctcagaggaggctaaagaggagctggctaaaaaatgcggaattaccgtcagccaagtgagcaattggttcggaaataagcgcatccgatataagaaaaacataggcaagttccaggaggaggccaacatttacgccgctaagaccgctgtcaccgcaactaatgtgtctgcccacggtagtcaggccaacagcccatccacaccgaactccgcagggggctatccaagtccttgttatcagccagatcgtaggatccagtag

SEQ ID NO: 81859 - DNA, 1044 bp, Artificial Sequence
  derived and/or modified sequence
atggatgaacagccccgacttatgcattcccacgcaggcgtcgggatggcgggacaccccgggctatctcagcatctacaggatggtgccggtggtacagagggcgaaggaggccgcaaacaggacattggagatatcctgcagcagatcatgactattacagaccagtccctggacgaggcccaggccagaaagcacgcactcaattgccacaggatgaaacctgcactcttcaatgtcctgtgcgagatcaaggagaaaaccgtcctaagtattcgcggcgcccaggaggaggaaccaaccgacccacaattgatgaggctggataacatgctcctggccgagggagttgcaggcccagaaaaggggggcggcagcgcggcagctgcagccgctgccgctgctagtggtggtgccggcagcgacaattccgtggagcattccgattaccgggctaaactatcccagattagacagatataccacaccgagctggagaagtacgaacaggcttgtaatgaattcactacccacgttatgaaccttctgagagagcagtcccgcacaaggccgatctcccccaaagagattgagagaatggtctcaatcatccacaggaaattttcctctatacagatgcagctgaagcagagcacttgcgaggctgtcatgatcttgcgctccaggtttctggacgcacgccggaagcggagaaattttaacaagcaggccactgagattctgaatgagtatttttactcgcacctttccaacccttacccctcagaagaagctaaggaagagctagcaaagaaatgtggcatcaccgtatcacaggtgtccaactggttcggaaacaagcgtattagatacaagaaaaatatagggaaattccaggaagaagccaacatctacgctgctaaaaccgcggtcaccgccacaaatgtgagcgcccacggatcacaggccaatagtcctagcaccccaaattctgccggtggatatccttccccttgctaccagcccgatagaaggattcaatag

SEQ ID NO: 81860 - DNA, 1020 bp, Artificial Sequence
  derived and/or modified sequence
atggacgaacagccccgacttatgcacagccacgcaggcgtaggaatggccggacaccccggtctgagccagcacttacaggatggagccggagggacagagggcgaaggcgggcgcaagcaagacattggggatatcctacaacagataatgacaattactgaccaatctttagatgaagcgcaggctcgtaaacacgcacttaactgccaccggatgaagccggctctatttaacgtgctatgcgagattaaagaaaagacagtcctgtctatcagaggagcacaagaagaagaaccaaccgatccccagttgatgcgcctggataatatgcttctggcggaaggcgtcgccggcccggaaaaggggggagggagtgcagccgctgctgcagccgctgccgcctccggaggtgccggctccgataactccgtcgaacactctgactaccgggccaagctgagtcagattcgacaaatataccacaccgaattagaaaagtacgaacaggcttgcaacgaattcacaacccacgttatgaacttactgcgcgagcagagtagaacacgccccatatcaccaaaggagatcgagcgtatggttagtatcattcaccgtaagttttcctctatccaaatgcagcttaagcagagcacctgcgaagccgtgatgatcctgcgctctcgattcctcgatgcaagaagaaagaggaggaacttcaataaacaagccaccgagatcctgaacgagtatttttattcacatctctccaatccataccccagcgaagaggccaaggaagaactagccaaaaagtgtgggattacggtctcacaggttgatacccttaggcatgttatatcacaaactggagggtactcggatgggctagcggcatcccagatgtattccccccaggggatctccgctaacggtggctggcaggacgccacaaccccttcttcagtcaccagcccgacagaggggccaggatctgtccacagcgacactagcaattag

SEQ ID NO: 81861 - DNA, 513 bp, Artificial Sequence
  derived and/or modified sequence
atggatgagcagccccggctgatgcacagccacgccggcgtgggcatggccggccaccctggcctgagccagcacctgcaggatggagctgggggcacagaaggagagggcggcaggaagcaggacattggagacatcctgcagcagatcatgaccatcacagaccagagcctggatgaggcccaggccaggaagcacgccctgaactgccacaggatgaagccagccctcttcaacgtgctgtgtgagatcaaggagaagacagtgctgagcatccggggggcccaggaggaggagcccacagacccccagctgatgaggctggacaacatgctgctggccgagggcgtggccggccctgagaagggcggcggcagcgctgctgctgctgctgctgctgctgccagcggcggggccggcagtgacaacagcgtggagcacagcgactaccgggccaagctgagccagatccggcagatctaccacacagagctggagaagtatgagcagtag

SEQ ID NO: 81862 - DNA, 1044 bp, Artificial Sequence
  derived and/or modified sequence
atggatgagcagccccggctgatgcacagccacgccggcgtgggcatggccggccaccctggcctgagccagcacctgcaggatggagctgggggcacagaaggagagggcggcaggaagcaggacattggagacatcctgcagcagatcatgaccatcacagaccagagcctggatgaggcccaggccaggaagcacgccctgaactgccacaggatgaagccagccctcttcaacgtgctgtgtgagatcaaggagaagacagtgctgagcatccggggggcccaggaggaggagcccacagacccccagctgatgaggctggacaacatgctgctggccgagggcgtggccggccctgagaagggcggcggcagcgctgctgctgctgctgctgctgctgccagcggcggggccggcagtgacaacagcgtggagcacagcgactaccgggccaagctgagccagatccggcagatctaccacacagagctggagaagtatgagcaggcctgcaatgagttcaccacccacgtgatgaacctgctgcgggagcagagcaggacccggcccatcagccccaaggagattgaaagaatggtgtccatcatccacaggaagttcagcagcatccagatgcagctgaagcagagcacctgtgaggccgtgatgatcctgcggagccgcttcctggatgcccggaggaagagaagaaacttcaacaagcaggccacagagatcctgaatgagtacttctacagccacctgagcaacccctaccccagcgaggaggccaaggaggagctggccaagaagtgtggcatcaccgtgtcccaggtgagcaactggtttggaaacaagaggatccgctacaagaagaacatcggcaagttccaggaggaggccaacatctatgctgccaagacagctgtgacagccaccaacgtgtctgcccacggcagccaggccaacagccccagcacccccaacagcgctgggggctaccccagcccctgctaccagcctgaccggcgcatccagtag

SEQ ID NO: 81863 - DNA, 1020 bp, Artificial Sequence
  derived and/or modified sequence
atggatgagcagccccggctgatgcacagccacgccggcgtgggcatggccggccaccctggcctgagccagcacctgcaggatggagctgggggcacagaaggagagggcggcaggaagcaggacattggagacatcctgcagcagatcatgaccatcacagaccagagcctggatgaggcccaggccaggaagcacgccctgaactgccacaggatgaagccagccctcttcaacgtgctgtgtgagatcaaggagaagacagtgctgagcatccggggggcccaggaggaggagcccacagacccccagctgatgaggctggacaacatgctgctggccgagggcgtggccggccctgagaagggcggcggcagcgctgctgctgctgctgctgctgctgccagcggcggggccggcagtgacaacagcgtggagcacagcgactaccgggccaagctgagccagatccggcagatctaccacacagagctggagaagtatgagcaggcctgcaatgagttcaccacccacgtgatgaacctgctgcgggagcagagcaggacccggcccatcagccccaaggagattgaaagaatggtgtccatcatccacaggaagttcagcagcatccagatgcagctgaagcagagcacctgtgaggccgtgatgatcctgcggagccgcttcctggatgcccggaggaagagaagaaacttcaacaagcaggccacagagatcctgaatgagtacttctacagccacctgagcaacccctaccccagcgaggaggccaaggaggagctggccaagaagtgtggcatcaccgtgtcccaggtggacaccctgcggcacgtgatcagccagacaggaggctacagtgatggcctggccgccagccagatgtacagcccccagggcatcagcgccaatggaggctggcaggatgccaccacccccagctctgtgaccagccccacagagggccctggctctgtgcacagcgacaccagcaactag

SEQ ID NO: 81864 - DNA, 513 bp, Artificial Sequence
  derived and/or modified sequence
atggacgagcagccccggctgatgcacagccacgccggcgtgggcatggccggacaccctggcctcagccagcacctccaggacggcgccggaggtaccgagggcgagggtggccggaagcaggatataggcgacatactgcagcagattatgactataactgaccagagcctcgatgaggcccaggcacgcaagcatgccctgaattgtcatcggatgaagcccgctctcttcaacgtcttatgcgagatcaaggagaaaactgttttatctatcaggggtgcacaagaagaggagccaaccgatccacaactcatgcggctggataatatgctgctggcagaaggtgtagctggcccagagaaaggcgggggcagtgcagccgccgctgcggccgccgcagcctcagggggggcagggagtgataactccgtagagcattcggactatcgagctaagctctcccaaattcggcagatttaccatacggaattagaaaagtatgagcagtag

SEQ ID NO: 81865 - DNA, 1044 bp, Artificial Sequence
  derived and/or modified sequence
atggacgagcagccccggctgatgcacagccacgccggcgtgggcatggctggtcatcctgggctgtctcagcacctgcaggatggcgccggaggaacagaaggcgaaggaggtcggaaacaggatatcggtgacattttgcagcagatcatgacaatcacggaccaaagtctggacgaagcccaggcacgcaaacatgcactcaattgccaccggatgaaaccagccctgttcaatgttctgtgtgaaatcaaagaaaagaccgtgctatctattcgtggggcccaggaggaagagcctaccgatcctcagctgatgagactggacaacatgttactggccgaaggagtcgccgggcccgagaaggggggagggtcagcagctgccgccgcagccgctgccgccagcggaggagcgggatcggataactcagtggagcattccgattacagggctaagctatctcaaattcggcagatctaccacacagagctggaaaaatacgagcaggcttgtaacgaatttaccacccacgttatgaacctgctcagggaacaatcacgtacccgacccatttctcctaaggaaatcgagagaatggtgagtatcatccaccggaagttcagctccatccagatgcagctaaaacaaagtacttgcgaagcggttatgatcctgcgatcccggtttcttgatgcacggcgcaaaagacggaatttcaataagcaggctaccgaaatactcaacgagtacttttattctcacctttcaaatccctatcctagtgaggaagccaaggaagagctagccaagaaatgtgggatcaccgtcagccaggttagcaactggttcggcaacaagaggataaggtacaagaagaatatcggaaaattccaagaggaagcaaatatatacgccgcaaagactgcagtgacagctacaaatgtctccgcccatggaagccaggccaacagtccttctaccccgaactccgcaggagggtatccatctccatgttaccagccggataggcgcattcaatag

SEQ ID NO: 81866 - DNA, 1044 bp, Artificial Sequence
  derived and/or modified sequence
atggacgagcagccccggctgatgcacagccacgccggcgtgggcatggccggacaccctgggctctcccaacatcttcaggatggcgccggtggaacagagggggagggtggaaggaaacaggacattggtgatattctgcagcaaatcatgacaatcacggatcagtccctggacgaagcacaggccagaaaacacgcacttaactgtcaccggatgaaacctgcactgtttaacgtgctgtgtgaaataaaggaaaaaaccgtacttagcatccggggcgcgcaagaggaggaaccgacagacccacagttaatgaggctagacaacatgcttctggccgagggcgtggcaggacccgaaaaaggcgggggctccgccgccgccgctgcagccgcagccgcctctggaggcgcgggcagtgacaattcagtggaacactcagattaccgtgccaagttgtcccagatacgccagatctaccatactgaactggagaaatacgagcaggcgtgcaatgaattcacaacacacgttatgaatttgctacgggaacagtctcggacgagacctattagccccaaagaaatcgagcgaatggtgtccatcatacacagaaagttctccagtattcaaatgcagctgaagcagtccacctgtgaggccgtcatgatccttcgctcaaggtttttggacgcaagacgaaagcgcaggaacttcaataagcaagcgacagagatattgaatgagtatttctattcccacctgagcaacccctacccatctgaagaggccaaggaagagctggcaaaaaagtgtggcattaccgttagccaggtctctaactggtttggaaacaaaaggatccgctataagaagaacatagggaaatttcaggaggaagccaatatctacgctgctaagaccgccgtgaccgcaacaaacgtctctgcacacggctctcaggctaacagtccatccacccccaactcggctggtggatacccctctccctgttaccagccggatcgccggattcagtag

SEQ ID NO: 81867 - DNA, 1020 bp, Artificial Sequence
  derived and/or modified sequence
atggacgagcagccccggctgatgcacagccacgccggcgtgggcatggcgggccatccagggctttcccagcatcttcaggatggagccggaggcaccgaaggcgaggggggccgcaagcaggatatcggagatattctccaacagatcatgaccatcactgatcagtccctggacgaagctcaggctagaaagcatgcactgaactgtcatcggatgaagcctgctttattcaatgtgctatgcgagattaaggagaagactgttctgtccattcgtggggctcaagaagaggagccaactgacccgcagcttatgcggctggacaatatgctcttagcagagggagtggcggggcccgaaaaaggtggaggaagtgctgcggccgctgccgctgcagctgccagtggcggtgcaggatcagacaactcagtagagcattcagactacagagccaaactgtctcaaatccggcaaatctatcacaccgaactagagaagtacgagcaagcctgtaacgagttcactacccacgtgatgaacttgctgcgggagcagtctagaaccaggccaattagtcctaaagagatcgagcgcatggttagcatcatccacagaaaatttagctctatccagatgcaattaaagcagtccacctgcgaagccgtcatgattcttagatcgaggttccttgacgccaggagaaagaggcgaaattttaataagcaagcaacagaaatcctgaacgaatatttttacagccacctgtccaacccgtacccaagcgaggaggctaaggaggagctcgctaaaaaatgcggcatcaccgtcagtcaagtcgatacactgcggcacgtcatatcccaaacaggcggatattcggacggcttggctgcgtcccagatgtattcacctcaagggatctcagccaatggtggctggcaggatgccactacaccctcctctgtgacttccccaacagagggtccagggtcagtccacagcgatacctctaactag

SEQ ID NO: 81868 - DNA, 734 bp, Artificial Sequence
  derived and/or modified sequence
aatgcatatttgcaaaaggattaagccacagatttaagcgccgggagcccatttctgccttgcaaaggagaccggactgaaaaacctaaagccagctctgatttcttttcgccaagtgggaaggatttgaagacaagcttgaaggataaaaagccttggtgcttcccaggagccgagccgaggagcagaagaggaagagccgggggctgccgtagcctttggagatggacgagcagcccaggctgatgcattcccatgctggggtcgggatggccggacaccccggcctgtcccagcacttgcaggatggggccggagggaccgagggggagggcgggaggaagcaggacattggagacattttacagcaaattatgaccatcacagaccagagtttggatgaggcgcaggccagaaaacatgctttaaactgccacagaatgaagcctgccttgtttaatgtgttgtgtgaaatcaaagaaaaaacagttttgagtatccgaggagcccaggaggaggaacccacagacccccagctgatgcggctggacaacatgctgttagcggaaggcgtggcggggcctgagaagggcggagggtcggcggcagcggcggcagcggcggcggcttctggaggggcaggttcagacaactcagtggagcattcagattacagagccaaactctcacagatcagacaaatctaccatacggagctggagaaatacgagcag

SEQ ID NO: 81869 - DNA, 1459 bp, Artificial Sequence
  derived and/or modified sequence
atggacgagcagcccaggctgatgcattcccatgctggggtcgggatggccggacaccccggcctgtcccagcacttgcaggatggggccggagggaccgagggggagggcgggaggaagcaggacattggagacattttacagcaaattatgaccatcacagaccagagtttggatgaggcgcaggccagaaaacatgctttaaactgccacagaatgaagcctgccttgtttaatgtgttgtgtgaaatcaaagaaaaaacagttttgagtatccgaggagcccaggaggaggaacccacagacccccagctgatgcggctggacaacatgctgttagcggaaggcgtggcggggcctgagaagggcggagggtcggcggcagcggcggcagcggcggcggcttctggaggggcaggttcagacaactcagtggagcattcagattacagagccaaactctcacagatcagacaaatctaccatacggagctggagaaatacgagcaggcctgcaacgagttcaccacccacgtgatgaatctcctgcgagagcaaagccggaccaggcccatctccccaaaggagattgagcggatggtcagcatcatccaccgcaagttcagctccatccagatgcagctcaagcagagcacgtgcgaggcggtgatgatcctgcgttcccgatttctggatgcgcggcggaagagacggaatttcaacaagcaagcgacagaaatcctgaatgaatatttctattcccatctcagcaacccttaccccagtgaggaagccaaagaggagttagccaagaagtgtggcatcacagtctcccaggtatcaaactggtttggaaataagcgaatccggtacaagaagaacataggtaaatttcaagaggaagccaatatttatgctgccaaaacagctgtcactgctaccaatgtgtcagcccatggaagccaagctaactcgccctcaactcccaactcggctggtggatacccttcgccatgttatcagccagacaggaggatacagtgatggactcgcagccagtcagatgtacagtccgcagggcatcagtgctaatggaggttggcaggatgctactaccccttcatcagtgacctcccctacagaaggccctggcagtgttcactctgatacctccaactgatctcccagcaatcgcatcccggctgaccctgtgccccagttggggcaggggcaggagggagggtttctctcccaacgctgaagcggtcagactggaggtcgaagcaatcagcaaacacaataagagtctccttctcttctcttctttgggatgctatttcagccaatctggacacttctttatactctcttcccttttttttctgggtagaagccacccttccctgcctccagctgtcagcctggttttcgtcatcttccctgcccctgtgcctctgtc

SEQ ID NO: 81870 - DNA, 1044 bp, Artificial Sequence
  derived and/or modified sequence
atggacgagcagcccaggctgatgcattcccatgctggggtcgggatggccggacaccccggcctgtcccagcacttgcaggatggggccggagggaccgagggggagggcgggaggaagcaggacattggagacattttacagcaaattatgaccatcacagaccagagtttggatgaggcgcaggccagaaaacatgctttaaactgccacagaatgaagcctgccttgtttaatgtgttgtgtgaaatcaaagaaaaaacagttttgagtatccgaggagcccaggaggaggaacccacagacccccagctgatgcggctggacaacatgctgttagcggaaggcgtggcggggcctgagaagggcggagggtcggcggcagcggcggcagcggcggcggcttctggaggggcaggttcagacaactcagtggagcattcagattacagagccaaactctcacagatcagacaaatctaccatacggagctggagaaatacgagcaggcctgcaacgagttcaccacccacgtgatgaatctcctgcgagagcaaagccggaccaggcccatctccccaaaggagattgagcggatggtcagcatcatccaccgcaagttcagctccatccagatgcagctcaagcagagcacgtgcgaggcggtgatgatcctgcgttcccgatttctggatgcgcggcggaagagacggaatttcaacaagcaagcgacagaaatcctgaatgaatatttctattcccatctcagcaacccttaccccagtgaggaagccaaagaggagttagccaagaagtgtggcatcacagtctcccaggtatcaaactggtttggaaataagcgaatccggtacaagaagaacataggtaaatttcaagaggaagccaatatttatgctgccaaaacagctgtcactgctaccaatgtgtcagcccatggaagccaagctaactcgccctcaactcccaactcggctggtggatacccttcgccatgttatcagccagacaggaggatacagtga

SEQ ID NO: 81871 - DNA, 1020 bp, Artificial Sequence
  derived and/or modified sequence
atggacgagcagcccaggctgatgcattcccatgctggggtcgggatggccggacaccccggcctgtcccagcacttgcaggatggggccggagggaccgagggggagggcgggaggaagcaggacattggagacattttacagcaaattatgaccatcacagaccagagtttggatgaggcgcaggccagaaaacatgctttaaactgccacagaatgaagcctgccttgtttaatgtgttgtgtgaaatcaaagaaaaaacagttttgagtatccgaggagcccaggaggaggaacccacagacccccagctgatgcggctggacaacatgctgttagcggaaggcgtggcggggcctgagaagggcggagggtcggcggcagcggcggcagcggcggcggcttctggaggggcaggttcagacaactcagtggagcattcagattacagagccaaactctcacagatcagacaaatctaccatacggagctggagaaatacgagcaggcctgcaacgagttcaccacccacgtgatgaatctcctgcgagagcaaagccggaccaggcccatctccccaaaggagattgagcggatggtcagcatcatccaccgcaagttcagctccatccagatgcagctcaagcagagcacgtgcgaggcggtgatgatcctgcgttcccgatttctggatgcgcggcggaagagacggaatttcaacaagcaagcgacagaaatcctgaatgaatatttctattcccatctcagcaacccttaccccagtgaggaagccaaagaggagttagccaagaagtgtggcatcacagtctcccaggtggatacccttcgccatgttatcagccagacaggaggatacagtgatggactcgcagccagtcagatgtacagtccgcagggcatcagtgctaatggaggttggcaggatgctactaccccttcatcagtgacctcccctacagaaggccctggcagtgttcactctgatacctccaactga

SEQ ID NO: 81872 - DNA, 513 bp, Artificial Sequence
  derived and/or modified sequence
atggacgagcagcctagattgatgcattcacacgcaggagtgggaatggccggacatcctggcctgagccaacatctgcaggacggagccggtggcaccgaaggggaggggggacgtaaacaagacatcggcgatatcctacaacagataatgactataaccgatcagagcctcgatgaggcccaggccagaaagcatgccctgaactgccatcgaatgaaacccgctctgtttaacgtgctgtgtgagatcaaggagaagactgttttgtcgattaggggcgcacaggaagaggaaccaactgaccctcagctcatgcgtctggacaatatgttattggccgagggtgtggctgggccagaaaaggggggtgggagcgccgctgccgctgccgctgccgctgctagcggcggtgctggcagtgacaactcagtggagcactcagattaccgtgcaaagctgtcccagataagacagatataccatacagaactcgagaaatatgaacaatag

SEQ ID NO: 81873 - DNA, 1044 bp, Artificial Sequence
  derived and/or modified sequence
atggatgagcagcccagactcatgcactcccacgctggcgtcggtatggcagggcatcctgggctcagccaacatctgcaggatggcgcagggggtacagaaggcgagggagggcgtaagcaggatatcggggacatactgcagcagatcatgactattaccgatcagagcctggacgaagcccaggcgagaaaacacgcgctgaattgccacaggatgaaaccagcactattcaacgtgttatgtgagatcaaggaaaaaacagtcctgtcaattcggggagcccaggaggaagagcctactgacccccagctgatgaggcttgataatatgctcttggcggaaggcgtagcaggacccgagaaaggcggaggcagtgccgctgccgcagccgcagcggctgcaagcggaggagccggtagcgacaactcggttgagcactcagattaccgggctaagcttagtcagatcaggcagatttaccacaccgagctagaaaaatatgaacaagcttgcaacgaatttactactcatgtgatgaaccttctcagagaacagagtcgaacaaggcccattagtccaaaggagatcgagcggatggtgtccataatccacagaaaattctcttctatacagatgcaactgaaacaatctacatgcgaggcggtgatgattctcagatcacgtttcctggacgcgagaaggaagcgacgaaacttcaataaacaggccaccgagatcctaaatgaatacttctactctcacctgagtaacccatatccatctgaggaagcaaaagaggagcttgccaaaaagtgtgggataacagtatcccaggtgagcaactggtttgggaacaagcgaattcgatacaagaagaatattggtaagttccaggaggaggcaaatatttacgccgcaaaaacagccgtaactgccacgaatgtctcagcgcacgggagtcaagccaactcaccatctacccctaactcagctgggggttaccccagcccatgctatcagccagaccggaggattcaatag

SEQ ID NO: 81874 - DNA, 1044 bp, Artificial Sequence
  derived and/or modified sequence
atggatgaacaaccccgacttatgcattctcatgctggcgtgggcatggccggtcatccgggactgtcccagcatctccaagacggggctgggggaacagagggggagggcggtaggaagcaggacattggggacatcctgcagcaaatcatgaccattactgaccagagtttggacgaagcccaggcccgaaagcacgcactgaattgccatcgcatgaaacccgctctatttaatgtcctctgcgaaataaaagaaaaaaccgtgctttcgataaggggggcacaagaggaggaacctacggatccacagctgatgcgtctggataatatgctactcgccgagggggtagcgggtcccgagaagggcggaggtagcgcggcagctgcagctgccgctgcggctagtggcggagccggttctgacaacagcgtggaacacagcgactatcgggcaaagctgtcgcagatccgtcaaatataccatactgagctggagaagtatgagcaggcttgtaacgagtttaccacccacgtgatgaatctactgagagaacagtcaaggacacgaccaatttcccctaaagagattgagagaatggtgagcataattcatcggaaattttcgagtatacagatgcaacttaaacagagcacatgtgaggccgtaatgatcctccgctctcgcttccttgatgcacgccgaaagaggagaaatttcaataagcaggcaaccgaaatcttaaacgaatatttttattcccaccttagcaacccttaccccagtgaagaagcgaaagaggaactggctaagaagtgcggcatcacagtcagccaggtgtctaattggtttggcaataaaaggatcagatataagaagaatatcggaaaatttcaagaggaagcaaacatctatgcagctaagactgcagtcacagctactaatgtgtcagcacatgggtcgcaggctaactcacccagtacccctaattccgccggtggctacccatcaccttgctatcagcctgatagaaggattcaatag

SEQ ID NO: 81875 - DNA, 1020 bp, Artificial Sequence
  derived and/or modified sequence
atggacgagcagccacgactaatgcattctcacgccggagtagggatggccggacaccccggattatcacagcatcttcaggacggggctgggggtaccgaaggagagggtggtcgaaagcaggacatcggcgacatccttcagcagatcatgacaataactgatcaatctttagacgaagctcaggcgaggaagcacgcacttaattgccaccggatgaaaccagctctttttaatgtgctgtgtgaaatcaaggaaaagacagttctgagtattagaggggctcaggaagaggaaccgacagatccacagctgatgcgcctcgataatatgttgctcgctgaaggggtggctggccctgagaagggcggtgggtccgccgcagccgcagctgctgctgcggcttcaggaggtgccggaagcgataattctgttgaacatagtgattatcgagccaaactcagccagatccgtcagatctatcacaccgagctggagaagtacgaacaggcttgtaatgaatttactactcatgttatgaacttactaagggaacaatcccggaccaggcccatttcaccaaaagagatcgaacggatggtttctatcatccaccgcaagtttagctccatccagatgcagctgaagcagtccacatgtgaagccgttatgatcctgagatctagatttctagatgcgagacggaaaaggcgcaatttcaataaacaggctactgagattcttaatgagtacttctattcccatttgagtaacccttacccttcggaggaggccaaggaagagctggccaaaaaatgtggaattactgtgtcacaagtggatacactccgacatgtgattagccagactggaggttactcagatggactcgcagcctcccagatgtactcccctcagggaatctctgcaaatgggggttggcaggacgcaacaaccccaagcagcgtgacctcgcccacagagggccctggatcagttcacagcgatactagtaactag

SEQ ID NO: 81876 - DNA, 513 bp, Artificial Sequence
  derived and/or modified sequence
atggacgagcagcccagactgatgcacagccacgccggcgtgggcatggccggccaccccggcctgagccagcacctgcaggacggcgccggcggcaccgagggcgagggcggcagaaagcaggacatcggcgacatcctgcagcagatcatgaccatcaccgaccagagcctggacgaggcccaggccagaaagcacgccctgaactgccacagaatgaagcccgccctgttcaacgtgctgtgcgagatcaaggagaagaccgtgctgagcatcagaggcgcccaggaggaggagcccaccgacccccagctgatgagactggacaacatgctgctggccgagggcgtggccggccccgagaagggcggcggcagcgccgccgccgccgccgccgccgccgccagcggcggcgccggcagcgacaacagcgtggagcacagcgactacagagccaagctgagccagatcagacagatctaccacaccgagctggagaagtacgagcagtag

SEQ ID NO: 81877 - DNA, 1044 bp, Artificial Sequence
  derived and/or modified sequence
atggacgagcagcccagactgatgcacagccacgccggcgtgggcatggccggccaccccggcctgagccagcacctgcaggacggcgccggcggcaccgagggcgagggcggcagaaagcaggacatcggcgacatcctgcagcagatcatgaccatcaccgaccagagcctggacgaggcccaggccagaaagcacgccctgaactgccacagaatgaagcccgccctgttcaacgtgctgtgcgagatcaaggagaagaccgtgctgagcatcagaggcgcccaggaggaggagcccaccgacccccagctgatgagactggacaacatgctgctggccgagggcgtggccggccccgagaagggcggcggcagcgccgccgccgccgccgccgccgccgccagcggcggcgccggcagcgacaacagcgtggagcacagcgactacagagccaagctgagccagatcagacagatctaccacaccgagctggagaagtacgagcaggcctgcaacgagttcaccacccacgtgatgaacctgctgagagagcagagcagaaccagacccatcagccccaaggagatcgagagaatggtgagcatcatccacagaaagttcagcagcatccagatgcagctgaagcagagcacctgcgaggccgtgatgatcctgagaagcagattcctggacgccagaagaaagagaagaaacttcaacaagcaggccaccgagatcctgaacgagtacttctacagccacctgagcaacccctaccccagcgaggaggccaaggaggagctggccaagaagtgcggcatcaccgtgagccaggtgagcaactggttcggcaacaagagaatcagatacaagaagaacatcggcaagttccaggaggaggccaacatctacgccgccaagaccgccgtgaccgccaccaacgtgagcgcccacggcagccaggccaacagccccagcacccccaacagcgccggcggctaccccagcccctgctaccagcccgacagaagaatccagtag

SEQ ID NO: 81878 - DNA, 1020 bp, Artificial Sequence
  derived and/or modified sequence
atggacgagcagcccagactgatgcacagccacgccggcgtgggcatggccggccaccccggcctgagccagcacctgcaggacggcgccggcggcaccgagggcgagggcggcagaaagcaggacatcggcgacatcctgcagcagatcatgaccatcaccgaccagagcctggacgaggcccaggccagaaagcacgccctgaactgccacagaatgaagcccgccctgttcaacgtgctgtgcgagatcaaggagaagaccgtgctgagcatcagaggcgcccaggaggaggagcccaccgacccccagctgatgagactggacaacatgctgctggccgagggcgtggccggccccgagaagggcggcggcagcgccgccgccgccgccgccgccgccgccagcggcggcgccggcagcgacaacagcgtggagcacagcgactacagagccaagctgagccagatcagacagatctaccacaccgagctggagaagtacgagcaggcctgcaacgagttcaccacccacgtgatgaacctgctgagagagcagagcagaaccagacccatcagccccaaggagatcgagagaatggtgagcatcatccacagaaagttcagcagcatccagatgcagctgaagcagagcacctgcgaggccgtgatgatcctgagaagcagattcctggacgccagaagaaagagaagaaacttcaacaagcaggccaccgagatcctgaacgagtacttctacagccacctgagcaacccctaccccagcgaggaggccaaggaggagctggccaagaagtgcggcatcaccgtgagccaggtggacaccctgagacacgtgatcagccagaccggcggctacagcgacggcctggccgccagccagatgtacagcccccagggcatcagcgccaacggcggctggcaggacgccaccacccccagcagcgtgaccagccccaccgagggccccggcagcgtgcacagcgacaccagcaactag

SEQ ID NO: 81879 - protein, 420 aa, Artificial Sequence
  derived and/or modified sequence
MDEQPRLMHSHAGVGMAGHPGLSQHLQDGAGGTEGEGGRKQDIGDILQQIMTITDQSLDEAQARKHALNCHRMKPALFNVLCEIKEKTVLSIRGAQEEEPTDPQLMRLDNMLLAEGVAGPEKGGGSAAAAAAAAASGGAGSDNSVEHSDYRAKLSQIRQIYHTELEKYEQACNEFTTHVMNLLREQSRTRPISPKEIERMVSIIHRKFSSIQMQLKQSTCEAVMILRSRFLDARRKRRNFNKQATEILNEYFYSHLSNPYPSEEAKEELAKKCGITVSQVSNWFGNKRIRYKKNIGKFQEEANIYAAKTAVTATNVSAHGSQANSPSTPNSAGSSSSFNMSNSGDLFMSVQSLNGDSYQGAQVGANVQSQVDTLRHVISQTGGYSDGLAASQMYSPQGISHLPRHPRQAHYHFRLPTWHP

SEQ ID NO: 81880 - DNA, 1263 bp, Artificial Sequence
  derived and/or modified sequence
atggacgaacagcccaggcttatgcacagtcacgccggtgtaggcatggctgggcatcccggtctcagccagcacctgcaggacggggcagggggaaccgagggtgagggcggcaggaagcaagacattggagacatcctgcaacagatcatgactatcactgatcaatcgttagacgaggcacaggctcgtaagcacgcattgaactgccaccgtatgaagccggccctgttcaatgttctctgtgagatcaaggagaagactgtactgtctatccggggtgctcaggaggaagagccaactgatccccagctcatgaggctcgataatatgctgctcgcagaaggagtggctggaccagaaaagggtggtgggtctgctgcagcagccgcagccgccgcggccagcggaggtgctgggtcagacaattcagtggagcacagcgactaccgagctaaactgtcccagatcagacaaatatatcatactgagctggagaagtatgagcaagcgtgcaacgagttcacaacccacgtcatgaatctgttgcgggaacagagccggactaggcccatctccccaaaggaaatcgagcggatggtgagcattatccatcgcaaattcagtagcattcagatgcagctgaagcaatctacttgcgaggccgtcatgatcctgagatcgcgcttccttgacgctaggcgcaaaagaaggaatttcaacaagcaagccactgaaattctcaacgaatatttctatagccacctctccaatccgtacccgtctgaagaggccaaggaggaactggccaaaaaatgcgggattaccgttagccaggtgagcaactggtttggtaataagcgaattcggtacaaaaagaacataggcaagttccaggaagaagcaaatatctatgccgcaaaaaccgccgtcacggccaccaatgtgtccgcccatggaagccaggcgaactctccgtctaccccgaattcagccggatcctctagttctttcaatatgtcgaattccggagatctatttatgtccgtgcagagcctgaatggggattcatatcagggcgcccaagttggagctaatgtgcagagccaagtggacacacttcggcacgtcatctctcagaccgggggctactccgacggccttgccgccagccagatgtactcgccacaaggaatatcccaccttccacgccatcccaggcaggcccactatcactttagattgccgacatggcatccgtag

SEQ ID NO: 81881 - DNA, 1263 bp, Artificial Sequence
  derived and/or modified sequence
atggatgagcagccccggctgatgcacagccacgccggcgtgggcatggccggccaccctggcctgagccagcacctgcaggatggagctgggggcacagaaggagagggcggcaggaagcaggacattggagacatcctgcagcagatcatgaccatcacagaccagagcctggatgaggcccaggccaggaagcacgccctgaactgccacaggatgaagccagccctcttcaacgtgctgtgtgagatcaaggagaagacagtgctgagcatccggggggcccaggaggaggagcccacagacccccagctgatgaggctggacaacatgctgctggccgagggcgtggccggccctgagaagggcggcggcagcgctgctgctgctgctgctgctgctgccagcggcggggccggcagtgacaacagcgtggagcacagcgactaccgggccaagctgagccagatccggcagatctaccacacagagctggagaagtatgagcaggcctgcaatgagttcaccacccacgtgatgaacctgctgcgggagcagagcaggacccggcccatcagccccaaggagattgaaagaatggtgtccatcatccacaggaagttcagcagcatccagatgcagctgaagcagagcacctgtgaggccgtgatgatcctgcggagccgcttcctggatgcccggaggaagagaagaaacttcaacaagcaggccacagagatcctgaatgagtacttctacagccacctgagcaacccctaccccagcgaggaggccaaggaggagctggccaagaagtgtggcatcaccgtgtcccaggtgagcaactggtttggaaacaagaggatccgctacaagaagaacatcggcaagttccaggaggaggccaacatctatgctgccaagacagctgtgacagccaccaacgtgtctgcccacggcagccaggccaacagccccagcacccccaacagcgctggcagcagcagcagcttcaacatgagcaacagcggggacctcttcatgtctgtgcagagcctgaatggagacagctaccagggcgcccaggtgggcgccaacgtgcagagccaggtggacaccctgcggcacgtgatcagccagacaggaggctacagtgatggcctggccgccagccagatgtacagcccccagggcatcagccacctgcccaggcacccccggcaggcccactaccacttccggctgcccacctggcacccctag

SEQ ID NO: 81882 - DNA, 1263 bp, Artificial Sequence
  derived and/or modified sequence
atggacgagcagccccggctgatgcacagccacgccggcgtgggcatggcgggacacccgggcctgagtcagcatctgcaggatggggctggcgggaccgaaggggagggagggagaaagcaagatatcggggatattctccagcagataatgactattaccgatcagtccttggacgaagcccaagcaaggaaacacgcgctgaactgccaccgtatgaagcctgccctgttcaatgtcctctgcgaaatcaaagagaagaccgtcctgtccatcagaggcgcccaggaggaggagcccaccgacccgcagctgatgcggctggacaacatgcttcttgctgagggcgtcgccgggcctgagaagggcggggggtcagcagccgcggctgccgccgccgctgccagcggcggcgctggatctgacaactcagtcgagcattccgactacagggcgaagctctcacagattagacagatctaccatactgaactggaaaaatacgagcaggcttgtaacgagttcaccacacatgtcatgaacctactgagggagcagtcgcgaactcggcccattagtccaaaggagatcgaacgcatggtcagcatcattcacagaaagttcagctcgatccaaatgcagctaaaacaatccacttgcgaagccgtgatgattctgcgatctaggttcctcgacgccaggagaaaacgccgcaattttaacaagcaggcgactgaaatcctaaacgaatacttctactcacatctgagcaacccatacccttccgaagaggctaaagaggagctggcaaaaaagtgcggtattactgtcagtcaggtttcaaactggttcggaaataaacggattagatataagaagaatatcggcaagttccaggaggaggcaaacatctatgccgccaaaacggctgttacggcaaccaacgtgtctgctcacggaagccaggcaaacagcccttcaacccccaactctgctgggtcctccagcagttttaacatgagcaacagcggcgacctctttatgagcgtgcagtcactcaatggcgacagctaccagggcgcccaggttggcgccaatgtgcagtctcaggtggataccttacgacatgtgatttcacagacaggaggctacagcgatggcctggccgcttctcagatgtattctcctcaggggataagtcaccttccccgacatcctcgtcaggcccattaccattttagactccctacctggcacccatag

SEQ ID NO: 81883 - DNA, 1263 bp, Artificial Sequence
  derived and/or modified sequence
atggacgagcagcccaggctgatgcattcccatgctggggtcgggatggccggacaccccggcctgtcccagcacttgcaggatggggccggagggaccgagggggagggcgggaggaagcaggacattggagacattttacagcaaattatgaccatcacagaccagagtttggatgaggcgcaggccagaaaacatgctttaaactgccacagaatgaagcctgccttgtttaatgtgttgtgtgaaatcaaagaaaaaacagttttgagtatccgaggagcccaggaggaggaacccacagacccccagctgatgcggctggacaacatgctgttagcggaaggcgtggcggggcctgagaagggcggagggtcggcggcagcggcggcagcggcggcggcttctggaggggcaggttcagacaactcagtggagcattcagattacagagccaaactctcacagatcagacaaatctaccatacggagctggagaaatacgagcaggcctgcaacgagttcaccacccacgtgatgaatctcctgcgagagcaaagccggaccaggcccatctccccaaaggagattgagcggatggtcagcatcatccaccgcaagttcagctccatccagatgcagctcaagcagagcacgtgcgaggcggtgatgatcctgcgttcccgatttctggatgcgcggcggaagagacggaatttcaacaagcaagcgacagaaatcctgaatgaatatttctattcccatctcagcaacccttaccccagtgaggaagccaaagaggagttagccaagaagtgtggcatcacagtctcccaggtatcaaactggtttggaaataagcgaatccggtacaagaagaacataggtaaatttcaagaggaagccaatatttatgctgccaaaacagctgtcactgctaccaatgtgtcagcccatggaagccaagctaactcgccctcaactcccaactcggctggttcttccagttcttttaacatgtcaaactctggagatttgttcatgagcgtgcagtcactcaatggggattcttaccaaggggcccaggttggagccaacgtgcaatcacaggtggatacccttcgccatgttatcagccagacaggaggatacagtgatggactcgcagccagtcagatgtacagtccgcagggcatcagtcacctcccccggcacccccggcaagcccactatcacttccgacttccaacgtggcatccgtga

SEQ ID NO: 81884 - DNA, 1263 bp, Artificial Sequence
  derived and/or modified sequence
atggacgagcaaccgcgactgatgcacagccatgcaggcgttgggatggcgggtcatcctggcctgtctcagcacctgcaggacggtgcagggggaaccgagggtgagggcggtcgcaagcaggacattggcgatatcctccagcagattatgaccatcacggaccaatccctcgatgaggctcaggcacgcaagcacgcactcaactgtcatagaatgaaacccgcactttttaatgtgctgtgtgagatcaaggagaagaccgtgctcagtatccgcggagcacaagaagaggagcctacggacccccagttgatgaggctggataatatgttgcttgctgagggtgtggccggaccagaaaaggggggtggcagcgccgcagctgccgcagcagccgctgcatcgggaggggcaggttccgacaacagcgttgaacatagtgattatcgagctaaactcagccagatccgacagatttaccacacagagctagaaaagtatgaacaagcgtgcaatgagtttaccactcacgttatgaacctgctgcgggaacagtctcgcactagacctatttcccccaaggaaattgaaaggatggtgagcatcattcaccggaagttttcctccattcagatgcaactgaaacagtcgacctgcgaggccgtgatgatactgagatcccgctttctggacgccaggcgaaaaagacggaattttaacaagcaggccactgaaatcctgaacgagtatttctattcgcacctatccaacccatatccaagcgaggaagccaaagaagaactggcaaagaaatgtggcatcacagtctcacaggtgtcaaattggtttggcaacaagaggatcagatacaagaaaaatattggcaagtttcaggaggaagctaacatttatgctgctaaaacagctgttactgctactaatgttagtgcccatggatcccaggcaaattcgcccagtaccccaaattccgccggatcctcgagttctttcaatatgagtaattcgggcgacctttttatgtccgtgcaaagtctgaacggggactcttaccaaggtgcacaagtaggtgcaaatgtgcagagccaggtggatactctgagacacgttatttcgcagaccggcggatatagcgacggcctggcagcgagccagatgtactcaccacagggcatctctcatctgcctagacaccccagacaggcacattatcacttccgcttgcccacatggcatccgtag

SEQ ID NO: 81885 - DNA, 1263 bp, Artificial Sequence
  derived and/or modified sequence
atggacgagcagcccagactgatgcacagccacgccggcgtgggcatggccggccaccccggcctgagccagcacctgcaggacggcgccggcggcaccgagggcgagggcggcagaaagcaggacatcggcgacatcctgcagcagatcatgaccatcaccgaccagagcctggacgaggcccaggccagaaagcacgccctgaactgccacagaatgaagcccgccctgttcaacgtgctgtgcgagatcaaggagaagaccgtgctgagcatcagaggcgcccaggaggaggagcccaccgacccccagctgatgagactggacaacatgctgctggccgagggcgtggccggccccgagaagggcggcggcagcgccgccgccgccgccgccgccgccgccagcggcggcgccggcagcgacaacagcgtggagcacagcgactacagagccaagctgagccagatcagacagatctaccacaccgagctggagaagtacgagcaggcctgcaacgagttcaccacccacgtgatgaacctgctgagagagcagagcagaaccagacccatcagccccaaggagatcgagagaatggtgagcatcatccacagaaagttcagcagcatccagatgcagctgaagcagagcacctgcgaggccgtgatgatcctgagaagcagattcctggacgccagaagaaagagaagaaacttcaacaagcaggccaccgagatcctgaacgagtacttctacagccacctgagcaacccctaccccagcgaggaggccaaggaggagctggccaagaagtgcggcatcaccgtgagccaggtgagcaactggttcggcaacaagagaatcagatacaagaagaacatcggcaagttccaggaggaggccaacatctacgccgccaagaccgccgtgaccgccaccaacgtgagcgcccacggcagccaggccaacagccccagcacccccaacagcgccggcagcagcagcagcttcaacatgagcaacagcggcgacctgttcatgagcgtgcagagcctgaacggcgacagctaccagggcgcccaggtgggcgccaacgtgcagagccaggtggacaccctgagacacgtgatcagccagaccggcggctacagcgacggcctggccgccagccagatgtacagcccccagggcatcagccacctgcccagacaccccagacaggcccactaccacttcagactgcccacctggcacccctag

SEQ ID NO: 81886 - protein, 354 aa, Artificial Sequence
  derived and/or modified sequence
MLFNIHSLEWDKQLCEFFGIPMEILPNVRSSSEIYGLMKISHSVKAGALEGVPISGCLGDQSAALVGQMCFQIGQAKNTYGTGCFLLCNTGHKCVFSDHGLLTTVAYKLGRDKPVYYALEGSVAIAGAVIRWLRDNLGIIKTSEEIEKLAKEVGTSYGCYFVPAFSGLYAPYWEPSARGIICGLTQFTNKCHIAFAALEAVCFQTREILDAMNRDCGIPLSHLQVDGGMTSNKILMQLQADILYIPVVKPSMPETTALGAAMAAGAAEGVGVWSLEPEDLSAVTMERFEPQINAEESEIRYSTWKKAVMKSMGWVTTQSPESGDPSIFCSLPLGFFIVSSMVMLIGARYISGIP

SEQ ID NO: 81887 - protein, 559 aa, Artificial Sequence
  derived and/or modified sequence
MAASKKAVLGPLVGAVDQGTSSTRFLVFNSKTAELLSHHQVEIKQEFPREGWVEQDPKEILHSVYECIEKTCEKLGQLNIDISNIKAIGVSNQRETTVVWDKITGEPLYNAVVWLDLRTQSTVESLSKRIPGNNNFVKSKTGLPLSTYFSAVKLRWLLDNVRKVQKAVEEKRALFGTIDSWLIWSLTGGVNGGVHCTDVTNASRTMLFNIHSLEWDKQLCEFFGIPMEILPNVRSSSEIYGLMTIHNSKKAGALEGVPISGCLGDQSAALVGQMCFQIGQAKNTYGTGCFLLCNTGHKCVFSDHGLLTTVAYKLGRDKPVYYALEGSVAIAGAVIRWLRDNLGIIKTSEEIEKLAKEVGTSYGCYFVPAFSGLYAPYWEPSARGIICGLTQFTNKCHIAFAALEAVCFQTREILDAMNRDCGIPLSHLQVDGGMTSNKILMQLQADILYIPVVKPSMPETTALGAAMAAGAAEGVGVWSLEPEDLSAVTMERFEPQINAEESEIRYSTWKKAVMKSMGWVTTQSPESGDPSIFCSLPLGFFIVSSMVMLIGARYISGIP

SEQ ID NO: 81888 - DNA, 1680 bp, Artificial Sequence
  derived and/or modified sequence
atggctgcctcaaaaaaggccgtactaggacctctggtcggagccgtagaccagggcaccagttccacaaggtttttggtcttcaactctaagactgccgagctgctgagtcaccatcaggtggaaataaagcaggaattccctagggagggttgggtggagcaagatcccaaggaaattttgcatagcgtgtacgaatgtatcgagaaaacatgtgagaaactaggacagctgaatatagacataagtaatatcaaggctatcggagtgagcaatcaacgggaaacaaccgttgtgtgggacaaaattaccggagaaccactttacaacgccgtggtttggctcgatctgcgtactcaatcaacagttgagtcactgagcaaacgtattccgggaaataataactttgtgaagtcaaaaacaggtctgcctttaagcacttacttctccgccgtaaagttgagatggctgctggataacgtccggaaagtgcagaaggcagtggaggagaaaagggccctgtttgggaccattgactcctggttgatttggagcctaaccggcggcgttaatgggggagtgcactgtacggacgtgacaaatgccagtcgaacaatgctattcaacatccacagcctggagtgggataaacaactctgtgagttttttggcattccaatggagatcctccccaacgtgagaagtagcagcgaaatttacggtttaatgactattcataattccaagaaggcaggggcccttgaaggcgtgcccatatctgggtgtctgggcgaccaatcggccgctttagtgggccagatgtgctttcagatcgggcaggccaagaacacctacggtaccggttgcttcctgctgtgcaacactgggcataagtgtgtgttcagtgaccatggcctactcacgactgtggcatataagctagggcgtgacaaacctgtgtactatgcactggaaggcagcgtggctatagcaggcgccgtaatccggtggctgagggataaccttggaatcattaaaacgtcagaggagatcgagaagctcgcaaaagaagttgggacctcatatgggtgctattttgtgccggcttttagcgggctttatgccccatactgggagccctcggccagaggaattatctgtggtctaacacaatttactaataaatgtcatatcgcctttgcagcacttgaagcagtgtgcttccagacaagggagatactggatgctatgaatagggactgtgggattcccctctcccatttacaggtagacgggggaatgacaagcaataagattctgatgcaacttcaggctgacatcctctacatcccagttgtcaagcctagtatgcccgaaactacagcactgggcgcagctatggcagccggcgctgccgaaggagtgggcgtctggagtcttgagcccgaggatctgagcgccgtgactatggaaagattcgaacctcaaatcaacgcggaggagagcgagatcagatattccacatggaagaaggccgtaatgaagtccatgggatgggttacaacccagtcgcccgaaagcggagaccccagcatcttctgttccctccccctgggcttcttcattgtatcttccatggtgatgcttatcggggctcgatatattagcgggattccctag

SEQ ID NO: 81889 - DNA, 3725 bp, Artificial Sequence
  derived and/or modified sequence
gggccggaggggcggggtgagaaggctgcgcgcgggtaaaggggccgcctcgagcgcggtccgagcgttcagcggacgcgcgcggcctcgatctctggactcgtcacctgcccctccccctcccgccgccgtcacccaggaaaccggccgcaatcgccggccgacctgaagctggtttcatggcagcctcaaagaaggcagttttggggccattggtgggggcggtggaccagggcaccagttcgacgcgctttttggttttcaattcaaaaacagctgaactacttagtcatcatcaagtagaaataaaacaagagttcccaagagaaggatgggtggaacaggaccctaaggaaattctacattctgtctatgagtgtatagagaaaacatgtgagaaacttggacagctcaatattgatatttccaacataaaagctattggtgtcagcaaccagagggaaaccactgtagtctgggacaagataactggagagcctctctacaatgctgtggtgtggcttgatctaagaacccagtctaccgttgagagtcttagtaaaagaattccaggaaataataactttgtcaagtccaagacaggccttccacttagcacttacttcagtgcagtgaaacttcgttggctccttgacaatgtgagaaaagttcaaaaggccgttgaagaaaaacgagctctttttgggactattgattcatggcttatttggagtttgacaggaggagtcaatggaggtgtccactgtacagatgtaacaaatgcaagtaggactatgcttttcaacattcattctttggaatgggataaacaactctgcgaattttttggaattccaatggaaattcttccaaatgtccggagttcttctgagatctatggcctaatgactattcataattcaaaaaaagctggggccttggaaggtgtgccaatatctgggtgtttaggggaccagtctgctgcattggtgggacaaatgtgcttccagattggacaagccaaaaatacgtatggaacaggatgtttcttactatgtaatacaggccataagtgtgtattttctgatcatggccttctcaccacagtggcttacaaacttggcagagacaaaccagtatattatgctttggaaggttctgtagctatagctggtgctgttattcgctggctaagagacaatcttggaattataaagacctcagaagaaattgaaaaacttgctaaagaagtaggtacttcttatggctgctacttcgtcccagcattttcggggttatatgcaccttattgggagcccagcgcaagagggataatctgtggactcactcagttcaccaataaatgccatattgcttttgctgcattagaagctgtttgtttccaaactcgagagattttggatgccatgaatcgagactgtggaattccactcagtcatttgcaggtagatggaggaatgaccagcaacaaaattcttatgcagctacaagcagacattctgtatataccagtagtgaagccctcaatgcccgaaaccactgcactgggtgcggctatggcggcaggggctgcagaaggagtcggcgtatggagtctcgaacccgaggatttgtctgccgtcacgatggagcggtttgaacctcagattaatgcggaggaaagtgaaattcgttattctacatggaagaaagctgtgatgaagtcaatgggttgggttacaactcaatctccagaaagtggtgaccctagtatcttctgtagtctgcccttgggcttttttatagtgagtagcatggtaatgttaatcggagcaaggtacatctcaggtattccataaaacctaccaactcatggattcccaagatgtgagctttttacataatgaaagaacccagcaattctgtctcttaatgcaatgacactattcatagactttgattttatttataagccacttgctgcatgaccctccaagtagacctgtggcttaaaataaagaaaatgcagcaaaaagaatgctatagaaatatttggtggttttttttttttttaaacatccacagttaaggttgggccagctacctttggggctgaccccctccattgccataacatcctgctccattccctctaagatgtaggaagaattcggatccttaccattggaatcttccatcgaacatactcaaacacttttggaccaggatttgagtctctgcatgacatatacttgattaaaaggttattactaacctgttaaaaatcagcagctctttgcttttaacagacaccctaaaagtcttcttttctacatagttgaagacagcaacatcttcactgaatgtttgaatagaaacctctactaaattattaaaatagacatttagtgttctcacagcttggatatttttctgaaaagttatttgccaaaactgaaatccttcagatgttttccatggtcccactaattataatgactttctgtctggatcttataggaaaagatactttcttttttcttccatctttcctttttatattttttactttgtatgtataacatacatgcctatatattttatacactgagggtagcccatttataaattaagagcacattatattcagaaggttctaacagggctggtcttaagtgaaccactgtgtatataaatatgttggaaaacagctgtatacatttttgggcaacggttatgcataatatttaccaggagaatttttttcttaacaagccaacatttaaaatttatgttttatgtcaataaaagaaaatatactttattgtgacttcaactatatttcttatcccttacatttttatttaattgtcttagcttaaaaaaagaagaaactgtggaatactacagtaaatattgttttcaaacacaagcaataattcaaatagttatttttcttttgaattaattttagacatattttggatcctattgaggggataagaggatgtcaaaaaagttaaatacctaagtagaaaaaaatatagaaataaagccaagaatctctttcagttcaaatgttatcaattgttaataagaaattgctatctgggatgacagaattacctctgcttagtatctcattataactgaaagaaggtttatcattacaaataccttccaatgaaaccaagaatttctcaaaatatttaatgtcacatattataagaagttacctaatcctgcttcttaacatcaatttttaaaaatatcttaaaattactttgttttgtagtaaacagtgaagaaaagattgcctcctaattatttttttcaatgagtgctgaatgggaaaacatttatatcttactataaaaggttctgttttgtttggaatcaatggtagctttattgactgttctgattgtgctgtttctaatttattgaatctgctaggttttattgatgcagccaccacttaagtgacataaatattatagaaaggtactgtgaaatgatcactttgtggcaggggtacttttaaacataaatgtttctacaaaagtaggttgagttcattgtaaataattgtgaaagccactgttcaaataattttaagattacattaatttttctataaattggaagatttataaatgtttgaaattgtacacattgatatttaatgacaaatttacttaaaataaattgaccccttgttctta

SEQ ID NO: 81890 - DNA, 1680 bp, Artificial Sequence
  derived and/or modified sequence
atggccgccagcaagaaggctgtgctgggccccctggtgggcgctgtggaccagggcaccagcagcacccgcttcctggtgttcaacagcaagacagctgagctgctgagccaccaccaggtggagatcaagcaggagttcccccgggagggctgggtggagcaggaccccaaggagatcctgcacagcgtgtatgagtgcatcgagaagacctgtgagaagctgggccagctgaacatcgacatcagcaacatcaaggccatcggcgtgagcaaccagcgggagaccaccgtggtgtgggacaagatcaccggggagcccctgtacaatgctgtggtgtggctggacctgcggacccagagcacagtggagagcctgagcaagagaattcctggcaacaacaactttgtgaagagcaagacaggcctgcccctgagcacctacttctctgctgtgaagctgcgctggctgctggacaacgtgaggaaggtgcagaaggctgtggaggagaagagggccctgtttggcaccatcgacagctggctgatctggagcctgactggaggagtgaatggaggagtgcactgcacagatgtgaccaatgccagcaggaccatgctgttcaacatccacagcctggagtgggacaagcagctgtgtgagttcttcggcatccccatggagatcctgcccaacgtgcgcagcagcagcgagatctacggcctgatgaccatccacaacagcaagaaggccggggccctggagggcgtgcccatcagcggctgcctgggggaccagagcgctgccctggtgggccagatgtgcttccagatcggccaggccaagaacacctatggaacaggctgcttcctgctgtgcaacacaggccacaagtgtgtgttcagtgaccacggcctgctgaccaccgtggcctacaagctgggccgggacaagcctgtgtactatgccctggagggctctgtggccatcgccggggctgtgatccgctggctgcgggacaacctgggcatcatcaagaccagcgaggagattgagaagctggccaaggaggtgggcaccagctatggctgctactttgtgcctgccttcagcggcctgtatgccccctactgggagcccagcgcccggggcatcatctgtggcctgacccagttcaccaacaagtgccacatcgcctttgctgccctggaggccgtgtgcttccagacccgggagatcctggatgccatgaacagagactgtggcatccccctgagccacctgcaggtggatggcggcatgaccagcaacaagatcctgatgcagctgcaggccgacatcctgtacatccctgtggtgaagcccagcatgcctgagaccacagccctgggcgccgccatggctgctggagctgctgagggcgtgggcgtgtggagcctggagcctgaggacctgtctgctgtgaccatggagagatttgagccccagatcaatgctgaggagagcgagatccgctacagcacctggaagaaggctgtgatgaagtccatgggctgggtgaccacccagagccctgagagcggggaccccagcatcttctgcagcctgcccctgggcttcttcatcgtgtcctccatggtgatgctgattggagcccgctacatcagcggcatcccctag

SEQ ID NO: 81891 - DNA, 1680 bp, Artificial Sequence
  derived and/or modified sequence
atggccgccagcaagaaggccgtgctgggccccctggtgggcgccgtggaccagggtaccagctctacacgcttcctggtgttcaacagcaaaaccgcggaactgctttcacatcatcaggtggaaattaaacaggaattcccaagggaaggttgggtcgagcaggaccccaaagagatactccatagcgtgtacgaatgtattgaaaagacgtgcgaaaagctgggccaactgaacattgatattagtaatatcaaagctattggagtgagtaaccagagagagactacagtggtttgggacaaaattaccggcgagcctttatacaatgccgtcgtgtggctggacctgagaacgcaaagtaccgttgaatccctgtctaagaggatccctgggaataataattttgtgaagtctaagactgggctcccactgtcgacttactttagcgcggtgaagctcagatggcttttggacaacgttagaaaagttcagaaagccgtcgaggaaaagagggcactcttcggcacaatagacagttggttgatatggagtctgacaggaggggtaaacggaggcgtgcactgtactgatgtgacaaacgcctcaagaaccatgctgtttaatatacattccctcgagtgggataagcagctgtgtgagttctttggcattcctatggagattctgcccaatgtgcggagcagcagcgagatctatggactcatgaccattcacaattcaaagaaggcaggggccctggaaggagtgcctatctccggttgcttaggcgaccagtccgccgcactcgttggccagatgtgttttcagataggtcaggccaaaaatacttacggtactggctgtttccttctttgtaatacaggacacaagtgtgttttcagcgaccatgggctgttgacaacggttgcttataaactcgggagagataaacccgtctactacgcacttgaaggctctgtggcaatcgccggagccgtgatcagatggctcagggataaccttggcatcatcaagacaagtgaggagatcgagaagcttgccaaggaagtgggtacctcctatgggtgttatttcgtgcctgcttttagcggactctacgccccttactgggaaccttccgcacgagggatcatttgtggactgacccaatttactaacaaatgccacatagccttcgcagctcttgaagccgtgtgcttccagacccgcgagattctggatgccatgaatagggattgtggcatccccttgtctcatctccaggtggatggcggtatgactagtaataagattctaatgcagcttcaagccgacatcctgtacattcctgtggtaaagccatcgatgcctgagacgaccgctctcggtgctgcaatggccgcaggggccgcggaaggtgtgggagtctggtccctcgagcctgaggacctctctgccgttaccatggaaagatttgagccccagatcaatgcagaagagtcagaaatccggtatagtacctggaagaaagcggtaatgaagtctatgggctgggtcacgacacaatcacctgagagtggtgatccaagtatcttctgtagcttgccactgggcttctttattgtgagttcgatggttatgctgataggagcccgatatatctcgggcatcccttag

SEQ ID NO: 81892 - DNA, 1680 bp, Artificial Sequence
  derived and/or modified sequence
atggccgcttcgaagaaggccgtactcgggccattggtgggggcagttgaccaggggacctcgtccacgagattccttgtgtttaatagtaaaacggcagagcttctgagccatcaccaagttgagattaagcaggagttcccacgggaaggatgggtcgaacaggatcctaaggaaatactgcatagtgtttacgagtgcattgaaaagacttgtgagaaactgggccagctgaatattgacatctctaatattaaggcaattggagtttctaaccagcgtgaaaccacagttgtctgggacaaaataaccggtgagccactgtacaatgctgtcgtctggttagatctgaggacccaatcaacggttgaaagcctttccaagcgtatccctggtaataataactttgtgaagtctaagacaggactacctctgagcacctatttctcagccgttaagctgagatggttgctggacaatgtgagaaaggtccaaaaagctgtcgaggagaaacgagctctgttcggcactattgactcttggctgatatggtctctcaccggcggagtcaatggcggtgtgcactgcaccgacgtcactaatgctagccggactatgctgttcaacattcacagccttgaatgggataagcagctgtgcgagtttttcggaattcccatggagattttgcccaacgtacgttccagttccgaaatctacggtcttatgacgatccacaactcaaagaaagccggtgctctggaaggagtccccatctccggctgtctgggtgatcagtccgcggctcttgttggccagatgtgtttccagatcgggcaggcaaagaacacttacggcacaggatgcttcttactttgcaacaccggccacaaatgcgtattttcagaccacggcctgctgacgacagtggcttataagctgggacgggacaagcccgtgtattacgccctggaggggtccgtggcaattgctggagctgtcattcggtggttgcgcgataacctggggattattaagacctctgaagaaattgagaagctggcaaaggaggttgggacctcatatggctgctactttgtacccgctttcagcggactgtatgcaccttattgggagccaagtgcacgtggaatcatatgtggactcacacagttcacaaacaaatgtcatatagcgttcgctgcactcgaagccgtctgcttccaaacccgggaaattttggatgccatgaatcgggactgtggcatacccctttcccaccttcaggtcgatggtgggatgaccagtaataaaatattaatgcaattacaggcggacattttgtacatacccgtagtgaaaccctccatgccggagactaccgccctgggggctgctatggctgccggtgccgcagagggagtgggagtctggtcacttgagccagaggatctgtccgctgtgactatggagcggtttgaaccacagattaacgccgaggaatccgaaattcgctacagcacctggaaaaaggctgttatgaagtcgatgggctgggttaccacgcagtcgccagagtcaggtgaccctagcattttttgttcactgccattaggcttttttatcgtgagcagcatggttatgctgatcggggcacgttacatctcagggataccctag

SEQ ID NO: 81893 - DNA, 1680 bp, Artificial Sequence
  derived and/or modified sequence
atggccgccagcaagaaggccgtgctgggccccctggtgggcgccgtggaccagggcaccagcagcaccagattcctggtgttcaacagcaagaccgccgagctgctgagccaccaccaggtggagatcaagcaggagttccccagagagggctgggtggagcaggaccccaaggagatcctgcacagcgtgtacgagtgcatcgagaagacctgcgagaagctgggccagctgaacatcgacatcagcaacatcaaggccatcggcgtgagcaaccagagagagaccaccgtggtgtgggacaagatcaccggcgagcccctgtacaacgccgtggtgtggctggacctgagaacccagagcaccgtggagagcctgagcaagagaatccccggcaacaacaacttcgtgaagagcaagaccggcctgcccctgagcacctacttcagcgccgtgaagctgagatggctgctggacaacgtgagaaaggtgcagaaggccgtggaggagaagagagccctgttcggcaccatcgacagctggctgatctggagcctgaccggcggcgtgaacggcggcgtgcactgcaccgacgtgaccaacgccagcagaaccatgctgttcaacatccacagcctggagtgggacaagcagctgtgcgagttcttcggcatccccatggagatcctgcccaacgtgagaagcagcagcgagatctacggcctgatgaccatccacaacagcaagaaggccggcgccctggagggcgtgcccatcagcggctgcctgggcgaccagagcgccgccctggtgggccagatgtgcttccagatcggccaggccaagaacacctacggcaccggctgcttcctgctgtgcaacaccggccacaagtgcgtgttcagcgaccacggcctgctgaccaccgtggcctacaagctgggcagagacaagcccgtgtactacgccctggagggcagcgtggccatcgccggcgccgtgatcagatggctgagagacaacctgggcatcatcaagaccagcgaggagatcgagaagctggccaaggaggtgggcaccagctacggctgctacttcgtgcccgccttcagcggcctgtacgccccctactgggagcccagcgccagaggcatcatctgcggcctgacccagttcaccaacaagtgccacatcgccttcgccgccctggaggccgtgtgcttccagaccagagagatcctggacgccatgaacagagactgcggcatccccctgagccacctgcaggtggacggcggcatgaccagcaacaagatcctgatgcagctgcaggccgacatcctgtacatccccgtggtgaagcccagcatgcccgagaccaccgccctgggcgccgccatggccgccggcgccgccgagggcgtgggcgtgtggagcctggagcccgaggacctgagcgccgtgaccatggagagattcgagccccagatcaacgccgaggagagcgagatcagatacagcacctggaagaaggccgtgatgaagagcatgggctgggtgaccacccagagccccgagagcggcgaccccagcatcttctgcagcctgcccctgggcttcttcatcgtgagcagcatggtgatgctgatcggcgccagatacatcagcggcatcccctag

SEQ ID NO: 81894 - protein, 679 aa, Artificial Sequence
  derived and/or modified sequence
MPVRFKGLSEYQRNFLWKKSYLSESCNSSVGRKYPWAGLRSDQLGITKEPSFISKRRVPYHDPQISKSLEWNGAISESNVVASPEPEAPETPKSQEAEQKDVTQERVHSLEASRVPKRTRSHSADSRAEGASDVENNEGVTNHTPVNENVELEHSTKVLSENVDNGVFHNKSQFVPPFKGNSVIHETEYKRNFKGLSPVKEPKLRNDLRENRNLETVSPERKSNKIDDRLKLEAEMELKDLHQPKRKLTPWKHQRLGKVNSEYRAKFLSPAQYLYKAGAWTHVKGNMPNQGSLNAMWYAEVKELREKAEFYRKRVQGTHFSRDHLNQILSDSNCCWDVSSTTSSEGTVSSNIRALDLAGDPTSHKTLQKCPSTEPEEKGNIVEEQPQKNTTEKLGVSAPTIPVRRRLAWDTENTSEDVQKQPGEKEEEDDNEEEGDRKTGKQAFMGEQEKLDVREKSKADKMKEGSDSSVSSEKGGRLPTPKLRELGGIQRTHHDLTTPAVGGAVLVSPSKMKPPAPEQRKRMTSQDCLETSKNDFTKKESRAVSLLTSPAAGIKTVDPLPLREDSEDNIHKFAEATLPVSKIPKYPTNPPGQLPSPPHVPSYWHPSRRIQGSLRDPEFQHNVGKARMNNLQLPQHEAFNDEDEDRLSEISARSAASSLRAFQTLARAKKRKENFWGKT

SEQ ID NO: 81895 - DNA, 2040 bp, Artificial Sequence
  derived and/or modified sequence
atgccagtgcgcttcaagggcctttctgagtaccagaggaactttctgtggaagaaatcttacctgtcagaatcctgcaattcatcagtcgggagaaaatatccttgggccgggctgcgatcagatcagttaggcataaccaaggagcctagcttcatatcaaagcgacgcgtgccgtaccacgacccacaaatctctaagtcactggaatggaacggcgcaatctccgaaagtaacgtcgttgcaagtcctgagccggaggcccccgagacccccaagtcacaggaggccgaacagaaagacgttacccaggaacgggtgcactcattagaggcttccagagttcccaaaagaaccaggtcacactctgccgatagcagggctgaaggggcctcggatgtagagaacaacgagggtgtgaccaaccacaccccagtgaatgagaacgttgagttggaacatagtacaaaagtcctgtccgaaaacgtggacaacggcgtctttcataacaagagccagtttgtcccccctttcaagggcaatagcgtcatccacgagacagagtataagcgaaatttcaagggactgagcccagttaaagagcctaagctccgcaatgatttgcgagaaaatagaaatttggaaacggtgagtcctgagagaaaaagtaataaaatcgatgaccggctaaaactcgaggcagaaatggagctgaaagacctgcatcagcctaaacgaaagcttaccccatggaagcatcagaggctggggaaagttaactccgagtatcgcgcaaagttcctcagtcccgcacagtacctgtacaaggctggggcatggactcacgtgaaggggaatatgcccaaccaagggtcgctgaatgctatgtggtatgctgaggttaaggagctgagagagaaggctgagttctacaggaaacgcgtccagggcacgcatttcagtcgcgaccatctcaatcagatactgtcagactccaattgctgctgggatgtctcatcaactaccagttccgaaggcacagtctcaagtaacataagagccctggacctggccggcgacccgacttcgcataaaactcttcaaaagtgccccagcacggagccggaagagaaagggaacatagtggaagagcagccccagaaaaatacaaccgagaagctgggggtctcagcacctacgattcccgttcggaggagattggcctgggacacggaaaacacctccgaggacgtgcagaagcagccgggagagaaagaggaggaggacgacaatgaggaggaaggcgatagaaagaccggaaagcaagcattcatgggcgaacaggagaaactcgacgtgagggaaaaatccaaggccgacaaaatgaaggaagggtcggactcgagtgtctcatccgagaagggaggtcggctgccaactcccaaactccgcgaactgggtggtatccaaaggacccaccatgacctgacaaccccggcagtgggaggggccgtcctggtttcacctagtaagatgaaacctcctgccccagagcagaggaagagaatgactagccaggactgcctggaaactagcaagaatgattttacgaagaaggaatcccgtgcagtaagcctcctaacgtcaccggcagccggtatcaaaacagtggatcctctccctcttcgggaagactctgaagataacatccacaagtttgccgaggccaccctgccagtcagcaagattcctaaataccctaccaatcctccaggacagttgccctcacctccacatgtgccaagctattggcatccttcaaggaggatacaagggtccctgagggatcctgaattccaacataatgtcggtaaggctcggatgaacaatctacagttgcctcagcatgaggcttttaatgacgaggacgaggaccgcctgagcgagatttctgccagaagcgctgcctcctctctgcgagccttccagacccttgccagagcgaagaagcggaaggaaaatttctggggtaaaacctag

SEQ ID NO: 81896 - DNA, 2040 bp, Artificial Sequence
  derived and/or modified sequence
atgcctgtgcgcttcaagggcctgtctgagtaccagaggaacttcctgtggaagaagagctacctgtctgagagctgcaacagctctgtgggcaggaagtacccctgggccggcctgcggagtgaccagctgggcatcaccaaggagcccagcttcatcagcaagagaagagtgccctaccatgacccccagatcagcaagagcctggagtggaatggagccatcagcgagagcaatgtggtggccagccctgagcctgaggcccctgagacccccaagagccaggaggccgagcagaaggatgtgacccaggagcgggtgcacagcctggaggccagccgggtgcccaagaggaccaggagccacagcgctgacagcagagctgagggcgccagtgatgtggagaacaatgaaggagtgaccaaccacacccctgtgaatgaaaatgtggagctggagcacagcaccaaggtgctgtctgaaaatgtggacaatggagtcttccacaacaagagccagtttgtgccccccttcaagggcaacagcgtcatccatgaaacagagtacaagaggaacttcaagggcctgagccctgtgaaggagcccaagctgagaaatgacctgcgggagaacagaaacctggagaccgtgtccccagagaggaagagcaacaagattgatgaccggctgaagctggaggccgagatggagctgaaggacctgcaccagcccaagaggaagctgaccccctggaagcaccagaggctgggcaaggtgaacagcgagtaccgggccaagttcctgagccctgcccagtacctgtacaaggccggggcctggacccacgtgaagggcaacatgcccaaccagggcagcctgaatgccatgtggtatgcagaggtgaaggagctgcgggagaaggccgagttctacaggaagagggtgcagggcacccacttcagccgggaccacctgaaccagatcctgagtgacagcaactgctgctgggatgtgagcagcaccaccagcagcgagggcaccgtgagcagcaacatccgggccctggacctggccggggaccccaccagccacaagaccctgcagaagtgccccagcacagagcctgaggagaagggcaacatcgtggaggagcagccccagaagaacaccacagagaagctgggcgtgtctgcccccaccatccctgtgagaagaaggctggcctgggacacagagaacaccagtgaagatgtgcagaagcagcccggggagaaggaggaggaggatgacaatgaggaggagggggacaggaagacaggcaagcaggccttcatgggagagcaggagaagctggatgtgcgggagaagagcaaggctgacaagatgaaggagggcagtgacagctctgtgagcagcgagaagggcggccgcctgcccacccccaagctgcgggagctgggcggcatccagaggacccaccacgacctgaccaccccagctgtgggcggcgctgtgctggtgagccccagcaagatgaagcccccagcccctgagcagaggaagaggatgaccagccaggactgcctggagaccagcaagaatgacttcaccaagaaggagagcagagctgtgtccctgctgaccagccctgctgctggcatcaagacagtggaccccctgcccctgcgggaggacagcgaggacaacatccacaagtttgctgaggccaccctgcctgtgtccaagatccccaagtaccccaccaaccccccaggccagctgcccagcccccctcatgtgcccagctactggcaccccagccgccgcatccagggcagcctgcgggaccctgagttccagcacaacgtgggcaaggccaggatgaacaacctgcagctgccccagcacgaggccttcaatgatgaagatgaggaccggctgtctgagatcagcgcccggtctgctgccagcagcctgcgggccttccagaccctggcccgggccaagaagaggaaagaaaacttctggggcaagacctag

SEQ ID NO: 81897 - DNA, 2472 bp, Artificial Sequence
  derived and/or modified sequence
agttaactgtcggagtagcgggggctccggcgccgggcgacatgccggtgcgcttcaaggggctgagtgaataccagaggaacttcctgtggaaaaagtcttatttgtccgagtcttgtaattcctccgtggggcgaaagtacccatgggctggacttagatcagatcaattaggcatcacgaaagagccaagttttatttcaaaaagaagagtcccttaccatgacccacagatttcaaaatctctggagtggaatggagctatctcagagagcaatgtggttgcatcaccagaaccagaagccccggaaacaccaaaatcacaagaagcagaacaaaaggatgttactcaagaaagagttcactcactagaagcttccagggttcccaaaagaaccagatctcactctgcagactccagagctgaaggggcttcagatgtggaaaataatgagggtgtaacaaaccatacaccagttaatgaaaatgtggaactggaacattctaccaaggttctttcagaaaatgtagataatggggttttccacaataaaagccagtttgttccaccattcaaaggtaactcagtcatccatgaaactgaatacaaaagaaatttcaagggtttatctccagtgaaagaaccaaaattaagaaatgatttgagagaaaacagaaatcttgaaacagtgtctcctgaaaggaagagtaataaaatagacgatcgtttaaaattggaagcagagatggaattaaaagacttacaccagcctaaaaggaagcttactccttggaaacatcaaaggcttgggaaggtgaattccgaatatagagcaaaatttctgagcccagctcagtatttatataaagctggggcttggacacatgtaaagggaaacatgccaaatcagggttctctaaatgccatgtggtatgctgaggttaaagaactccgagaaaaggctgagttttataggaagcgagttcaggggacgcatttttctcgggaccatctgaatcagattttatctgatagcaactgctgttgggatgtctcctcaaccacaagctcagaaggaaccgttagtagcaacatcagagcattagatcttgctggagatcctacaagccataagactttgcagaaatgtccttctacagaaccagaagaaaaaggaaatatcgtggaagaacagccccagaaaaataccacggagaaattgggtgtgtcagctcccaccatacccgttagaaggcggctggcttgggatacagagaacacaagtgaagacgtacagaaacagcccggggagaaagaggaggaggacgacaatgaagaggaaggggacaggaaaacgggcaagcaggcttttatgggagagcaagagaagttggatgtacgtgagaaatctaaggcagataagatgaaagaagggtcagattcttctgtatcctcagaaaaaggaggccggcttcctactcccaagctgagagaacttggtggaatccagaggactcatcatgatctcactactccagctgttggtggtgctgttttagtgtctccatctaagatgaagcctccagccccagaacagaggaaaagaatgacctctcaggattgtttagaaacttcaaagaatgattttactaagaaagaaagtcgtgctgtatccctactgacttctccagctgctggtataaaaacagttgatcctctgcctttgcgggaagattctgaagacaatatccacaaatttgctgaggcaactcttccagtttcaaaaattccaaaatacccaacaaatccccctggacagttgccttctccaccacatgttccatcctactggcatccctctcgacgaattcagggctctcttagagatccagagtttcagcacaatgtgggaaaagcaaggatgaacaatttgcagttacctcaacatgaagcctttaatgatgaagatgaggacagattgtctgagatttctgctcgctctgcagcttctagtctccgggcttttcaaactctggcacgagctaagaaaaggaaggagaatttctggggtaaaacataaacctagctgagttgcctttatctaaggaaacattggcataatttttctttattgcttactgtgttaaaattttttgagtgaagtttttcctaacgttttctactttgaaatatttaatttccaatagaacagtttacttggaaattgttaacataggcttatacaaatttaacttttaaagaattctttttacatctatcccagagtacaaagacctagattattgaattcttcacatgtaactttcgtaataggtgtcatggatagattttcacctatccagagagtattctaaaaaaataaacaaagtgaagtaaaagttaagatcccagtgtgaagtatatattcccctaagatttgatatatgtatctttataattgatgatgttgt

SEQ ID NO: 81898 - DNA, 2040 bp, Artificial Sequence
  derived and/or modified sequence
atgcccgtgcggttcaagggcctgagcgagtaccagcggaacttcctgtggaagaaatcctacctgagtgagtcatgcaattcatccgtgggccggaaatatccttgggccggactcaggtcagatcagctgggaataaccaaggagcccagctttatctcgaagcgaagagtgccctaccacgacccccagatttcaaagagtctcgagtggaacggggccatatctgagagcaacgttgttgcttcgcccgaaccagaagccccggagacaccaaaaagccaggaggcggaacagaaagacgtaacgcaggagagagtccattctttggaggccagccgtgttccaaaaagaacgaggagccatagcgcggatagccgcgctgaaggagcttctgatgttgaaaacaatgaaggcgtgacaaaccacacccctgtaaacgaaaatgtggagctcgagcattctacaaaggtcctgagcgaaaacgtcgataacggtgtgttccataataagagccagttcgtgccccccttcaagggaaactccgttatccatgagacagaatataaacgcaacttcaaggggctgagtccagtcaaggagcccaagctgcggaatgacctccgcgaaaataggaacttagagactgtatcccccgagagaaaatctaataaaattgacgatagactgaagctggaggccgagatggagctcaaggacctacaccaacctaaacgaaagttaaccccttggaaacatcagagacttggaaaggtgaactcagagtaccgggctaaattcctgtcacccgcccagtatctgtataaagccggcgcctggacacacgtgaaagggaacatgccaaaccagggaagccttaatgccatgtggtacgccgaggtgaaggagctgagagaaaaagccgagttctacaggaaacgggtccaggggactcattttagcagggaccacctgaatcaaattcttagcgactccaattgttgctgggacgtttcatcaacgacctcctccgaaggtacagtcagtagtaacatcagagcactggatctggccggggaccccactagtcataagaccctccagaaatgcccttctaccgaaccggaggagaagggcaatattgtggaagagcagccccaaaagaatacaacggagaagctgggcgtcagcgcccctacaattcctgtgaggagaaggttggcctgggacactgagaatacctctgaggatgtgcaaaagcagccaggtgagaaggaagaggaggatgacaatgaagaagagggtgacaggaagacaggcaagcaggcattcatgggtgagcaggagaaactggatgttcgcgaaaagtcaaaagccgacaaaatgaaagagggctctgactcttctgtctccagcgaaaagggcgggaggctaccgacgcccaaactccgggaacttggtgggatccagcggactcatcacgatctaaccacaccagccgtcggaggggcagtcctggtgtccccatctaaaatgaaacctcccgcccctgaacaaaggaagcggatgactagccaggactgtttggaaactagcaaaaatgacttcacaaagaaagaatccagggctgtgtctctcttaacatcccccgctgctggtattaaaacagtggatccactcccattaagggaggattcagaggacaacatacataagttcgctgaagccacgttgcctgtctccaagattccaaagtaccccacaaacccgccaggccagctgccatccccaccccatgtgcccagctactggcacccttctcggcgaattcaggggagcctccgggatccagaattccagcacaatgtcggcaaagcgcggatgaacaacctacagctgcctcaacacgaagcttttaacgacgaggacgaagataggctttcagaaatctcagctcgttctgccgcctcttccctgcgcgcattccagacattggccagggccaagaagcggaaggagaatttttgggggaagacttag

SEQ ID NO: 81899 - DNA, 2040 bp, Artificial Sequence
  derived and/or modified sequence
atgcctgtgagattcaaaggtctctctgagtaccaaaggaacttcctgtggaaaaaatcatatctttcggaaagctgtaattcatccgttggtcgaaagtatccctgggccggtttgagatccgaccaattaggcattaccaaggaacccagcttcataagtaagcggcgagtaccttatcacgatccgcagatatctaaatccctcgagtggaatggggcaatcagtgagagcaacgtagtggcaagccctgaacctgaggcccctgaaacccctaaatcacaggaggctgagcaaaaggatgtaacccaggagagagttcattcattagaagctagcagagtccctaagaggactcgcagccactctgcagatagcagagcagaaggagctagtgacgtcgagaataacgaaggcgtcactaaccatactcccgtcaacgagaacgtcgaactggagcacagtacaaaggtgctgtctgagaatgttgataacggagtatttcacaataaaagtcagtttgtgccacctttcaaaggcaattctgtgatacacgagacagaatacaaaaggaactttaaaggcctgtctcctgttaaagaaccgaaactccggaatgacttgcgggaaaataggaatctggagacagtgagccccgaaagaaaatccaacaagatcgacgacaggttgaaacttgaggcggagatggaactaaaggatctgcatcagccgaagagaaagctaacaccatggaagcatcagaggctgggaaaagtgaattctgaatatcgtgctaaattccttagcccagctcagtatctctataaggccggagcttggacacacgttaaaggcaacatgccgaatcagggctccctcaacgctatgtggtacgccgaggttaaagaattgcgggagaaggccgagttttatcgcaagcgggtgcaaggaacacacttcagccgcgaccacctcaaccagatcctaagcgactccaattgctgctgggacgttagctctactacctcctcagaagggaccgttagcagcaatattagggccctggatcttgctggggatccgacctcccataagactctgcagaagtgtccaagcacggagcccgaggaaaaggggaacatagtggaggagcagccccagaagaataccactgagaaactgggcgtgagcgctccaactatacctgtcagacgtcggttggcttgggatacagaaaacacaagcgaggatgtgcagaagcagccaggagaaaaggaggaggaggatgacaatgaggaggaaggcgacaggaaaacgggcaaacaggccttcatgggagagcaggagaaactggatgtccgggaaaagagtaaagcagacaaaatgaaggaaggcagcgacagctctgtgtcatccgaaaaggggggaaggctgcctactcctaagctgcgtgagttgggtggcatacaacgaacccatcatgaccttaccacaccagccgtggggggtgccgtgctggtgtcaccaagtaagatgaagcctccggcacccgagcagcgcaagagaatgaccagccaggattgtcttgagacttccaagaatgactttacgaaaaaagaatcccgcgctgtatctttgctgacctctcccgctgccggaatcaagacagtggatccattaccactgcgcgaggacagtgaggacaatatccacaaatttgcggaggccactctgcccgtgagtaaaattcctaaatacccgacaaaccctccgggacagctgccctcacctccccacgtgcctagttactggcacccttcccgaaggatacaggggtccctcagagaccccgagtttcaacacaacgtgggaaaggcaagaatgaataatctgcagctaccacaacacgaggcatttaacgacgaggatgaggataggttgtctgagatttctgcaagaagtgcagcgtctagtctccgtgcttttcagactctggcgagagcaaaaaagaggaaggaaaacttttgggggaaaacatag

SEQ ID NO: 81900 - DNA, 2040 bp, Artificial Sequence
  derived and/or modified sequence
atgcccgtgagattcaagggcctgagcgagtaccagagaaacttcctgtggaagaagagctacctgagcgagagctgcaacagcagcgtgggcagaaagtacccctgggccggcctgagaagcgaccagctgggcatcaccaaggagcccagcttcatcagcaagagaagagtgccctaccacgacccccagatcagcaagagcctggagtggaacggcgccatcagcgagagcaacgtggtggccagccccgagcccgaggcccccgagacccccaagagccaggaggccgagcagaaggacgtgacccaggagagagtgcacagcctggaggccagcagagtgcccaagagaaccagaagccacagcgccgacagcagagccgagggcgccagcgacgtggagaacaacgagggcgtgaccaaccacacccccgtgaacgagaacgtggagctggagcacagcaccaaggtgctgagcgagaacgtggacaacggcgtgttccacaacaagagccagttcgtgccccccttcaagggcaacagcgtgatccacgagaccgagtacaagagaaacttcaagggcctgagccccgtgaaggagcccaagctgagaaacgacctgagagagaacagaaacctggagaccgtgagccccgagagaaagagcaacaagatcgacgacagactgaagctggaggccgagatggagctgaaggacctgcaccagcccaagagaaagctgaccccctggaagcaccagagactgggcaaggtgaacagcgagtacagagccaagttcctgagccccgcccagtacctgtacaaggccggcgcctggacccacgtgaagggcaacatgcccaaccagggcagcctgaacgccatgtggtacgccgaggtgaaggagctgagagagaaggccgagttctacagaaagagagtgcagggcacccacttcagcagagaccacctgaaccagatcctgagcgacagcaactgctgctgggacgtgagcagcaccaccagcagcgagggcaccgtgagcagcaacatcagagccctggacctggccggcgaccccaccagccacaagaccctgcagaagtgccccagcaccgagcccgaggagaagggcaacatcgtggaggagcagccccagaagaacaccaccgagaagctgggcgtgagcgcccccaccatccccgtgagaagaagactggcctgggacaccgagaacaccagcgaggacgtgcagaagcagcccggcgagaaggaggaggaggacgacaacgaggaggagggcgacagaaagaccggcaagcaggccttcatgggcgagcaggagaagctggacgtgagagagaagagcaaggccgacaagatgaaggagggcagcgacagcagcgtgagcagcgagaagggcggcagactgcccacccccaagctgagagagctgggcggcatccagagaacccaccacgacctgaccacccccgccgtgggcggcgccgtgctggtgagccccagcaagatgaagccccccgcccccgagcagagaaagagaatgaccagccaggactgcctggagaccagcaagaacgacttcaccaagaaggagagcagagccgtgagcctgctgaccagccccgccgccggcatcaagaccgtggaccccctgcccctgagagaggacagcgaggacaacatccacaagttcgccgaggccaccctgcccgtgagcaagatccccaagtaccccaccaacccccccggccagctgcccagccccccccacgtgcccagctactggcaccccagcagaagaatccagggcagcctgagagaccccgagttccagcacaacgtgggcaaggccagaatgaacaacctgcagctgccccagcacgaggccttcaacgacgaggacgaggacagactgagcgagatcagcgccagaagcgccgccagcagcctgagagccttccagaccctggccagagccaagaagagaaaggagaacttctggggcaagacctag

SEQ ID NO: 81901 - protein, 69 aa, Artificial Sequence
  derived and/or modified sequence
MPVRFKGLSEYQRNFLWKKSYLSESCNSSVGRKYPWAGLRSDQLGNQGRCRTKIQHSDISSLLILVCST

SEQ ID NO: 81902 - DNA, 210 bp, Artificial Sequence
  derived and/or modified sequence
atgcccgtgcgttttaaggggctctccgaataccagcgcaactttctatggaaaaaaagttatttgagcgagtcatgcaactcatctgttgggagaaagtatccctgggccggtctgcgctccgaccagctaggaaaccagggtcgttgtagaacaaaaatccagcacagcgacatcagcagcttactgatcttggtttgttctacatag

SEQ ID NO: 81903 - DNA, 210 bp, Artificial Sequence
  derived and/or modified sequence
atgcctgtgcgcttcaagggcctgtctgagtaccagaggaacttcctgtggaagaagagctacctgtctgagagctgcaacagctctgtgggcaggaagtacccctgggccggcctgcggagtgaccagctgggcaaccagggccgctgcaggaccaagatccagcacagcgacatcagcagcctgctgatcctggtgtgcagcacctag

SEQ ID NO: 81904 - DNA, 210 bp, Artificial Sequence
  derived and/or modified sequence
atgcccgtgcggttcaagggcctgagcgagtaccagcggaacttcctatggaaaaaatcctacctcagcgaatcctgtaactcaagcgtgggtcgaaagtacccttgggcaggcctccgctccgaccagcttggcaaccagggtcgctgcaggactaaaattcaacatagcgatattagttctctgcttattttggtatgctcgacctag

SEQ ID NO: 81905 - DNA, 210 bp, Artificial Sequence
  derived and/or modified sequence
atgcccgttaggttcaaaggcctttcggagtaccagagaaacttcctgtggaaaaaatcctacctgtccgaatcttgtaatagcagcgtggggagaaagtatccatgggcaggtttgagaagcgatcagctaggcaatcaaggaagatgcagaacgaagatacaacactctgatatcagctctctgctgattctggtctgcagtacttag

SEQ ID NO: 81906 - DNA, 210 bp, Artificial Sequence
  derived and/or modified sequence
atgcccgtgagattcaagggcctgagcgagtaccagagaaacttcctgtggaagaagagctacctgagcgagagctgcaacagcagcgtgggcagaaagtacccctgggccggcctgagaagcgaccagctgggcaaccagggcagatgcagaaccaagatccagcacagcgacatcagcagcctgctgatcctggtgtgcagcacctag

SEQ ID NO: 81907 - protein, 13 aa, Artificial Sequence
  derived and/or modified sequence
NYQDMVVEGCGCR

SEQ ID NO: 81908 - protein, 17 aa, Artificial Sequence
  derived and/or modified sequence
SFHHEESLEELPETSGK

SEQ ID NO: 81909 - protein, 396 aa, Artificial Sequence
  derived and/or modified sequence
MVAGTRCLLALLLPQVLLGGAAGLVPELGRRKFAAASSGRPSSQPSDEVLSEFELRLLSMFGLKQRPTPSRDAVVPPYMLDLYRRHSGQPGSPAPDHRLERAASRANTVRSFHHEESLEELPETSGKTTRRFFFNLSSIPTEEFITSAELQVFREQMQDALGNNSSFHHRINIYEIIKPATANSKFPVTRLLDTRLVNQNASRWESFDVTPAVMRWTAQGHANHGFVVEVAHLEEKQGVSKRHVRISRSLHQDEHSWSQIRPLLVTFGHDGKGHPLHKREKRQAKHKQRKRLKSSCKRHPLYVDFSDVGWNDWIVAPPGYHAFYCHGECPFPLADHLNSTNHAIVQTLVNSVNSKIPKACCVPTELSAISMLYLDENEKVVLKNYQDMVVEGCGCR

SEQ ID NO: 81910 - protein, 174 aa, Artificial Sequence
  derived and/or modified sequence
MVEFQPSVTDLVNEEPRTGLRPLKRSKSGKSLTQSLWLNNNVLNDLRDFNQVASQLLEHPENLAWIDLSFNDLTSIDPVLTTFFNLSVLYLHGNSIQRLGEVNKLAVLPRLRSLTLHGNPMEEEKGYRQYVLCTLSRITTFDFSGVTKADRTTAEVWKRMNIKPKKAWTKQNTL

SEQ ID NO: 81911 - DNA, 525 bp, Artificial Sequence
  derived and/or modified sequence
atggtggaattccagcctagcgtgaccgacctggtgaatgaagagcctagaacaggccttaggccgctcaaaaggtcgaagtccggaaagtctcttacccaatctctgtggttgaacaacaatgttttaaacgatctccgggatttcaaccaggtcgcctcacagctgctggaacacccagagaacctcgcatggattgatctcagtttcaatgatctcacttcaatcgacccggtgttgaccactttcttcaatctgtcagttctatacctgcacgggaatagcattcagcggcttggggaggttaacaaactggcagttctcccccggttgaggtcattaactctccatggcaatccaatggaggaagagaagggatacaggcaatacgtgctgtgcaccctctcaaggataactacattcgacttttcaggtgtaaccaaagctgacaggactacagctgaggtttggaagagaatgaacatcaaacccaagaaagcatggacaaaacaaaacacactctag

SEQ ID NO: 81912 - DNA, 525 bp, Artificial Sequence
  derived and/or modified sequence
atggtggagttccagcccagcgtgacagacctggtgaatgaggagcccaggacaggcctgcggcccctgaagaggagcaagagcggcaagagcctgacccagagcctgtggctgaacaacaacgtgctgaatgacctgcgggacttcaaccaggtggccagccagctgctggagcaccctgagaacctggcctggattgacctgtccttcaatgacctgaccagcattgatcctgtgctgaccaccttcttcaacctgtctgtgctgtacctgcacggcaacagcatccagaggctgggggaggtgaacaagctggccgtgctgccccggctgcggagcctgaccctgcacggcaaccccatggaggaggagaagggctaccggcagtatgtgctgtgcaccctgagccgcatcaccacctttgacttcagcggcgtgaccaaggctgacaggaccacagctgaggtgtggaagaggatgaacatcaagcccaagaaggcctggaccaagcagaacaccctgtag

SEQ ID NO: 81913 - DNA, 1270 bp, Artificial Sequence
  derived and/or modified sequence
agcagttgccatggagttgctctgagtaaccctgaggcagtgggacgccaagactggagaggaagcgactgcggggagtatttccattttaaccggaaacaatccctgaacccacaggaatgaatgcctaatggtggagtttcagccatcagtgacagatctggtaaatgaggagccaaggacaggactacgaccactgaagcgttcaaagtcggggaaatcactgacccagtccctgtggctgaataacaatgttctcaatgatctgagagacttcaaccaggtggcttcacagctgttggagcacccagagaacctggcctggatcgacctgtcctttaatgacctgacttccattgaccctgtcctaacaactttcttcaacctgagtgtcctctatcttcacggcaacagcatccagcgcctgggggaggtgaataagctggctgtccttcctcggctccgtagcctgacactccatgggaaccccatggaggaagagaaagggtataggcaatatgtgctgtgcaccctgtcccgtatcaccacgttcgacttcagtggggtcaccaaagcagaccgcaccacagctgaagtctggaaacgcatgaacatcaagcccaagaaggcctggaccaagcagaatacactttgaggctcccacgaccctagtagtcctaaaggcctaagcatagacagcatggtttgacaataaataatttgagctgttgagcagatgagaagtcacttacaccttgtagagatgttctctaactcaggcaactgcaagtagctctagccttttcttttcttttttttttttttgagacggagtctcactctgtcacacaggctggagtgcagtggcacgatcttggctcactgcaacctcagcctcccaggttcaagagattctcctgcctcagcctccccagtagctgtgattaaaggcgcctgccaccatgactggctaattttgttgttgttgttgttgttttgagacggtttcactcgtcaccccagctggagtgcagtggtgcgatctcagctcactgcaacctccgcctgctgggttcaagcgattctcctgcctcagcctcctgagtagctgggattacaggcgcctgctaccacatccagctaatttttttttttgagacggagtctcgctctgtcacccaggctggagtgcagtggcacgatctcggctcactgcaaactccgccttccaggttcacgccattctcctgcctcagcctcccaagtagct

SEQ ID NO: 81914 - DNA, 525 bp, Artificial Sequence
  derived and/or modified sequence
atggtggagttccagcccagcgtgaccgacctggtgaacgaggagcccagaactggcctccgtccactgaagcgatctaagtctggaaaaagccttactcagagcctttggcttaacaacaatgtactcaatgatttgcgcgattttaatcaggtggctagccagttgttggagcaccctgagaacttggcgtggatagatctcagtttcaatgacctcacatccatcgatcccgtactcaccaccttcttcaatctttcagtgctgtatctgcatggtaacagtattcagaggctcggcgaagtcaacaaactcgccgtcttgcctaggcttcggtccctaaccctgcacggaaacccaatggaagaagagaaaggatatcgccaatacgtcctctgcaccctgtctaggatcaccacatttgacttcagcggagtcactaaggcagataggaccacagccgaggtgtggaaacgtatgaacatcaagcctaagaaagcctggactaagcaaaatactctgtag

SEQ ID NO: 81915 - DNA, 525 bp, Artificial Sequence
  derived and/or modified sequence
atggttgagttccagcctagtgtcacagaccttgtgaacgaggagcctagaaccggcttgcgaccattaaagcggtccaagagtgggaagtctctgactcaaagcctatggctcaacaacaacgtactcaacgacctgagagacttcaatcaggttgcctcgcagttgttggagcaccctgagaatctggcttggattgatttgtccttcaacgacctgacttctatcgatcccgttctcactactttctttaatctgtccgtgctgtatctgcatggcaatagtatacagcgactgggggaggtgaacaagctcgccgtcctcccaagattacgctccctgaccctacatgggaacccgatggaagaggagaagggctatcgccagtatgttctttgtacgctgtctaggataacaacatttgatttcagcggggtgacgaaggcagaccgcactacagccgaggtatggaagcgcatgaacatcaagcccaagaaggcatggaccaaacaaaatactctgtag

SEQ ID NO: 81916 - DNA, 525 bp, Artificial Sequence
  derived and/or modified sequence
atggtggagttccagcccagcgtgaccgacctggtgaacgaggagcccagaaccggcctgagacccctgaagagaagcaagagcggcaagagcctgacccagagcctgtggctgaacaacaacgtgctgaacgacctgagagacttcaaccaggtggccagccagctgctggagcaccccgagaacctggcctggatcgacctgagcttcaacgacctgaccagcatcgaccccgtgctgaccaccttcttcaacctgagcgtgctgtacctgcacggcaacagcatccagagactgggcgaggtgaacaagctggccgtgctgcccagactgagaagcctgaccctgcacggcaaccccatggaggaggagaagggctacagacagtacgtgctgtgcaccctgagcagaatcaccaccttcgacttcagcggcgtgaccaaggccgacagaaccaccgccgaggtgtggaagagaatgaacatcaagcccaagaaggcctggaccaagcagaacaccctgtag

SEQ ID NO: 81917 - protein, 157 aa, Artificial Sequence
  derived and/or modified sequence
MDRFLVKGAQGGLLRKQEEQEPTGEEPAVLGGDKESTRKRPRREAPGNGGHSAGPSWRHIRAEGLDCSYTVLFGKAEADEIFQELEKEVEYFTGIKMAVTTSGSTEMMKENWPLGAPLPLSPSVPAETLSSGIRIPVGKAPPGGWRWSGCRWPTGAY

SEQ ID NO: 81918 - DNA, 474 bp, Artificial Sequence
  derived and/or modified sequence
atggacagatttctcgtgaagggggcacaggggggtctcctgcgcaaacaggaagaacaggaacccaccggggaagaacctgccgtgcttgggggagacaaggagtcaacaagaaagagaccgagacgtgaagcacctgggaacggtggacacagcgccggaccatcttggcggcatattagggccgagggtcttgattgctcatacaccgttctgtttggcaaagcagaggctgatgaaatcttccaggaactggaaaaggaggttgagtactttactggcattaaaatggccgtcaccaccagtggctctacggagatgatgaaggagaattggcctctcggcgcccccctgcccctgagccctagcgtgccagcggagactcttagttcaggtattcgaataccagtgggaaaggccccacctggcggctggcgatggtcaggttgtagatggccaacgggcgcctactag

SEQ ID NO: 81919 - DNA, 474 bp, Artificial Sequence
  derived and/or modified sequence
atggaccgcttcctggtgaagggggcccagggcggcctgctgaggaagcaggaggagcaggagcccactggagaggagcctgctgtgctgggcggggacaaggagagcaccaggaagaggccccggcgggaggcccctggaaatggaggccacagcgctggccccagctggaggcacatccgggcagagggcctggactgcagctacacagtgctgtttgggaaggccgaggctgatgagatcttccaggagctggagaaggaggtggagtacttcaccggcatcaagatggctgtgaccaccagcggcagcacagagatgatgaaggagaactggcccctgggcgcccccctgcccctgagccccagcgtgcctgctgagaccctgagcagcggcatccgcatccctgtgggcaaggcccctcctgggggctggcgctggagcggctgccgctggcccaccggggcctactag

SEQ ID NO: 81920 - DNA, 574 bp, Artificial Sequence
  derived and/or modified sequence
aggatggacagattcctggtgaaaggggctcaagggggccttttgaggaagcaggaggagcaagagccaactggagaagagccagctgtgttgggaggagacaaagaaagcacaaggaagaggcccaggagagaggccccagggaatggaggccactcagcaggccctagctggcggcacattcgggctgagggcctggactgcagttacacagtcctgtttggcaaagctgaggcagatgagattttccaagagttggagaaagaagtagaatattttacaggtataaagatggctgtgaccacatcggggagcaccgagatgatgaaagagaactggcccctgggagccccattgcctctgtctccttcggtgcctgcagagactttgtcttccggcataaggattcccgtgggaaaagcccctccaggagggtggcggtggtcaggctgccgctggcccacgggagcttactaatgatgaaccacccgaccaacacgcactggtaccacagtcttcccgtgagaaagaaggttctggctccacgggtgaatctgacttttcgtaaaatttt

SEQ ID NO: 81921 - DNA, 474 bp, Artificial Sequence
  derived and/or modified sequence
atggaccggttcctggtgaagggcgcccagggcggcctgctgcggaagcaggaggaacaggagcccactggggaggagcccgcggtattgggcggagacaaggagagcacacgcaaaagacctagacgtgaagctccgggcaacggaggtcacagcgccggcccaagttggaggcatatcagggccgaaggcctagattgcagttatacggtgttattcggtaaggctgaagcagatgaaattttccaggagctggagaaggaagtggagtactttactggcattaaaatggcagtgacaacttcagggtccaccgagatgatgaaagaaaactggccactgggcgctcctctgcccctctctccatccgtgccagctgaaacgctgagcagtggaataaggataccagtggggaaagccccccccggaggctggcgttggagtggctgtaggtggccaaccggggcttattag

SEQ ID NO: 81922 - DNA, 474 bp, Artificial Sequence
  derived and/or modified sequence
atggacaggttcctcgtgaaaggagcccagggcggactcctgcggaaacaagaagagcaagagcccaccggtgaagagcctgccgtcctgggcggagacaaagagagcacccgcaagaggcctcgcagagaggccccaggcaatgggggacactcagcgggacctagctggaggcatatccgtgcggaagggttggactgcagctacacagtgctctttggcaaagccgaggcagatgaaatttttcaggaactggaaaaggaggtggagtacttcacagggatcaaaatggctgttacgaccagtggcagtacagagatgatgaaggagaactggccactcggagctccattgccattgtcaccttccgtgccagcagagacgctgagttccggaatcaggattcctgtgggaaaggcccctcctggtgggtggaggtggagtggctgcagatggcctacaggggcttactag

SEQ ID NO: 81923 - DNA, 474 bp, Artificial Sequence
  derived and/or modified sequence
atggacagattcctggtgaagggcgcccagggcggcctgctgagaaagcaggaggagcaggagcccaccggcgaggagcccgccgtgctgggcggcgacaaggagagcaccagaaagagacccagaagagaggcccccggcaacggcggccacagcgccggccccagctggagacacatcagagccgagggcctggactgcagctacaccgtgctgttcggcaaggccgaggccgacgagatcttccaggagctggagaaggaggtggagtacttcaccggcatcaagatggccgtgaccaccagcggcagcaccgagatgatgaaggagaactggcccctgggcgcccccctgcccctgagccccagcgtgcccgccgagaccctgagcagcggcatcagaatccccgtgggcaaggccccccccggcggctggagatggagcggctgcagatggcccaccggcgcctactag

SEQ ID NO: 81924 - protein, 1051 aa, Artificial Sequence
  derived and/or modified sequence
MKSEDYPHETMAPDIHEERQYRCEDCDQLFESKAELADHQKFPCSTPHSAFSMVEEDFQQKLESENDLQEIHTIQECKECDQVFPDLQSLEKHMLSHTEEREYKCDQCPKAFNWKSNLIRHQMSHDSGKHYECENCAKVFTDPSNLQRHIRSQHVGARAHACPECGKTFATSSGLKQHKHIHSSVKPFICEVCHKSYTQFSNLCRHKRMHADCRTQIKCKDCGQMFSTTSSLNKHRRFCEGKNHFAAGGFFGQGISLPGTPAMDKTSMVNMSHANPGLADYFGANRHPAGLTFPTAPGFSFSFPGLFPSGLYHRPPLIPASSPVKGLSSTEQTNKSQSPLMTHPQILPATQDILKALSKHPSVGDNKPVELQPERSSEERPFEKISDQSESSDLDDVSTPSGSDLETTSGSDLESDIESDKEKFKENGKMFKDKVSPLQNLASINNKKEYSNHSIFSPSLEEQTAVSGAVNDSIKAIASIAEKYFGSTGLVGLQDKKVGALPYPSMFPLPFFPAFSQSMYPFPDRDLRSLPLKMEPQSPGEVKKLQKGSSESPFDLTTKRKDEKPLTPVPSKPPVTPATSQDQPLDLSMGSRSRASGTKLTEPRKNHVFGGKKGSNVESRPASDGSLQHARPTPFFMDPIYRVEKRKLTDPLEALKEKYLRPSPGFLFHPQFQLPDQRTWMSAIENMAEKLESFSALKPEASELLQSVPSMFNFRAPPNALPENLLRKGKERYTCRYCGKIFPRSANLTRHLRTHTGEQPYRCKYCDRSFSISSNLQRHVRNIHNKEKPFKCHLCDRCFGQQTNLDRHLKKHENGNMSGTATSSPHSELESTGAILDDKEDAYFTEIRNFIGNSNHGSQSPRNVEERMNGSHFKDEKALVTSQNSDLLDDEEVEDEVLLDEEDEDNDITGKTGKEPVTSNLHEGNPEDDYEETSALEMSCKTSPVRYKEEEYKSGLSALDHIRHFTDSLKMRKMEDNQYSEAELSSFSTSHVPEELKQPLHRKSKSQAYAMMLSLSDKESLHSTSHSSSNVWHSMARAAAESSAIQSISHV

SEQ ID NO: 81925 - DNA, 3156 bp, Artificial Sequence
  derived and/or modified sequence
atgaagtcagaagactatccccacgagaccatggcccccgacatccacgaggaacgtcaatacaggtgcgaggactgcgaccaactctttgaaagcaaagccgagcttgctgaccatcaaaagtttccctgctcaacaccccattctgcctttagcatggtggaggaggattttcagcagaaactggaaagcgagaacgacctccaagagattcacactattcaagaatgtaaagaatgcgaccaggtgtttccagatctgcagagcctcgagaagcacatgctctctcatactgaagagcgggagtacaagtgtgaccagtgcccaaaagcattcaattggaaatccaacctcatacggcatcagatgtctcacgacagcggtaaacactatgagtgcgagaattgtgccaaggtgtttaccgatccaagcaacctgcaaaggcacataaggtctcagcacgtcggagcccgggcccacgcgtgtcccgagtgcggaaaaacgttcgcaaccagcagcggcctcaagcagcacaaacacatacacagctcagtgaagccctttatttgcgaagtctgccacaaaagctatacccagttctccaacctttgtcgacataaacgcatgcatgcagattgtaggacccagattaaatgtaaagattgcggccagatgttctcaacaacctcgtcattgaataagcatcgtagattctgcgagggaaaaaatcatttcgccgccggcggtttctttggccagggcatttccttgcccggtacccccgcaatggacaagacgagcatggtcaacatgagccacgccaatcccgggcttgctgactactttggcgcaaacagacacccagcaggccttacttttccgactgcccccggattctctttcagcttccccgggctctttccatcaggcctgtaccacagaccacccctgatccctgctagctctccggtgaaaggcctttcttctaccgagcagactaacaagtcgcagtcccccctcatgacacacccccagatcctgcctgcgacacaggatatcttaaaagcattgagcaagcatccttcggtcggcgacaacaagcccgtggaacttcagcccgaacggagctcagaggagcgtccctttgaaaaaatatctgaccagtccgaaagcagcgacctggatgacgtttccacgccaagtgggagtgatctggagactacctcaggctccgatctcgaaagcgacatcgagagtgacaaggaaaagtttaaggagaacggtaaaatgttcaaggacaaggtgtcccccctccagaatctggccagtatcaataacaagaaagaatatagcaaccactctattttttcaccatccctagaggagcaaacagccgtaagcggggccgtgaatgacagcatcaaagccatcgccagtattgccgagaagtattttggctctactggactcgtgggcctgcaggataaaaaggtgggggcattgccttaccctagcatgtttccattgccctttttcccagccttctcccaaagcatgtacccttttcctgaccgagatcttagaagcctgccactcaagatggagccccagtcacccggcgaggtgaagaagttgcagaaaggctcctccgaatcacccttcgatctgacaacgaagcgtaaggacgaaaaaccactcactcccgtaccgtcaaagccacccgttaccccagccacaagccaggatcagcccctcgacttatccatgggatctcgtagtcgggcaagcggaactaaacttacagaaccacgtaagaatcacgtcttcggcggcaagaagggctccaatgttgaatctagacctgcttctgatggaagcctgcagcacgcgagacccaccccttttttcatggaccccatttatagggtggagaagcgtaaattgaccgatccactcgaggctctaaaagagaagtacctgcgacctagccctggcttcctgttccatccacaatttcagctgcccgaccagaggacctggatgtctgccatcgaaaatatggccgaaaaattggaatcattctccgcgctcaagcccgaggcatcggaactcctgcagagtgtccctagtatgtttaatttcagagccccacctaacgccctgccggaaaatctcctgaggaaggggaaagagcgttacacctgcaggtactgtggaaagatattccctaggagcgccaatttaaccaggcacttacggactcacactggtgagcagccttaccgatgtaaatactgcgatagatcattcagtattagctccaacctgcagagacacgttagaaacattcataacaaagagaaacccttcaaatgtcatctgtgtgataggtgttttggacaacagaccaacttggaccgccatctaaagaagcatgaaaacggcaacatgtcgggaacggctacctcctccccacatagtgagttggaatccacgggggccatcttagatgataaggaggatgcttatttcactgagatcagaaacttcatcggcaacagcaaccacggttctcaaagcccaagaaacgtcgaggaaagaatgaacgggagccactttaaagatgaaaaggctttggtgacgtctcagaatagtgaccttttggacgacgaggaggtggaggacgaggtgctccttgatgaagaggatgaggacaatgacatcactggtaagacagggaaagaacccgtaacttcgaatctgcatgagggtaatcctgaagatgattatgaagaaacctcggcactagagatgagttgtaagacttcacctgtgcgatataaggaggaggaatacaaatccggactgagcgcgttagatcatattagacatttcacagattctttgaagatgcggaagatggaggataaccagtatagcgaagcggagctgagttctttttcaacaagccacgttccagaagagctcaaacagcccctgcaccggaaatcaaagtcccaagcctacgctatgatgctgagcctctctgacaaggagtccctccattccactagccacagcagtagtaacgtgtggcatagcatggcacgcgctgccgctgaatcgagcgccattcagtcaatcagtcacgtctag

SEQ ID NO: 81926 - DNA, 3156 bp, Artificial Sequence
  derived and/or modified sequence
atgaagtcggaggattacccacacgagacaatggcccctgatatccatgaggagaggcaatacagatgtgaagattgtgaccagttatttgagagcaaggccgaattggcagaccatcagaagtttccttgtagcactccccacagcgcttttagcatggtcgaagaagacttccagcaaaaactggaatccgagaacgatcttcaagagattcataccatccaggagtgcaaagagtgcgaccaggtttttcctgacctgcagtcacttgagaaacacatgctgtcccacacagaggaacgcgaatacaagtgtgatcaatgccctaaggcttttaattggaagtccaacctcatcaggcaccagatgagccacgactctggcaagcactatgagtgtgagaactgtgcgaaggtatttactgacccctccaacctgcagcggcacattagatcacagcatgtaggcgcaagggcccatgcctgtcctgaatgcgggaaaacttttgcaactagcagcggtcttaagcaacacaagcatatccactccagtgtgaaaccattcatctgtgaagtgtgccataagtcctatactcagttctctaacctgtgccgccacaaacggatgcatgctgactgccgcacccaaatcaaatgcaaagattgtggacagatgttctccactaccagttctctgaataagcatagaagattttgcgagggtaagaatcactttgccgccggcgggtttttcgggcagggcatctccctgcctggaactccagcaatggacaagacatccatggtgaacatgtctcatgccaatccaggcttggctgactacttcggcgcaaacaggcacccagcaggactgacattccctaccgctcccggattttctttttctttccccgggctgttccccagcgggctctaccatcgtcccccactcatccccgcgtctagcccagtgaaagggctgtcttcaacggaacagaccaacaagagtcagtcacctttaatgacccacccacagatcctcccggcaacccaggatattctgaaggctctgtcaaagcacccaagcgttggggataataagcccgtggagttgcaacctgagcgaagctcagaggaacgccctttcgagaaaatctcagaccagagcgaaagtagcgacctcgatgatgtctcaaccccaagtgggtccgatctggaaactacctccggcagtgacttggagtccgatattgagtctgataaagagaaatttaaggagaacgggaaaatgttcaaagacaaggtgagtcctctccaaaatctagcttctatcaataataaaaaagagtattccaaccactctattttcagtcctagcctcgaggaacagactgccgtctccggcgccgtcaatgattcgatcaaagcaatcgcgagcatcgcagagaaatatttcggaagcaccgggcttgtggggctgcaagataaaaaagtcggcgctctgccttatccctcaatgttcccgctgccattcttcccagccttcagccagagcatgtacccctttcccgatagagacctgaggtctctgcccctgaaaatggagccccagtcacccggggaggtaaagaagttacaaaaggggtcctcagaaagcccgttcgacctgacgaccaaacgcaaggatgaaaaacctctgacacccgtgcccagtaagccacctgtcactcccgccaccagtcaagatcagccccttgatctgagtatgggcagtaggtctagagcctctggtaccaagctcacagagccgagaaaaaatcacgtgtttggaggtaagaagggttctaatgtggaatctcgccccgcaagcgacgggagcctgcagcatgcacggcccacgcccttctttatggaccctatttaccgtgtcgaaaaacggaagctaacggacccacttgaggccctcaaagagaagtatctgcgaccgtcccctggatttctattccatccccagttccaattacctgaccagagaacctggatgtcagctattgaaaatatggctgaaaagctggagtccttcagtgctcttaagcctgaagcaagcgaactgctgcagtcagtgccgagcatgttcaacttccgggcaccaccgaatgcattaccagagaatctgctgcggaagggtaaggagcggtatacatgtagatactgtggcaaaatctttcccaggtctgccaacctcactagacacttgagaacgcataccggcgaacagccctaccggtgtaagtattgcgatcgtagtttttcaatctcatcaaatctccagcgacatgtaagaaatatccacaacaaggaaaaacctttcaagtgtcatctatgtgacagatgtttcggacagcagactaatctggacagacatctcaagaaacacgaaaacggaaatatgtccggcaccgccacctcaagccctcattccgaactagagtcaacgggagccatcctggacgataaggaggacgcctatttcaccgagatccggaattttattggcaattctaaccatggatcccagtctcccagaaacgtagaggaaaggatgaatgggagccacttcaaggacgaaaaggctttagttacatcgcagaattctgatcttctggatgatgaagaagtggaagacgaggtgctccttgatgaggaagatgaggacaatgatataaccggaaaaacggggaaggaaccagtcacctctaacctgcacgaagggaaccctgaggacgactacgaagaaacttccgcactggaaatgtcctgtaaaacatcccccgttagatataaggaggaagagtacaagagcggactatccgctctcgatcacatccggcacttcaccgacagcttgaagatgcgcaaaatggaggataaccagtatagcgaagccgaactgagttccttctctacgtcccacgtccctgaggaacttaaacagccactgcatagaaaatctaagagccaagcctacgctatgatgcttagcctgagcgataaggaatcactgcacagcacgagtcactcttctagtaacgtctggcattcaatggctagagccgcagcagaaagcagtgccatccagtctataagccacgtctag

SEQ ID NO: 81927 - DNA, 3156 bp, Artificial Sequence
  derived and/or modified sequence
atgaagtctgaggactacccccatgagaccatggccccagacatccacgaggagcggcagtaccgctgtgaggactgtgaccagctgtttgagagcaaggccgagctggccgaccaccagaagttcccctgcagcaccccccacagcgccttctccatggtggaggaggacttccagcagaagctggagagtgaaaatgacctgcaggagatccacaccatccaggagtgcaaggaatgtgaccaggtgtttcctgacctgcagagcctggagaagcacatgctgagccacacagaggagcgggagtacaagtgtgaccagtgccccaaggccttcaactggaagagcaacctgatccgccaccagatgagccatgattctgggaagcactatgaatgtgagaactgtgccaaggtgttcacagaccccagcaacctgcagaggcacatccgcagccagcacgtgggcgcccgggcccacgcctgcccagaatgtgggaagacctttgccaccagcagcggcctgaagcagcacaagcacatccacagctctgtgaagcccttcatctgtgaggtgtgccacaagagctacacccagttcagcaacctgtgccgccacaagaggatgcatgctgactgcaggacccagatcaagtgcaaggactgtggccagatgttcagcaccaccagcagcctgaacaagcaccggcgcttctgtgagggcaagaaccactttgctgctgggggcttcttcggccagggcatcagcctgcccggcaccccagccatggacaagacctccatggtgaacatgagccacgccaaccctggcctggccgactactttggagccaacagacaccctgctggcctgaccttccccacagcccctggcttctccttctccttccctggcctcttccccagcggcctgtaccacaggcctcctctcatcccagccagcagccctgtgaagggcctgagcagcacagagcagaccaacaagagccagagccccctgatgacccacccccagatcctgcctgccacccaggacatcctgaaggccctgagcaagcaccccagcgtgggggacaacaagcctgtggagctgcagcctgagaggagcagcgaggagcggccctttgagaagatcagtgaccagagcgagagcagtgacctggatgatgtgtccaccccatctggcagtgacctggagaccaccagcggcagtgacctggagagtgacattgaaagtgacaaggagaagttcaaggaaaatggcaagatgttcaaggacaaggtgagccccctgcagaacctggccagcatcaacaacaagaaggagtacagcaaccacagcatcttcagccccagcctggaggagcagacagctgtgtctggagctgtgaatgacagcatcaaggccatcgccagcattgctgagaagtacttcggcagcacaggcctggtgggcctgcaggacaagaaggtgggcgccctgccctaccccagcatgttccccctgcccttcttccctgccttcagccagagcatgtaccccttcccagaccgggacctgcggagcctgcccctgaagatggagccccagagccctggagaggtgaagaagctgcagaagggcagcagcgagagcccctttgacctgaccaccaagaggaaggatgagaagcccctgacccctgtgcccagcaagccccctgtgaccccagccaccagccaggaccagcccctggacctgtccatgggcagccgcagccgggccagcggcaccaagctgacagagcccaggaagaaccacgtgtttggaggcaagaagggcagcaatgtggagagcaggcctgccagtgatggcagcctgcagcacgcccggcccacccccttcttcatggaccccatctacagagtggagaagaggaagctgacagaccccctggaggccctgaaggagaagtacctgcggcccagccctggcttcctgttccacccccagttccagctgcctgaccagaggacctggatgtctgccatcgagaacatggccgagaagctggagagcttcagcgccctgaagccagaggccagcgagctgctgcagagcgtgcccagcatgttcaacttccgggcccccccaaatgccctgcctgagaacctgctgaggaagggcaaggagcgctacacctgccgctactgtgggaagatcttccccaggtctgccaacctgaccaggcacctgcggacccacactggagagcagccctaccgctgcaagtactgtgaccgctccttcagcatcagcagcaacctgcagagacatgtgaggaacatccacaacaaggagaagcccttcaagtgccacctgtgtgaccgctgcttcggccagcagaccaacctggacagacacctgaagaagcatgaaaatggaaacatgagcggcacagccaccagcagcccccacagcgagctggagagcactggagccatcctggatgacaaggaggatgcctacttcacagagatccggaacttcatcggcaacagcaaccacggcagccagagccccagaaatgtggaggagaggatgaatggcagccacttcaaggatgagaaggccctggtgaccagccagaacagcgacctgctggatgatgaggaggtggaggatgaggtgctgctggatgaggaggatgaggacaatgacatcaccgggaagacaggcaaggagcctgtgaccagcaacctgcacgagggcaacccagaagatgattatgaggagaccagcgccctggagatgagctgcaagaccagccctgtgcgctacaaggaggaggagtacaagagcggcctgagcgccctggaccacatccgccacttcacagacagcctgaagatgaggaagatggaggacaaccagtacagcgaggccgagctgagcagcttcagcaccagccacgtgcctgaggagctgaagcagcccctgcacaggaagagcaagagccaggcctatgccatgatgctgagcctgagtgacaaggagagcctgcacagcaccagccacagcagcagcaatgtgtggcacagcatggcccgggctgctgctgagagcagcgccatccagagcatcagccacgtgtag

SEQ ID NO: 81928 - DNA, 3156 bp, Artificial Sequence
  derived and/or modified sequence
atgaagagcgaggactacccccacgagaccatggcccccgacatccatgaggaacgtcagtacaggtgcgaggactgcgaccagctgtttgaatctaaggcagaactagcggatcaccagaagttcccatgctctaccccacactcggccttctccatggtggaggaggacttccagcaaaagttggagtcggagaacgacttacaggagatccataccattcaagaatgtaaggaatgcgaccaggtcttcccggatttgcagtcgctggagaaacatatgttatctcacaccgaagagagggagtataagtgcgaccagtgtccaaaagcctttaattggaagtccaacttgattcggcatcagatgtcccacgattccggaaagcattacgaatgcgagaattgtgccaaggtgtttacggacccaagcaaccttcagcgacacattcggtctcagcatgttggagccagggcccacgcgtgccctgagtgcggcaagacttttgctacttccagtggcctgaaacaacacaaacacatacactcaagcgtgaaaccatttatttgcgaagtgtgccataaatcctacacacagttctccaatctgtgtcgccataagaggatgcacgccgactgtaggactcagatcaaatgcaaggactgcggccaaatgtttagtaccacttcttcccttaataagcacagaagattttgtgagggtaagaaccacttcgccgccggaggattcttcggccaagggatctccttaccaggcacacctgcaatggacaaaacaagcatggtgaacatgagtcacgccaatcctgggctcgcggactacttcggagctaataggcaccccgcaggccttacatttcctactgccccggggttcagttttagctttccaggcttgttcccatccggcctctatcaccgtccaccccttataccagcatcatctcccgtgaagggactgtcatcaaccgagcaaaccaacaagtcccagagccccctgatgactcatcctcagatcctgccagctacacaggatatattgaaggccctttcaaaacacccctccgtgggggataacaaacctgttgaattgcagcctgaaagatccagcgaggaaaggccatttgagaagatcagcgaccagtcagaaagtagcgatctagacgatgtatctacccccagtggctccgatctcgaaacgacatcaggtagcgacctggaaagcgatatcgaatcggacaaagagaaatttaaggagaatgggaagatgtttaaggataaagtcagtccgctccagaacctcgcttccatcaacaacaaaaaagagtacagcaaccacagtatcttcagcccgagtctggaggaacagaccgctgtgtctggggccgtgaacgactccatcaaggcgattgccagcatcgctgagaagtactttggcagtactggactggttggccttcaggataagaaggtgggcgctttgccgtacccgtcaatgttccccctgccgtttttccccgcattctcacagagtatgtacccattcccagatagggacctccgctctctgccacttaaaatggagccccaatcccccggggaggtgaagaagctccagaaaggtagttctgagtcaccattcgatttaactacgaagcgtaaagatgaaaagcctctcacccccgtcccttctaaacctccagttactcccgccacttcgcaagatcagcctctggatctttcaatgggaagtcgttccagggcaagtggcactaagctaactgagccacgcaagaaccatgtttttggtggcaaaaaaggaagtaacgtggagtcccgcccagcctcagacggatctttacagcacgcccggccgaccccgttttttatggatcccatctatcgcgtggaaaaaagaaagctaaccgatcccctggaggccctgaaggaaaaatacctgagaccatcacctgggttcctgtttcacccgcagtttcagcttcccgatcagcgtacttggatgagcgctattgaaaatatggccgaaaaacttgaatctttttccgccctgaagccagaagcatcggagctcctgcaatctgtgcccagtatgttcaatttccgtgccccccccaatgccctgcccgaaaacctcctccggaaaggaaaggagcgatacacctgtagatactgcgggaaaatcttccccagaagcgcaaatttgactcggcacctccgcacacatactggggagcagccatacagatgtaagtactgtgatcggtctttcagcattagcagcaacctccagagacacgtgagaaacatacacaataaggagaaacccttcaaatgtcacctgtgtgatcgttgttttggacagcagaccaatctcgatcgccaccttaaaaagcacgaaaacgggaatatgtccggcaccgccacctcgtcccctcattctgagctcgagtcaacaggggcgattcttgatgacaaggaggacgcttacttcaccgagattagaaattttataggcaattctaaccatggctcccaaagcccaagaaatgtggaagaacggatgaacggatcccactttaaagacgaaaaggctctcgtcactagccagaactccgatctgttggatgacgaggaggtggaggacgaggttctgctggacgaggaggacgaggacaatgacatcacagggaagactggcaaagaacccgtgaccagcaatttgcacgagggcaacccagaggatgactacgaggagacatcagcactagagatgtcctgtaagacctcacctgtgcgttataaagaagaggagtacaagtcagggctgagtgccctcgaccacattcgacattttaccgattctctgaaaatgcgcaaaatggaagacaaccagtatagcgaagccgagctgagcagcttcagcaccagtcacgtgccagaggagttgaagcagccgctgcatcggaagagcaagtctcaagcatatgccatgatgttgagtctatccgacaaagagtcgctgcacagcacaagccactcctctagtaatgtgtggcatagcatggctagagccgccgcggagagctcggctatccaaagcatttcccacgtctag

SEQ ID NO: 81929 - DNA, 3156 bp, Artificial Sequence
  derived and/or modified sequence
atgaagagcgaggactacccccacgagaccatggcccccgacatccacgaggaaagacagtatcggtgtgaagactgcgatcagttgtttgagtccaaggctgaattagccgaccaccagaaatttccgtgttccacaccacattcggcattctccatggtagaggaagacttccagcagaaactggaatccgagaacgatttacaggagatacacacaatccaagagtgtaaagagtgtgaccaggtgttcccggatctccagagccttgagaagcatatgctgtcacacactgaggaaagagaatacaagtgcgatcagtgccccaaggcctttaactggaagtcaaacctgattcgccaccagatgtcacacgattcagggaaacactacgagtgcgagaattgcgcaaaggtttttactgaccctagcaatttgcagcggcacattcgttcccagcacgtgggagctagagctcatgcttgccccgaatgcggtaagacatttgcaaccagctctggattaaaacagcataaacacatacatagctccgtaaagccttttatttgtgaggtttgccacaaatcttacacgcagttcagcaatctgtgtagacataagcgtatgcacgcagactgccgcacccaaataaaatgtaaggactgcggacaaatgtttagtactacttcctccctcaacaagcaccgccgcttttgcgaggggaagaaccactttgccgccggagggttctttggacagggcatcagcctccccggcacccccgctatggataagactagcatggtgaatatgtctcacgctaaccccgggcttgcggactatttcggggcaaaccgccatcccgccgggctcacgtttcctacagcaccagggtttagttttagctttccaggactgtttccatcgggactgtaccatcgccctcctctgatccccgcctctagccctgtgaaaggcctgtccagcaccgagcagaccaacaaatcacagtccccactcatgactcacccccagatattgcctgctacccaggacatcttgaaggctttgtcaaagcaccccagcgtaggagataataaaccggtagagctacagcccgagcgtagttcagaggaacggcccttcgaaaagattagtgatcagtcggaatccagtgatctggacgacgtcagcactcccagcgggtcggacttggaaaccacttcaggatcggatctagaaagtgatatcgaaagcgacaaggagaagtttaaagagaacggtaagatgtttaaagacaaagtcagcccactacagaacctcgcctcaattaacaacaagaaggaatattccaaccacagcatcttctcacctagtttggaggagcaaaccgcagtgagcggcgctgttaatgattcgataaaggctattgctagtatcgccgaaaagtacttcggcagtaccggactggtgggattacaggacaaaaaagtgggagccctgccatacccctccatgtttccattgccttttttccccgcattttcccagagcatgtatcctttccccgaccgcgacttgcggagtctgccactgaaaatggaaccccaatcccctggagaggtgaagaaactgcaaaagggctcaagcgagtctccatttgacctaacaactaagagaaaggacgaaaagcctctgacgcctgtaccctcaaagccccccgtgacccccgctacatctcaggatcagccccttgacctgagcatgggaagccggagccgcgcttcagggacgaagttgaccgagccccggaagaatcacgtgtttggcggaaagaaggggtccaatgtggagagtcgccctgctagtgacggctccttacagcacgcccgtcccacgccttttttcatggacccaatttaccgggttgagaaaaggaaactcacggatcctcttgaagctcttaaggagaaatacctcaggccatcacctggctttctgtttcatccgcagttccagctccccgaccagaggacatggatgtctgcaattgagaacatggcggaaaagctggaatctttcagcgcacttaaacctgaggcttccgagctgctgcagtccgtgccatcaatgtttaactttcgggctccacccaatgcccttcctgagaacctgctgcgcaagggtaaagagcgctacacatgtcgctactgtggaaaaatcttcccgcgtagtgccaatctgactcgccacctgcgcacccacaccggagaacaaccctacagatgtaagtactgcgatcgctctttctcaatctcttcaaacctccaaaggcatgtcagaaatattcacaacaaggaaaagccttttaaatgccacctgtgtgatcgctgttttggccagcaaaccaatctcgaccgccacctgaagaaacatgaaaatggcaatatgtccggtacagccacatcgagtccacactccgaactggaaagcacgggcgctatcctggacgataaggaggacgcttattttacagagattcgcaacttcataggaaacagtaatcacggatcccagagccctcgcaatgtagaggaaaggatgaatggttctcactttaaggatgagaaggctctggtaacatctcagaactccgacttactggacgacgaggaggtcgaggatgaggtgctcctggacgaggaggacgaggacaacgatatcacaggaaagactgggaaagagcccgtcacctccaaccttcatgaggggaaccccgaggatgactatgaagagaccagcgcactcgaaatgtcctgtaagacgagccccgtaagatacaaggaagaggaatacaagagcgggctgtctgctctggaccatatcaggcattttaccgactccctcaaaatgcgcaagatggaggacaaccagtacagcgaagccgagttaagcagtttcagcactagccatgtgcccgaagaacttaaacagcccctccacagaaagagtaaatctcaggcctacgccatgatgctttctctttccgataaggaatccctccatagcactagccattcgagtagcaacgtgtggcattctatggccagagccgctgctgaaagcagtgctattcaatccatatctcatgtctag

SEQ ID NO: 81930 - DNA, 3156 bp, Artificial Sequence
  derived and/or modified sequence
atgaagtcagaggattatccccatgaaaccatggctcctgacattcacgaggagaggcagtacaggtgtgaagattgcgaccagctgtttgagagcaaggctgaattggcagatcatcaaaagttcccctgttctaccccccattcagcattctccatggtagaggaggattttcaacagaagctagagtcagagaacgatctgcaggagattcacaccatccaggaatgtaaagagtgcgatcaggtctttccggacttgcagagtctggaaaagcatatgctgtctcatactgaggaacgtgaatataaatgcgaccagtgtcctaaggcgtttaattggaaatcaaacctcattagacatcaaatgtctcatgattctggcaaacattatgaatgtgagaattgtgccaaggtttttacagacccctcaaatcttcagagacatatccgttctcagcacgtgggggcacgcgctcacgcttgccctgagtgtgggaaaacattcgcgacctcttccggtctcaaacagcacaagcacatccactcgagtgtgaaacccttcatctgcgaggtctgtcacaaatcttatacgcagttctctaatctgtgcaggcataagaggatgcatgctgattgtagaactcagatcaagtgcaaagattgtggccagatgttttcgacaacctcctcactgaataaacaccgcaggttctgtgagggtaagaaccactttgccgctggagggttctttggtcagggaatttctttaccaggcactcccgcaatggacaagacatcgatggtaaacatgtcccacgcgaatcctgggctggccgactattttggagctaatcgacatccagccggactcaccttcccaacagctcccggtttttctttttccttccccggattattccccagcgggctgtaccatcgacctcctctgatccctgcttcatctcctgttaagggtctcagtagcaccgagcagaccaataaatcacaatcccctcttatgacgcaccctcaaattctgccagccacacaggatatactgaaggcacttagcaaacacccgtccgttggcgacaacaaaccagttgagttgcagccagagagatcaagcgaggaacgaccatttgagaaaatctctgaccaatctgaatcttctgatctcgacgacgttagcaccccatcagggagcgaccttgaaacaacgtcaggctccgatctggaatcggacatcgaaagcgacaaggagaaattcaaggagaatggaaaaatgtttaaagataaagtgagcccgctgcagaacctggcctccatcaacaataagaaggagtactcgaatcactcaattttcagcccctctctagaggagcagacagcggtcagcggagccgtgaacgattccataaaagctattgcctctatagctgagaagtactttggttcaacggggcttgtcggacttcaggataaaaaagttggggcactgccctaccccagcatgtttcctctccctttctttcccgcattctctcagtctatgtacccattcccggacagggacctaagaagcctgcctcttaaaatggaaccccagtccccgggagaggtgaaaaaattgcaaaaaggcagcagcgagtctccctttgatctgacaaccaaaagaaaggatgagaaaccgctcaccccagtccccagtaaacctcccgtcacgcctgctacatctcaggaccaaccactcgatctgagtatgggaagcaggtcccgggcatcaggtacaaagttgacagaaccgagaaaaaatcacgtgttcggcggaaagaagggatccaacgtggagtcaagacctgcatctgacgggtccctacagcacgccaggccaactcccttttttatggaccctatctatcgggtcgagaaaagaaagctcacagaccccctggaggccctcaaggagaaatatctccggccaagcccaggattcctgttccacccgcagttccagttgcccgaccaacgaacttggatgtcagcgattgaaaacatggctgagaaactggagtcctttagtgcactgaagccagaagcctctgagctgctccagtccgtaccatctatgttcaactttagggctcctcccaatgccctgcccgaaaatttgctaaggaagggaaaggaaagatacacttgtagatattgtggaaaaatcttccctcgcagcgcgaatcttactaggcatctgcgaacacatactggcgagcagccttaccgatgtaaatactgcgatcggtcatttagcataagcagtaacctccagagacacgtacgaaacatccacaataaagagaagcctttcaaatgccacctgtgcgaccgctgctttggacagcagacaaatctggaccgtcatcttaaaaaacacgaaaatggtaacatgtcaggaaccgcaacatccagcccacatagtgaactggagtcgaccggtgccattttagatgataaagaggatgcctacttcactgaaatacgaaattttattggaaatagcaatcacggtagccagtcaccacggaacgtggaggaacgcatgaacggctcccactttaaggatgagaaagcactcgtgactagccagaattccgacctgttagatgatgaggaagtggaggatgaggtgctactggatgaggaggacgaagacaacgacatcaccgggaaaacaggcaaagaaccagttacttcaaacttacacgagggcaacccagaggacgactacgaggaaacaagtgcgctcgagatgagctgtaaaacttcccccgtgaggtataaagaggaggagtacaagtccggactgtctgcactcgatcatattagacacttcaccgactcgttaaaaatgcggaaaatggaagataatcagtatagcgaggcagaactgagttcttttagtacctcccacgtgcctgaagaactgaagcaaccccttcatcgaaagagcaaatcacaagcttacgcgatgatgcttagcctcagcgacaaagaaagcttacacagcacctcccatagcagtagcaacgtgtggcacagcatggcaagagctgccgctgagtcctctgccattcagagtatttcacatgtgtag

SEQ ID NO: 81931 - DNA, 3156 bp, Artificial Sequence
  derived and/or modified sequence
atgaaatcagaggactacccacatgaaacgatggccccagatattcacgaggagaggcagtaccgctgtgaggattgtgatcaactgttcgaatccaaagccgaattggcagaccaccagaagtttccgtgcagcacccctcactccgcgttttccatggtggaagaggactttcaacagaaacttgaatccgagaacgaccttcaagaaatccacacaatccaggaatgtaaagagtgcgatcaggttttccccgacctgcaaagcctggagaaacacatgttgtcccacactgaggagcgcgagtataagtgtgaccagtgccccaaggcgttcaactggaagtcaaacctcattcgccaccagatgagccacgatagtggaaaacactatgaatgcgagaactgcgccaaagtattcactgacccttccaatcttcagcggcacattaggtcacagcacgttggtgcccgagctcacgcgtgtcctgagtgcgggaagacgtttgctacctcttctggcctgaaacagcataaacacatacactccagcgttaagccctttatttgtgaggtatgtcacaagagttacacacagttcagtaatttgtgtcgccacaaaaggatgcacgccgactgtcggacccagatcaagtgcaaagattgtggtcagatgtttagtacaacctcatcccttaacaagcatcgacgcttctgcgaaggcaagaaccacttcgctgctggaggcttctttggacagggcatatcccttcctggtacgcccgcaatggacaagaccagcatggtgaatatgtctcacgctaatccaggcctagccgactactttggggcaaaccgacatcctgcgggtctcacgtttcctacagccccaggattcagtttcagcttcccaggtctcttcccttctggactataccaccgtccaccacttatccctgcttcatcccccgtgaaaggactgagctccacggagcagaccaataagtcccagagtccgctgatgacacatccccagattctgccggctacccaggacatactgaaagccttgtctaagcacccaagcgtcggtgacaataaacccgtagagttgcagccagagcggtcaagcgaggaaaggccatttgagaagatctcagaccagtcagagtccagtgatttagatgatgtgagcactccttcaggctctgacctggaaacgacatccggatctgatctggaatctgatatcgaatccgacaaggagaagtttaaagagaacggaaagatgttcaaggacaaggtgtcaccccttcagaatctggcttcaatcaataacaaaaaggagtactccaatcattctatattttccccgtcactcgaggaacagacagccgtgtccggcgctgtgaacgactccatcaaggcgatcgcctctatcgccgagaagtatttcggaagcaccggtctggtcgggcttcaagataagaaagtcggggctctaccctaccccagcatgttcccgcttccgttcttcccggctttctctcaatctatgtacccgttccctgacagagacttgaggtcactgccacttaaaatggaaccacagtcaccaggcgaagttaaaaaattacagaagggctcaagcgagtcacccttcgatctgactaccaaacggaaagacgaaaagccactgacgccagttcctagcaagcctcctgttacaccagcaacctcccaggatcagccccttgacctctcaatggggtcgaggtcgcgcgcaagcggcacaaagcttacagagcctcgcaaaaatcacgttttcggtggaaaaaaaggtagcaatgtcgagagtcgtccggcttctgacggctccttgcagcacgcacgtccgactccgttcttcatggacccaatttatcgggtggaaaaacgcaaactcactgatccactagaggccctcaaagagaagtatctgagaccttcacctggctttctgttccatccccaattccaactaccagatcagcgcacttggatgtccgccatcgagaacatggctgagaagcttgaaagtttttcagccctgaagccagaagcttcggaactgttgcaatctgtcccctccatgtttaatttccgcgctccccctaatgcgctacccgaaaatctccttcgcaagggaaaggagcggtacacatgccgctattgcgggaaaatattcccgaggtctgcgaatctgaccaggcacttacgcacccacacaggagaacaaccctatcggtgcaagtactgcgacaggtctttctccatttcaagcaatctgcagaggcacgtcaggaacattcataataaagaaaaaccctttaagtgtcacctatgtgatcgatgctttgggcagcaaacgaacctcgatcgccacctcaaaaagcatgagaacgggaatatgagcggtacggccacctcttccccccactcggagttagaaagcaccggggcaatcctggatgacaaggaagatgcatattttactgagatccgcaacttcattggaaactcaaaccatgggtcccagagcccaaggaacgtggaggaacgcatgaacgggtcacactttaaagacgaaaaggccctggttacgagtcagaacagtgatctcttagacgatgaggaggttgaggatgaagttctgctggacgaagaggatgaagataacgacattactggaaaaaccggtaaggaaccggttaccagcaaccttcacgagggtaaccccgaggatgattatgaagagacgagcgctctcgaaatgtcttgtaaaacatcacccgttagatataaagaggaagagtataagagtggattgtccgccctcgatcacatccgccacttcaccgatagcctcaagatgagaaaaatggaggataatcagtattcagaagcagagctgtctagctttagcacctcccacgtgcccgaggaactcaagcagcctctccaccgtaagagtaagtctcaagcctacgcgatgatgctgtctctatcagacaaggagtccctgcacagcacaagccattcatcctccaatgtctggcactccatggcccgtgcagcggcagaatcatcagccatacagtccatctcacatgtgtag

SEQ ID NO: 81932 - DNA, 3156 bp, Artificial Sequence
  derived and/or modified sequence
atgaagagcgaggactacccccacgagaccatggcccccgacatccacgaggagagacagtacagatgcgaggactgcgaccagctgttcgagagcaaggccgagctggccgaccaccagaagttcccctgcagcaccccccacagcgccttcagcatggtggaggaggacttccagcagaagctggagagcgagaacgacctgcaggagatccacaccatccaggagtgcaaggagtgcgaccaggtgttccccgacctgcagagcctggagaagcacatgctgagccacaccgaggagagagagtacaagtgcgaccagtgccccaaggccttcaactggaagagcaacctgatcagacaccagatgagccacgacagcggcaagcactacgagtgcgagaactgcgccaaggtgttcaccgaccccagcaacctgcagagacacatcagaagccagcacgtgggcgccagagcccacgcctgccccgagtgcggcaagaccttcgccaccagcagcggcctgaagcagcacaagcacatccacagcagcgtgaagcccttcatctgcgaggtgtgccacaagagctacacccagttcagcaacctgtgcagacacaagagaatgcacgccgactgcagaacccagatcaagtgcaaggactgcggccagatgttcagcaccaccagcagcctgaacaagcacagaagattctgcgagggcaagaaccacttcgccgccggcggcttcttcggccagggcatcagcctgcccggcacccccgccatggacaagaccagcatggtgaacatgagccacgccaaccccggcctggccgactacttcggcgccaacagacaccccgccggcctgaccttccccaccgcccccggcttcagcttcagcttccccggcctgttccccagcggcctgtaccacagaccccccctgatccccgccagcagccccgtgaagggcctgagcagcaccgagcagaccaacaagagccagagccccctgatgacccacccccagatcctgcccgccacccaggacatcctgaaggccctgagcaagcaccccagcgtgggcgacaacaagcccgtggagctgcagcccgagagaagcagcgaggagagacccttcgagaagatcagcgaccagagcgagagcagcgacctggacgacgtgagcacccccagcggcagcgacctggagaccaccagcggcagcgacctggagagcgacatcgagagcgacaaggagaagttcaaggagaacggcaagatgttcaaggacaaggtgagccccctgcagaacctggccagcatcaacaacaagaaggagtacagcaaccacagcatcttcagccccagcctggaggagcagaccgccgtgagcggcgccgtgaacgacagcatcaaggccatcgccagcatcgccgagaagtacttcggcagcaccggcctggtgggcctgcaggacaagaaggtgggcgccctgccctaccccagcatgttccccctgcccttcttccccgccttcagccagagcatgtaccccttccccgacagagacctgagaagcctgcccctgaagatggagccccagagccccggcgaggtgaagaagctgcagaagggcagcagcgagagccccttcgacctgaccaccaagagaaaggacgagaagcccctgacccccgtgcccagcaagccccccgtgacccccgccaccagccaggaccagcccctggacctgagcatgggcagcagaagcagagccagcggcaccaagctgaccgagcccagaaagaaccacgtgttcggcggcaagaagggcagcaacgtggagagcagacccgccagcgacggcagcctgcagcacgccagacccacccccttcttcatggaccccatctacagagtggagaagagaaagctgaccgaccccctggaggccctgaaggagaagtacctgagacccagccccggcttcctgttccacccccagttccagctgcccgaccagagaacctggatgagcgccatcgagaacatggccgagaagctggagagcttcagcgccctgaagcccgaggccagcgagctgctgcagagcgtgcccagcatgttcaacttcagagccccccccaacgccctgcccgagaacctgctgagaaagggcaaggagagatacacctgcagatactgcggcaagatcttccccagaagcgccaacctgaccagacacctgagaacccacaccggcgagcagccctacagatgcaagtactgcgacagaagcttcagcatcagcagcaacctgcagagacacgtgagaaacatccacaacaaggagaagcccttcaagtgccacctgtgcgacagatgcttcggccagcagaccaacctggacagacacctgaagaagcacgagaacggcaacatgagcggcaccgccaccagcagcccccacagcgagctggagagcaccggcgccatcctggacgacaaggaggacgcctacttcaccgagatcagaaacttcatcggcaacagcaaccacggcagccagagccccagaaacgtggaggagagaatgaacggcagccacttcaaggacgagaaggccctggtgaccagccagaacagcgacctgctggacgacgaggaggtggaggacgaggtgctgctggacgaggaggacgaggacaacgacatcaccggcaagaccggcaaggagcccgtgaccagcaacctgcacgagggcaaccccgaggacgactacgaggagaccagcgccctggagatgagctgcaagaccagccccgtgagatacaaggaggaggagtacaagagcggcctgagcgccctggaccacatcagacacttcaccgacagcctgaagatgagaaagatggaggacaaccagtacagcgaggccgagctgagcagcttcagcaccagccacgtgcccgaggagctgaagcagcccctgcacagaaagagcaagagccaggcctacgccatgatgctgagcctgagcgacaaggagagcctgcacagcaccagccacagcagcagcaacgtgtggcacagcatggccagagccgccgccgagagcagcgccatccagagcatcagccacgtgtag

SEQ ID NO: 81933 - protein, 489 aa, Artificial Sequence
  derived and/or modified sequence
MVPSSPAVEKQVPVEPGPDPELRSWRHLVCYLCFYGFMAQIRPGESFITPYLLGPDKNFTREQVTNEITPVLSYSYLAVLVPVFLLTDYLRYTPVLLLQGLSFVSVWLLLLLGHSVAHMQLMELFYSVTMAARIAYSSYIFSLVRPARYQRVAGYSRAAVLLGVFTSSVLGQLLVTVGRVSFSTLNYISLAFLTFSVVLALFLKRPKRSLFFNRDDRGRCETSASELERMNPGPGGKLGHALRVACGDSVLARMLRELGDSLRRPQLRLWSLWWVFNSAGYYLVVYYVHILWNEVDPTTNSARVYNGAADAASTLLGAITSFAAGFVKIRWARWSKLLIAGVTATQAGLVFLLAHTRHPSSIWLCYAAFVLFRGSYQFLVPIATFQIASSLSKELCALVFGVNTFFATIVKTIITFIVSDVRGLGLPVRKQNEELHVASLSLWKSHLRLAADTLSSEGSSGSGPRSWFLSPTLRAALHGPVCPSEVCPS

SEQ ID NO: 81934 - protein, 182 aa, Artificial Sequence
  derived and/or modified sequence
MVPSSPAVEKQVPVEPGPDPELRSWRHLVCYLCFYGFMAQIRPGESFITPYLLGPDKNFTREQVTNEITPVLSYSYLAVLVPVFLLTDYLRYTPVLLLQGLSFVSVWLLLLLGHSVAHMQLMELFYSVTMAARIAYSSYIFSLVRPARYQRVAGYSRAAVLLGVFTSSVLGQLLVTVGRVSF

SEQ ID NO: 81935 - protein, 154 aa, Artificial Sequence
  derived and/or modified sequence
MVPSSPAVEKQVPVEPGPDPELRSWRHLVCYLCFYGFMAQIRPGESFITPYLLGPDKNFTREQVTNEITPVLSYSYLAVLVPVFLLTDYLRYTPVLLLQGLSFVSVWLLLLLGHSVAHMQLMELFYSVTMAARIAYSSYIFSLVRPARYQRVAG

SEQ ID NO: 81936 - protein, 61 aa, Artificial Sequence
  derived and/or modified sequence
MVPSSPAVEKQVPVEPGPDPELRSWRHLVCYLCFYGFMAQIRPGESFITPYLLGPDKNFTR

SEQ ID NO: 81937 - DNA, 549 bp, Artificial Sequence
  derived and/or modified sequence
atggtgcccagcagccccgccgtggagaagcaggtgcccgtggagcccggccccgaccccgagctgagaagctggagacacctggtgtgctacctgtgcttctacggcttcatggcccagatcagacccggcgagagcttcatcaccccctacctgctgggccccgacaagaacttcaccagagagcaggtgaccaacgagatcacccccgtgctgagctacagctacctggccgtgctggtgcccgtgttcctgctgaccgactacctgagatacacccccgtgctgctgctgcagggcctgagcttcgtgagcgtgtggctgctgctgctgctgggccacagcgtggcccacatgcagctgatggagctgttctacagcgtgaccatggccgccagaatcgcctacagcagctacatcttcagcctggtgagacccgccagataccagagagtggccggctacagcagagccgccgtgctgctgggcgtgttcaccagcagcgtgctgggccagctgctggtgaccgtgggcagagtgagcttctag

SEQ ID NO: 81938 - DNA, 465 bp, Artificial Sequence
  derived and/or modified sequence
atggtgcccagcagccccgccgtggagaagcaggtgcccgtggagcccggccccgaccccgagctgagaagctggagacacctggtgtgctacctgtgcttctacggcttcatggcccagatcagacccggcgagagcttcatcaccccctacctgctgggccccgacaagaacttcaccagagagcaggtgaccaacgagatcacccccgtgctgagctacagctacctggccgtgctggtgcccgtgttcctgctgaccgactacctgagatacacccccgtgctgctgctgcagggcctgagcttcgtgagcgtgtggctgctgctgctgctgggccacagcgtggcccacatgcagctgatggagctgttctacagcgtgaccatggccgccagaatcgcctacagcagctacatcttcagcctggtgagacccgccagataccagagagtggccggctag

SEQ ID NO: 81939 - DNA, 186 bp, Artificial Sequence
  derived and/or modified sequence
atggtgcccagcagccccgccgtggagaagcaggtgcccgtggagcccggccccgaccccgagctgagaagctggagacacctggtgtgctacctgtgcttctacggcttcatggcccagatcagacccggcgagagcttcatcaccccctacctgctgggccccgacaagaacttcaccagatag

SEQ ID NO: 81940 - DNA, 549 bp, Artificial Sequence
  derived and/or modified sequence
atggtgcccagcagccccgctgttgagaagcaggtcccggtggagcccggtcctgaccccgaattaagatcctggcgccacttagtgtgctacctctgcttctatgggttcatggcccagatccggccaggggaatcctttatcacaccctacctcttgggcccggacaaaaatttcaccagggagcaggtgacgaatgagataacccccgtgctaagttacagttacctggctgtgctggtgcctgttttcctcctcacggactacctgaggtacacaccagtgcttttgttgcaaggcctttcttttgtctcggtatggttgcttttactcttaggacatagcgttgctcacatgcagctgatggaactgttttactcagtgaccatggctgcgcgtattgcttattcttcctacattttttccctggtgcggcccgccagataccagagggtggctggctatagtcgtgccgctgtcctgctaggggtctttacctcatcagtcctcggccaactcttggtgaccgtgggcagggtgagcttctag

SEQ ID NO: 81941 - DNA, 465 bp, Artificial Sequence
  derived and/or modified sequence
atggttccaagcagccctgctgtcgagaaacaagtccctgttgagcctggcccggacccagagctgcgctcctggaggcacctggtctgctacctgtgcttttacggctttatggcacagatcagacccggagagagtttcatcactccttacctgctgggacccgataagaatttcacacgggagcaagtgactaatgagattacccctgttctgagctacagttatctcgccgtgctggtgcccgtatttttgttgaccgattacctgagatacactcctgtgctgctgttgcaagggctcagctttgtttctgtgtggttgctgctgttgctgggacactccgttgcgcacatgcagttaatggagttgttctattctgtgactatggccgcaagaattgcatacagtagttacattttcagccttgtgcgtcccgctcggtaccaacgtgtagctggctag

SEQ ID NO: 81942 - DNA, 186 bp, Artificial Sequence
  derived and/or modified sequence
atggttccaagctcgcctgccgttgagaaacaggtgcccgttgagccaggccccgaccccgaactcaggagctggagacatctcgtttgctatctctgtttctatggattcatggcccagatacgccccggcgagagtttcataactccatacctgttaggcccagacaagaactttaccaggtag

SEQ ID NO: 81943 - DNA, 549 bp, Artificial Sequence
  derived and/or modified sequence
atggtgcccagcagccctgctgtggagaagcaggtgcctgtggagcccggccctgaccctgagctgcgctcctggaggcacctggtgtgctacctgtgcttctacggcttcatggcccagatccggcctggagagagcttcatcaccccctacctgctgggccctgacaagaacttcacccgggagcaggtgaccaatgagatcacccctgtgctgagctacagctacctggccgtgctggtgcctgtgttcctgctgacagactacctgcgctacacccctgtgctgctgctgcagggcctgagctttgtgtctgtgtggctgctgctgctgctgggccacagcgtggcccacatgcagctgatggagctgttctacagcgtgaccatggccgcccgcatcgcctacagcagctacatcttcagcctggtgcggcctgcccgctaccagagggtggccggctacagcagagctgctgtgctgctgggcgtcttcaccagctctgtgctgggccagctgctggtgacagtgggccgggtgtccttctag

SEQ ID NO: 81944 - DNA, 465 bp, Artificial Sequence
  derived and/or modified sequence
atggtgcccagcagccctgctgtggagaagcaggtgcctgtggagcccggccctgaccctgagctgcgctcctggaggcacctggtgtgctacctgtgcttctacggcttcatggcccagatccggcctggagagagcttcatcaccccctacctgctgggccctgacaagaacttcacccgggagcaggtgaccaatgagatcacccctgtgctgagctacagctacctggccgtgctggtgcctgtgttcctgctgacagactacctgcgctacacccctgtgctgctgctgcagggcctgagctttgtgtctgtgtggctgctgctgctgctgggccacagcgtggcccacatgcagctgatggagctgttctacagcgtgaccatggccgcccgcatcgcctacagcagctacatcttcagcctggtgcggcctgcccgctaccagagggtggccggctag

SEQ ID NO: 81945 - DNA, 186 bp, Artificial Sequence
  derived and/or modified sequence
atggtgcccagcagccctgctgtggagaagcaggtgcctgtggagcccggccctgaccctgagctgcgctcctggaggcacctggtgtgctacctgtgcttctacggcttcatggcccagatccggcctggagagagcttcatcaccccctacctgctgggccctgacaagaacttcaccaggtag

SEQ ID NO: 81946 - DNA, 549 bp, Artificial Sequence
  derived and/or modified sequence
atggtgcccagcagccccgccgtggagaagcaggtgcccgtggagcctggacccgatccagagctgaggagctggagacacctcgtgtgctacctgtgtttctacggcttcatggcacaaattcgcccgggagaaagcttcatcactccatacctgcttggacccgataagaactttacgcgggaacaggttaccaacgaaatcaccccagtgctgagttactcttatctggctgttcttgttcccgtgttcctcctgacggattacttgcgctacacgcctgtattgctgctgcagggattgagcttcgtcagtgtttggcttctgctgttgctgggccactctgtcgcccacatgcagctgatggagctgttctactctgtgacaatggcagctcgtattgcttattcatcatatatttttagccttgtgagacccgcacgctaccagagggtggctgggtactcccgggctgcggttctcctgggtgtgttcacatcgagcgttctcgggcaacttctggtgacagttgggagggtttctttttag

SEQ ID NO: 81947 - DNA, 465 bp, Artificial Sequence
  derived and/or modified sequence
atggtgcccagcagccccgccgtggagaagcaggtgcccgtggagcctggcccggaccccgagctgagaagttggagacatctcgtttgttacctgtgcttctacggatttatggctcaaattcggcccggcgagagctttatcaccccttacctgttaggcccagacaagaattttacacgagagcaagtgactaacgagataacacctgttctaagttactcttatctggcagtactggtacctgtgttcctcctgacggattacctgcgttataccccggtgttgctgctgcagggcctctcctttgttagtgtctggctgcttctactcttaggccattcggtggcccatatgcagctcatggagctgttctatagcgtgactatggccgcccgaatcgcgtattcatcatacatcttttctttggtgcggccagccaggtaccagcgagtcgctgggtag

SEQ ID NO: 81948 - DNA, 186 bp, Artificial Sequence
  derived and/or modified sequence
atggtgcccagcagccccgccgtggagaagcaggtgcccgtggagcccggacctgaccccgaactgcgcagctggaggcacctggtctgttatctctgcttctacggcttcatggcccagattcgacctggggagtcgtttatcactccatacctgcttggccccgacaaaaacttcacgcgctag

SEQ ID NO: 81949 - DNA, 549 bp, Artificial Sequence
  derived and/or modified sequence
atggtaccttctagccccgctgtggagaagcaggtcccagtggaacctggacctgacccggagctgcgctcctggcgccacctcgtctgttacctatgtttctatggcttcatggctcagatccggcctggcgaatctttcatcactccatatttgctgggacccgacaagaacttcacgagagagcaagtgacgaacgaaattacccctgtcctgagctatagctacctggccgtgctagtacccgtgtttttactgaccgattatcttaggtatacacctgtactcctgttacaaggcctgagctttgtatccgtgtggctgctgttgctgctgggccacagtgtggcacacatgcaacttatggagctgttctatagcgtgacaatggctgccaggatcgcctattctagctacattttctctttagtgcggcctgctaggtaccagcgcgttgccggatactcgagagcagctgtgcttctgggcgtgttcaccagcagcgtcctgggccagctgctggtaacggtagggcgtgtgtctttttag

SEQ ID NO: 81950 - DNA, 465 bp, Artificial Sequence
  derived and/or modified sequence
atggttcctagttcaccagccgtagaaaagcaggtcccggtggaacctggcccagatccggagctgagatcttggagacatttggtgtgttacctgtgtttttatgggttcatggctcagatacggcctggcgaaagctttatcacaccttatctattaggacctgacaaaaacttcactcgcgagcaagtgactaatgagattacacctgtgctgagttattcctacctggcggtgctggttccagtcttcctgctgacagattacctgaggtatacaccagttctgttgttgcagggcttgagctttgtgagcgtgtggcttctccttctgctggggcattctgtcgcacacatgcaactgatggagctgttttattccgtcaccatggccgctcggatagcttacagcagttatatcttcagtctggtcagacctgcacgctatcagagagtggccggttag

SEQ ID NO: 81951 - DNA, 186 bp, Artificial Sequence
  derived and/or modified sequence
atggtgcctagttcaccagccgtggagaagcaagtgccggtggagccagggccagaccctgaacttcgctcttggaggcacctggtgtgctatttatgcttttacggcttcatggcccagatcaggccaggagaatctttcattactccttatctgctgggaccggacaagaatttcacccggtag

SEQ ID NO: 81952 - protein, 551 aa, Artificial Sequence
  derived and/or modified sequence
MRPQPAEPAPGGRGNEACSIHSEVTNEITPVLSYSYLAVLVPVFLLTDYLRYTPVLLLQGLSFVSVWLLLLLGHSVAHMQLMELFYSVTMAARIAYSSYIFSLVRPARYQRVAGYSRAAVLLGVFTSSVLGQLLVTVGRVSFSTLNYISLAFLTFSVVLALFLKRPKRSLFFNRDDRGRCETSASELERMNPGPGGKLGHALRVACGDSVLARMLRELGDSLRRPQLRLWSLWWVFNSAGYYLVVYYVHILWNEVDPTTNSARVYNGAADAASTLLGAITSFAAGFVKIRWARWSKLLIAGVTATQAGLVFLLAHTRHPSSIWLCYAAFVLFRGSYQFLVPIATFQIASSLSKELCALVFGVNTFFATIVKTIITFIVSDVRGLGLPVRKQFQLYSVYFLILSIIYFLGAMLDGLRHCQRGHHPRQPPAQGLRSAAEEKAAQALSVQDKGLGGLQPAQSPPLSPEDSLGAVGPASLEQRQSDPYLAQAPAPQAAEFLSPVTTPSPCTLCSAQASGPEAADETCPQLAVHPPGVSKLGLQCLPSDGVQNVNQ

SEQ ID NO: 81953 - DNA, 1656 bp, Artificial Sequence
  derived and/or modified sequence
atgagaccccagcccgccgagcccgcccccggcggcagaggcaacgaggcctgcagcatccacagcgaggtgaccaacgagatcacccccgtgctgagctacagctacctggccgtgctggtgcccgtgttcctgctgaccgactacctgagatacacccccgtgctgctgctgcagggcctgagcttcgtgagcgtgtggctgctgctgctgctgggccacagcgtggcccacatgcagctgatggagctgttctacagcgtgaccatggccgccagaatcgcctacagcagctacatcttcagcctggtgagacccgccagataccagagagtggccggctacagcagagccgccgtgctgctgggcgtgttcaccagcagcgtgctgggccagctgctggtgaccgtgggcagagtgagcttcagcaccctgaactacatcagcctggccttcctgaccttcagcgtggtgctggccctgttcctgaagagacccaagagaagcctgttcttcaacagagacgacagaggcagatgcgagaccagcgccagcgagctggagagaatgaaccccggccccggcggcaagctgggccacgccctgagagtggcctgcggcgacagcgtgctggccagaatgctgagagagctgggcgacagcctgagaagaccccagctgagactgtggagcctgtggtgggtgttcaacagcgccggctactacctggtggtgtactacgtgcacatcctgtggaacgaggtggaccccaccaccaacagcgccagagtgtacaacggcgccgccgacgccgccagcaccctgctgggcgccatcaccagcttcgccgccggcttcgtgaagatcagatgggccagatggagcaagctgctgatcgccggcgtgaccgccacccaggccggcctggtgttcctgctggcccacaccagacaccccagcagcatctggctgtgctacgccgccttcgtgctgttcagaggcagctaccagttcctggtgcccatcgccaccttccagatcgccagcagcctgagcaaggagctgtgcgccctggtgttcggcgtgaacaccttcttcgccaccatcgtgaagaccatcatcaccttcatcgtgagcgacgtgagaggcctgggcctgcccgtgagaaagcagttccagctgtacagcgtgtacttcctgatcctgagcatcatctacttcctgggcgccatgctggacggcctgagacactgccagagaggccaccaccccagacagccccccgcccagggcctgagaagcgccgccgaggagaaggccgcccaggccctgagcgtgcaggacaagggcctgggcggcctgcagcccgcccagagcccccccctgagccccgaggacagcctgggcgccgtgggccccgccagcctggagcagagacagagcgacccctacctggcccaggcccccgccccccaggccgccgagttcctgagccccgtgaccacccccagcccctgcaccctgtgcagcgcccaggccagcggccccgaggccgccgacgagacctgcccccagctggccgtgcacccccccggcgtgagcaagctgggcctgcagtgcctgcccagcgacggcgtgcagaacgtgaaccagtag

SEQ ID NO: 81954 - DNA, 1656 bp, Artificial Sequence
  derived and/or modified sequence
atgcgcccacagcctgccgaacctgcccctggtggccgaggcaacgaggcttgttcaattcactcggaggttactaatgagatcacacccgtactgagttactcttacctagcggtcctggttcccgtctttcttttaaccgactatctcaggtacacacctgtgcttttattgcagggcctctcctttgtctcggtctggctcctactgttgttggggcattcggtagctcatatgcagcttatggagctgttctactctgtaactatggctgccaggatcgcttacagctcttacattttctccttagtgcgccccgcacggtatcagcgcgtggcgggctactcgagggcagcagtattgctcggagtatttacttcctccgtcttaggacagctgctcgtcacagttggacgtgtctcttttagcacgctaaattacattagtctagctttcctgacgttctcggtcgtcctcgcactgtttttaaagcgcccaaagagatcgttgttcttcaaccgtgatgatcgcggccggtgcgaaacttctgccagcgaattagagagaatgaaccccgggccagggggtaaactgggtcatgctctgagagtggcctgcggcgatagcgtcctggcgcgcatgctgagggagcttggcgacagcctgaggagacctcagcttaggctgtggtccctgtggtgggtttttaactctgctggctactatctcgttgtctactacgtccacattctgtggaacgaggtcgacccgaccacaaactctgcccgcgtgtataacggtgccgctgacgccgccagtacgctgctcggggcaatcacatcatttgccgctggctttgtgaagatccgttgggctcgatggagtaaactgctgattgccggagtgaccgcaacccaggccggtttagtctttttgttagcgcacaccagacatcccagtagtatctggctgtgctatgccgcctttgtgttgtttagaggttcgtatcaatttctggttcccattgctactttccaaatcgcttcctccctttcaaaggagctgtgcgcactggtgttcggggttaacacttttttcgcgacaatagtgaagacgatcattacatttattgtttccgacgtgagaggcctcggactgccagtacgtaagcagtttcagctgtattccgtttattttctgatactttcaatcatttatttcctgggagcaatgctggacggcctccgacactgccagcggggccatcacccaagacagcctcccgcccaggggctcaggtcggctgcggaggagaaggcggctcaagcccttagcgtgcaggataaagggttaggtgggctgcagcctgcacagtcacctccgctctcccctgaggatagccttggagcagtaggtccagcttccctcgagcagaggcagtccgatccctacctcgcacaagcacctgcgccccaggctgcagagttcctcagccccgtgacaacaccttctccatgcacgctgtgttctgcccaggcatcaggccctgaagcagctgacgagacttgtccccagctggccgtgcatccacccggtgtcagcaaattaggactgcaatgcctgccatcagatggggtgcagaatgtgaaccagtag

SEQ ID NO: 81955 - DNA, 1656 bp, Artificial Sequence
  derived and/or modified sequence
atgaggccccagcctgctgagcccgcccctgggggcagaggaaatgaggcctgcagcatccacagcgaggtgaccaatgagatcacccctgtgctgagctacagctacctggccgtgctggtgcctgtgttcctgctgacagactacctgcgctacacccctgtgctgctgctgcagggcctgagctttgtgtctgtgtggctgctgctgctgctgggccacagcgtggcccacatgcagctgatggagctgttctacagcgtgaccatggccgcccgcatcgcctacagcagctacatcttcagcctggtgcggcctgcccgctaccagagggtggccggctacagcagagctgctgtgctgctgggcgtcttcaccagctctgtgctgggccagctgctggtgacagtgggccgggtgtccttcagcaccctgaactacatcagcctggccttcctgaccttctctgtggtgctggccctcttcctgaagaggcccaagaggagcctcttcttcaacagagatgaccggggccgctgtgagaccagcgccagcgagctggagaggatgaaccctggccctgggggcaagctgggccacgccctgcgggtggcctgtggggacagcgtgctggccaggatgctgcgggagctgggggacagcctgcggcggccccagctgcggctgtggagcctgtggtgggtgttcaacagcgctggctactacctggtggtgtactacgtgcacatcctgtggaatgaggtggaccccaccaccaacagcgcccgggtgtacaacggggctgctgatgctgccagcaccctgctgggcgccatcaccagctttgctgctggctttgtgaagatccgctgggcccgctggagcaagctgctgattgctggggtgacagccacccaggccggcctggtgttcctgctggcccacaccaggcaccccagcagcatctggctgtgctatgctgcctttgtgctcttccggggcagctaccagttcctggtgcccatcgccaccttccagatcgccagcagcctgagcaaggagctgtgtgccctggtgtttggagtgaacaccttctttgccaccatcgtgaagaccatcatcaccttcatcgtgtctgatgtgcggggcctgggcctgcctgtgaggaagcagttccagctgtacagcgtgtacttcctgatcctgagcatcatctacttcctgggcgccatgctggatggcctgcggcactgccagaggggccaccacccccggcagcccccagcccagggcctgcggtctgctgctgaggagaaggccgcccaggccctgtctgtgcaggacaagggcctgggcggcctgcagcctgcccagagcccccccctgagccctgaggacagcctgggcgctgtgggccctgccagcctggagcagaggcagagcgacccctacctggcccaggccccagccccccaggccgctgagttcctgagccctgtgaccacccccagcccctgcaccctgtgcagcgcccaggccagcggccctgaggccgcagatgagacctgcccccagctggccgtgcaccccccaggagtgtccaagctgggcctgcagtgcctgcccagtgatggagtgcagaatgtgaaccagtag

SEQ ID NO: 81956 - DNA, 1656 bp, Artificial Sequence
  derived and/or modified sequence
atgcggccccagcccgccgagcccgcccccggcggccggggcaacgaggcgtgttccatccacagcgaggtgactaacgaaattacacctgtcctgtcctattcttatttagctgtcctagttccagtgtttcttctgaccgattacctgcggtacactccggtactgttgctgcagggcctctcttttgtgtccgtgtggctactccttctgctcggccactccgtggcgcatatgcaattgatggagttgttctatagtgtcaccatggccgcccgcattgcctattcatcttacatcttctccctggtcaggcctgccagataccagcgggtcgctggctattccagggccgctgtcctcctcggtgtgttcacgtcttcagttctcggccaactgctggtgacagtaggccgggtgtcctttagtaccttgaactacataagcctggcttttctgacattctcggtggtgctcgcccttttcctgaagagaccgaagcggtccctttttttcaatagggacgatcgcggcaggtgtgagacctcggccagcgagctggagcgcatgaacccaggcccaggaggtaaattaggacacgcattacgtgtagcctgcggtgactcagtgcttgcaaggatgctccgggaactcggagatagcttgcgccggccacagctgaggttgtggtctttatggtgggtgttcaactctgccggatattacttggtggtgtattatgtgcacattctgtggaatgaagtcgaccccacaacaaactcagctagagtttacaacggggccgcggacgccgcatcaaccttgctcggggctatcactagttttgccgctggttttgtaaagatcaggtgggcaagatggtcaaaactgttaatcgccggcgtgacagccacccaggctggcttagtctttctgctggctcacacaaggcaccccagctctatctggctttgttatgcagcatttgtgctttttcggggcagctatcagtttttagtaccgatagcgaccttccagatcgcctcctcactgagcaaggaactgtgtgcacttgtttttggggtcaacacattctttgccacaatcgtgaagacaatcatcacatttattgtcagtgatgtgaggggactcggcctacctgtgaggaagcagtttcaactatacagcgtttacttcctgatcctaagtattatctacttcttgggagctatgctcgacggacttcggcactgtcagcgaggtcatcatcctcggcagccgcctgcccaggggctccgcagcgcggccgaagaaaaagctgcccaggcccttagcgtgcaagataagggcctgggtggccttcagccggctcagtctccccctctgtcccccgaggattctctgggcgcagttggccccgcatccttagaacagcgtcaaagcgatccttatctcgcccaggcaccagccccacaagccgctgaattcctttctcccgtgacaacacccagtccctgcactttatgttcagctcaggcatccgggccagaagctgcggatgaaacctgcccgcaactcgccgtgcatccaccaggagtgtccaagctgggtttgcaatgtctgccttcagacggcgttcaaaacgtgaatcagtag

SEQ ID NO: 81957 - DNA, 1656 bp, Artificial Sequence
  derived and/or modified sequence
atgcgaccacagcctgcggaaccagctcctggcggaagagggaacgaggcttgttccatccattccgaagtgactaacgaaattacccctgtgctcagctacagttacttagcagtgctggtccccgtgttcctgctcaccgactacttgcggtacactcctgttctcctgctccaagggctgagctttgtgtctgtgtggttgcttcttttattgggccactctgtagctcatatgcagctcatggagttattctattctgtaaccatggctgcaagaatcgcttactcctcatacattttcagcctggtgaggcctgcccgttatcaacgtgtggcaggttactcccgcgctgcagtgttgctcggcgtgtttacatctagcgttctgggacagttgttggttacagttgggagagtctctttcagtaccctcaactatatcagcttagcgttcttaacatttagcgtggtattagcactctttttaaaacggcctaagcgcagtctttttttcaaccgcgacgaccgcggacggtgcgaaacatcggcttcggagctggagcggatgaacccagggcctggcggtaagctgggccacgccctgagggtcgcatgcggagacagtgtgctagcccgtatgcttcgggagctgggggacagcctccgtagaccgcaactgaggctctggtcactctggtgggttttcaactcggcaggctactatctggtggtgtactacgtgcacatcctctggaatgaggtcgacccaacaaccaactcagccagggtatataacggggctgccgatgcagcgtcaactctactgggtgccattacttccttcgcagcaggctttgtaaagataagatgggctcgctggtctaaattgctgattgcaggagtcactgctactcaggctggtttggtattcctgctcgcccacacacgtcaccctagctccatctggctgtgctacgctgcattcgtgctcttcagaggaagctatcaattcctggtgcctatcgctacattccaaattgcgagttcactgtctaaggaactctgcgcactggtgtttggggttaatacgttctttgcaactatcgtgaaaaccataatcacattcatcgtgtccgacgttcgcggactgggcctcccagtccgaaagcagttccagctgtacagcgtttacttcctgatcttgagtattatctattttctgggggcaatgcttgacggcctccggcactgccagcgcggacatcatcctagacaacccccagcccagggcctgcgcagcgcagctgaagaaaaagccgctcaggcactgagcgttcaagacaaaggtctgggtggtctccagcccgctcagtcaccacccctcagtcctgaagattcattaggtgccgtagggccagctagtctggaacagcggcaaagcgatccatacctggcacaggcccctgcgccacaggccgcagagtttctgtcaccagtgacgacgcccagtccctgcactctatgctctgcccaagcttcgggacccgaggccgctgacgagacttgtcctcagctggccgtgcatcctcctggggtgtctaagctgggcctacagtgtctgcctagcgacggtgtgcagaacgtaaatcagtag

SEQ ID NO: 81958 - DNA, 1805 bp, Artificial Sequence
  derived and/or modified sequence
aggtgcctgatgaggccccagcctgcagagccagctcctggtggaagaggaaatgaggcatgctccattcattcggaggtcacgaacgagatcacgccggtgctgtcgtactcctacctggccgtgctggtgcccgtgttcctgctcaccgactacctgcgctacacgccggtgctgctgctgcaggggctcagcttcgtgtcggtgtggctgctgctgctgctgggccactcggtggcgcacatgcagctcatggagctcttctacagcgtcaccatggccgcgcgcatcgcctattcctcctacatcttctctctcgtgcggcccgcgcgctaccagcgtgtggccggctactcgcgcgctgcggtgctgctgggcgtgttcaccagctccgtgctgggccagctgctggtcactgtgggccgagtctccttctccacgctcaactacatctcgctggccttcctcaccttcagcgtggtcctcgccctcttcctgaagcgccccaagcgcagcctcttcttcaaccgcgacgaccgggggcggtgcgaaacctcggcttcggagctggagcgcatgaatcctggcccaggcgggaagctgggacacgccctgcgggtggcctgtggggactcagtgctggcgcggatgctgcgggagctgggggacagcctgcggcggccgcagctgcgcctgtggtccctctggtgggtcttcaactcggccggctactacctggtggtctactacgtgcacatcctgtggaacgaggtggaccccaccaccaacagtgcgcgggtctacaacggcgcggcagatgctgcctccacgctgctgggcgccatcacgtccttcgccgcgggcttcgtgaagatccgctgggcgcgctggtccaagctgctcatcgcgggcgtcacggccacgcaggcggggctggtcttccttctggcgcacacgcgccacccgagcagcatctggctgtgctatgcggccttcgtgctgttccgcggctcctaccagttcctcgtgcccatcgccacctttcagattgcatcttctctgtctaaagagctctgtgccctggtcttcggggtcaacacgttctttgccaccatcgtcaagaccatcatcactttcattgtctcggacgtgcggggcctgggcctcccggtccgcaagcagttccagttatactccgtgtacttcctgatcctgtccatcatctacttcttgggggccatgctggatggcctgcggcactgccagcggggccaccacccgcggcagcccccggcccagggcctgaggagtgccgcggaggagaaggcagcacaggcactgagcgtgcaggacaagggcctcggaggcctgcagccagcccagagcccgccgctttccccagaagacagcctgggggctgtggggccagcctccctggagcagagacagagcgacccatacctggcccaggccccggccccgcaggcagctgaattcctgagcccagtgacaaccccttccccctgcactctgtgctccgcccaagcctcaggccctgaggctgcagatgagacttgtccccagctggctgtccatcctcctggtgtcagcaagctgggtttgcagtgtcttccaagcgacggtgttcagaatgtgaaccagtgactctcgggcgcccctgtggtaactttgcaggcggccctcagtgcatccccacgacccctgcctcgagggccgcctgccttagcaatgggggcctccgcttatcctgctagcaggccccctaggattccccctgccctgtg

SEQ ID NO: 81959 - DNA, 2094 bp, Artificial Sequence
  derived and/or modified sequence
atgcagacccaggagatcctgcgaatactgagactcccggagctcggtgacttgggccagtttttcagatctctgtctgccacaacattggtctccatgggagccttagcagctatccttgcttactggtttacacaccgaccaaaggccctccagcctccttgtaacctgttgatgcagtcagaagaggtcgaggattccggaggcgcacgcaggtcagtcattgggtcagggccacagctgctgacacactattacgacgatgcgcgcaccatgtatcaggtatttaggcgaggactctccatcagtggaaatggtccctgtctgggcttccgcaaacctaaacaaccctatcagtggctgtcatatcaggaagtcgccgacagggccgagttcctggggtccgggttactgcagcacaattgcaaagcatgtaccgatcagtttatcggtgttttcgcacagaacaggccagaatggattatagtggaactggcctgctacacttacagcatggtggtcgtgcctctatacgatactttaggacctggagccatcaggtatattattaacactgcggatatcagcactgtgattgtggataagccacagaaagccgtgttactcctggagcacgtggagcggaaggagactcctgggctcaagctgataatactaatggatcccttcgaggaggcccttaaggagagaggccaaaaatgtggtgtcgtgattaagagtatgcaagcagtggaggactgtgggcaggagaaccaccaggcgcccgttcctcctcagcccgacgacctgtctatagtctgttttacaagcggaaccacaggaaaccctaaaggagcaatgctgactcacggcaacgttgtcgctgacttttctggatttctgaaggtcaccgaatcacagtgggcaccaacctgtgccgatgtgcatataagctacctgccactcgcacacatgtttgagagaatggtgcagtccgtggtgtattgccacggagggcgcgtgggcttctttcagggcgatattcggcttcttagcgatgacatgaaggctctgtgccctacaatctttcccgtagtccccaggctgctcaaccgaatgtatgacaagatctttagtcaagctaacactcccctgaagaggtggctgctggagtttgccgcaaaaagaaaacaggctgaggtccggtccggaatcatcaggaacgacagtatctgggacgagctctttttcaacaaaatccaggcttctctgggcgggtgtgtacggatgatcgtaaccggggctgccccagcttctcctacagtgctagggttcctgcgggctgccctgggttgtcaggtgtatgagggatacgggcagacagagtgcacagccggttgtacgtttaccacccccggcgattggaccagtgggcatgtgggagctccactgccttgcaatcacataaaactggttgacgtggaggaactcaactattgggcttgcaaaggtgaaggagaaatttgcgtgcgtggcccgaacgtattcaaaggctatctcaaggatccagaccgtacaaaggaggccctggattccgatgggtggctgcacaccggagacatcggcaaatggctgccagccggaactctgaagatcatagaccgaaagaaacatattttcaaacttgcacagggcgagtatgtggcacctgaaaagatcgagaatatctacattagaagccagcctgtggctcaaatctatgtacatggagactcactgaaggccttcctggtgggcattgtcgtgcccgaccccgaagtcatgccctcctgggcgcagaaacggggcattgaggggacatacgcggacctgtgtaccaacaaagatttaaagaaagcgattctggaagacatggtgaggctgggtaaagaatccggcctccatagcttcgagcaggtaaaagctatccacatccactccgatatgttcagtgtacagaatggcttactgacacccaccttgaaagcaaaaagacctgagctgagagaatattttaaaaaacagatagaggagctgtattccatcagcatgtag

SEQ ID NO: 81960 - DNA, 2004 bp, Artificial Sequence
  derived and/or modified sequence
atgcagacccaggaaattctacggattctacgccttccagagctcggtgacctcgggcagtttttcagatctctttcggccacgacgctggtatctatgggcgcactcgcggcaattctcgcatattggtttacacaccggccgaaggcactccaacccccttgtaatctgctgatgcagagtgaagaggtagaggacagtggaggtgcacgtcgctccgtgattggatcagggccccagcttttgactcactactacgatgatgctagaacgatgtatcaggtctttcgacgggggctctccatctcgggaaatgggccttgcctcggctttagaaagccaaaacagccgtatcagtggctgagttatcaggaggtcgctgatcgagctgaattcttgggttccggcctgctccagcacaattgcaaagcctgcaccgatcagttcattggtgtcttcgcacagaatcgccctgaatggataatcgtggaactcgcctgctatacatacagcatggtggtggtccctctgtatgatacccttggacccggtgcaatccggtacatcatcaataccgccgacattagcaccgtcattgttgacaaaccccagaaggctgtgctgctgctcgaacatgtggagaggaaggagacccctggcctgaaattgattatactgatggacccattcgaagaggctctgaaggagagggggcaaaagtgcggggttgtcatcaaaagcatgcaggctgtggaggactgcggccaggagaaccaccaggcccccgtgcctcctcaaccagatgacctgtccatcgtgtgcttcacaagtggcaccacgggtaatcccaagggggccatgcttacgcatggaaatgttgtggccgacttctccggatttctcaaagtaacggagtcccaatgggcaccgacgtgcgcggatgtacacattagttacttgccattggcccatatgtttgagagaatggtgcaatctgtggtgtactgtcacggcgggcgcgtggggttcttccagggagatattcgactgctctccgatgacatgaaggccttgtgtcccaccatttttcctgtggtgccccgcctactgaataggatgtacgataaaatattttctcaggcgaataccccattaaagagatggttgctagaattcgctgccaaaaggaaacaggctgaagtcagaagcggcataatccgcaatgacagtatctgggacgaacttttctttaataagatccaggcttctctcggaggctgcgtccgcatgattgtcaccggagctgccccggcttcccctacggtcttaggattcctccgagcggcgctcgggtgtcaggtttacgaggggtacggccaaacagaatgtaccgctggctgtacatttacaacaccaggggactggaccagcggacacgtaggcgcccccttgccttgtaaccacattaaactggtagacgtcgaggagctgaattattgggcatgtaaaggcgagggggagatttgcgtgcggggccctaatgtgtttaagggttatttgaaggatccagacaggacaaaggaggctctggatagcgatggatggctgcatactggtgatatcggtaagtggctgcctgctggcactctgaaaattattgatcgcaaaaagcatatatttaagcttgcccagggcgaatacgtggctccagagaaaattgagaatatctatattaggtctcagcccgttgcccagatctatgtgcatggcgacagcttgaaagcctttcttgtgggaatagtggttcccgatcctgaggtaatgccttcctgggcgcaaaagcgcggcattgaagggacctatgctgatctgtgtacaaacaaggacctaaaaaaggcaattctggaagatatggtccgcctcggaaaggagagtggcctgcactctttcgaacaggatttaccccagtgtttgatccaaatcaaagtgttcagcaagtattag

SEQ ID NO: 81961 - DNA, 2094 bp, Artificial Sequence
  derived and/or modified sequence
atgcagacccaagagattctgcggatcctgcggctcccagaactcggggacctaggccagttctttcgctccctcagcgctacaaccctggtcagcatgggggccctggcagcgattctggcttattggtttacgcatcggccaaaggccctgcagcctccctgcaacttgctaatgcagagtgaggaggtggaggactctgggggtgccaggagatcggtcatcggaagtggaccacaacttcttacccattattacgatgacgcccgtactatgtaccaggtgttcaggagagggctgtcaatcagcggaaacggaccttgcctgggcttcaggaagcctaaacagccctaccaatggttaagctaccaggaggtcgcagatagggccgagttcctaggttctggcctgctccagcataattgcaaggcgtgcacagatcagttcatcggggtattcgcccagaatcggcccgagtggattattgttgagctcgcctgctatacctacagtatggtggtggtgcccctgtacgatacactgggaccaggagctattcgatatattatcaatactgcggacataagcacagtgatagtggataagccacagaaggcagtgctgctcttagagcatgtcgaacggaaagagacacctggactgaaactcatcatactgatggatcctttcgaggaagccctcaaagagcggggccagaaatgtggagttgtcattaaaagcatgcaagctgtggaggactgcggtcaggagaatcatcaggctcccgtgcctccccaaccggatgacttgagtattgtatgtttcacctcaggtacaaccggcaatcccaaaggagcaatgctgacacatggaaacgtcgtcgcggactttagcggcttcctcaaggttacagaatcacaatgggctccgacctgtgcagacgttcacattagctatctgcccctggctcatatgtttgaaaggatggtgcaatccgtagtgtattgccacgggggccgcgttgggttcttccagggggacatacgcttgctttctgatgacatgaaggccttatgtcccaccatttttcccgtcgtcccgcgcctgctcaaccgaatgtatgacaagatattttctcaagcaaacacaccgctgaagcgctggctgttggagttcgcagccaagaggaaacaggccgaggtgagaagtgggatcattcggaatgacagcatctgggacgagctgttctttaataagatccaggccagcctgggcggttgcgttcgaatgattgtgacaggcgctgcccctgccagccctacagtgctcgggtttctcagggccgcactcggttgtcaggtgtacgaaggatatggacagaccgagtgtacagccggatgtaccttcacaacccctggcgattggactagcggccacgttggtgcgccgttaccatgcaaccatattaaactagtggacgtggaagagctgaattattgggcctgcaagggcgagggcgaaatttgcgtacggggacccaacgtgttcaagggatatctgaaagaccccgatcgcaccaaggaagcactggactcagacggatggctccacacaggggatataggcaaatggctgcccgctggaaccctgaaaatcattgaccgcaagaaacacatcttcaagcttgctcagggtgagtatgttgccccagaaaagatagagaacatatatattaggagccagcctgtggcacagatttacgttcacggtgactctctgaaggcctttctggtcggcatcgtcgttcccgatcccgaagtgatgccttcctgggcgcagaaacggggcatagaggggacttatgccgacctgtgcactaataaagatctcaagaaggccatattggaggatatggtgcggcttggcaaggagtccggactgcatagctttgaacaggttaaggctatacatatccacagcgatatgttttcagtccagaacggacttttgacacccacactgaaagctaagcggccagagctcagagagtactttaagaaacagatcgaggagttgtatagtatcagtatgtag

SEQ ID NO: 81962 - DNA, 2094 bp, Artificial Sequence
  derived and/or modified sequence
atgcagacccaggagatcctgcgcatcctgcggctgcctgagctgggggacctgggccagttcttccgcagcctgagcgccaccaccctggtgtccatgggcgccctggccgccatcctggcctactggttcacccaccggcccaaggccctgcagcccccctgcaacctgctgatgcagagcgaggaggtggaggacagcggcggggccaggagatctgtgattggcagcggcccccagctgctgacccactactatgatgatgcccggaccatgtaccaggtgttcagaagaggcctgagcatctctggaaatggcccctgcctgggcttcaggaagcccaagcagccctaccagtggctgagctaccaggaggtggccgacagagctgagttcctgggcagcggcctgctgcagcacaactgcaaggcctgcacagaccagttcatcggcgtgtttgcccagaacagacctgagtggatcatcgtggagctggcctgctacacctacagcatggtggtggtgcccctgtatgacaccctgggccctggggccatccgctacatcatcaacacagctgacatcagcacagtgattgtggacaagccccagaaggctgtgctgctgctggagcacgtggagaggaaggagaccccaggcctgaagctgatcatcctgatggacccctttgaggaggccctgaaggagcggggccagaagtgtggggtggtgatcaagtccatgcaggccgtggaggactgtggccaggagaaccaccaggcccctgtgcccccccagccagatgacctgagcatcgtgtgcttcaccagcggcaccaccggcaaccccaagggggccatgctgacccacggcaatgtggtggccgacttcagcggcttcctgaaggtgacagagagccagtgggcccccacctgtgctgatgtgcacatctcctacctgcccctggcccacatgtttgagaggatggtgcagagcgtggtgtactgccacggcggccgggtgggcttcttccagggcgacatccggctgctgagtgatgacatgaaggccctgtgccccaccatcttccctgtggtgccccggctgctgaacaggatgtatgacaagatcttcagccaggccaacacccccctgaagcgctggctgctggagtttgctgccaagaggaagcaggccgaggtgcgcagcggcatcatcagaaatgacagcatctgggatgagctgttcttcaacaagatccaggccagcctgggcggctgtgtgaggatgattgtgactggagctgccccagccagccccaccgtgctgggcttcctgcgggccgccctgggctgccaggtgtatgagggctacggccagacagagtgcacagctggctgcaccttcaccacccctggggactggaccagcggccacgtgggcgcccccctgccctgcaaccacatcaagctggtggatgtggaggagctgaactactgggcctgcaagggggagggggagatctgtgtgcggggccccaacgtgttcaagggctacctgaaggaccctgacaggaccaaggaggccctggacagtgatggctggctgcacactggagacatcggcaagtggctgcctgctggcaccctgaagatcatcgacaggaagaagcacatcttcaagctggcccagggcgagtatgtggcccctgagaagattgagaacatctacatccgcagccagcctgtggcccagatctacgtgcatggagacagcctgaaggccttcctggtgggcatcgtggtgcctgaccctgaggtgatgcccagctgggcccagaagaggggcatcgagggcacctacgccgacctgtgcaccaacaaggacctgaagaaggccatcctggaggacatggtgcggctgggcaaggagagcggcctgcacagctttgagcaggtgaaggccatccacatccacagcgacatgttttctgtgcagaatggcctgctgacccccaccctgaaggccaagaggcctgagctgcgggagtacttcaagaagcagatcgaggagctgtacagcatctccatgtag

SEQ ID NO: 81963 - DNA, 2004 bp, Artificial Sequence
  derived and/or modified sequence
atgcagacccaggagatcctgcgcatcctgcggctgcctgagctgggggacctgggccagttcttccgcagcctgagcgccaccaccctggtgtccatgggcgccctggccgccatcctggcctactggttcacccaccggcccaaggccctgcagcccccctgcaacctgctgatgcagagcgaggaggtggaggacagcggcggggccaggagatctgtgattggcagcggcccccagctgctgacccactactatgatgatgcccggaccatgtaccaggtgttcagaagaggcctgagcatctctggaaatggcccctgcctgggcttcaggaagcccaagcagccctaccagtggctgagctaccaggaggtggccgacagagctgagttcctgggcagcggcctgctgcagcacaactgcaaggcctgcacagaccagttcatcggcgtgtttgcccagaacagacctgagtggatcatcgtggagctggcctgctacacctacagcatggtggtggtgcccctgtatgacaccctgggccctggggccatccgctacatcatcaacacagctgacatcagcacagtgattgtggacaagccccagaaggctgtgctgctgctggagcacgtggagaggaaggagaccccaggcctgaagctgatcatcctgatggacccctttgaggaggccctgaaggagcggggccagaagtgtggggtggtgatcaagtccatgcaggccgtggaggactgtggccaggagaaccaccaggcccctgtgcccccccagccagatgacctgagcatcgtgtgcttcaccagcggcaccaccggcaaccccaagggggccatgctgacccacggcaatgtggtggccgacttcagcggcttcctgaaggtgacagagagccagtgggcccccacctgtgctgatgtgcacatctcctacctgcccctggcccacatgtttgagaggatggtgcagagcgtggtgtactgccacggcggccgggtgggcttcttccagggcgacatccggctgctgagtgatgacatgaaggccctgtgccccaccatcttccctgtggtgccccggctgctgaacaggatgtatgacaagatcttcagccaggccaacacccccctgaagcgctggctgctggagtttgctgccaagaggaagcaggccgaggtgcgcagcggcatcatcagaaatgacagcatctgggatgagctgttcttcaacaagatccaggccagcctgggcggctgtgtgaggatgattgtgactggagctgccccagccagccccaccgtgctgggcttcctgcgggccgccctgggctgccaggtgtatgagggctacggccagacagagtgcacagctggctgcaccttcaccacccctggggactggaccagcggccacgtgggcgcccccctgccctgcaaccacatcaagctggtggatgtggaggagctgaactactgggcctgcaagggggagggggagatctgtgtgcggggccccaacgtgttcaagggctacctgaaggaccctgacaggaccaaggaggccctggacagtgatggctggctgcacactggagacatcggcaagtggctgcctgctggcaccctgaagatcatcgacaggaagaagcacatcttcaagctggcccagggcgagtatgtggcccctgagaagattgagaacatctacatccgcagccagcctgtggcccagatctacgtgcatggagacagcctgaaggccttcctggtgggcatcgtggtgcctgaccctgaggtgatgcccagctgggcccagaagaggggcatcgagggcacctacgccgacctgtgcaccaacaaggacctgaagaaggccatcctggaggacatggtgcggctgggcaaggagagcggcctgcacagctttgagcaggacctgccccagtgcctgatccagatcaaggtgttcagcaagtactag

SEQ ID NO: 81964 - DNA, 2094 bp, Artificial Sequence
  derived and/or modified sequence
atgcagacccaggagatcctgcggatcctgcggctgcccgagctgggagacttgggccagttttttcggtctttgagcgccacgacactcgttagcatgggtgccttggcagcaattcttgcatactggttcacacacagacccaaggccctgcaacccccttgcaatttgctcatgcagagcgaggaagtcgaggatagcggtggggcccgtcgttctgtgatcggctccggtccccagctcctgacacactactatgacgacgcccggacgatgtatcaggtcttccgccgaggtctttccatctctgggaatggaccttgtttgggattccggaagcctaagcagccttaccagtggcttagctaccaggaagttgccgacagagctgagtttctgggtagcgggctcctgcagcacaactgcaaggcctgcacggaccaattcatcggcgtgtttgcacagaacaggcctgagtggataatcgtggagctggcctgctatacctatagcatggtagttgtacccctgtacgatacactgggacccggggcgatccggtatattatcaatactgcagatatatcaactgttatagtggacaaaccccaaaaagcagttttgttactagagcacgtggaaaggaaggagacacctggactgaagttgattattctgatggatccgttcgaggaggctttaaaagaacgcggccaaaagtgtggggtggttattaaatccatgcaggcagttgaagattgtggtcaggagaatcatcaggcacccgtgcctccccagccagatgatctgtctatagtctgttttacctccggtacgaccggcaatcctaagggcgccatgctgacgcacggcaatgtggtcgccgatttctctggcttccttaaagtgaccgagagccaatgggccccaacctgcgcggacgtgcacatctcctatttgcccttggctcacatgttcgagcgaatggttcaaagcgtcgtgtattgccacgggggtcgtgtgggcttcttccagggcgatattaggttgctgagtgacgatatgaaagctttatgtccaaccatcttccctgtggtgcccagactgctcaataggatgtacgataagatttttagccaggccaacacaccgctcaaacgctggctgttggagtttgcagccaagcgtaagcaggccgaggtgagatccggaattatcaggaatgactcaatatgggacgaactgttctttaataagatccaagcaagtcttggaggatgcgtgaggatgatcgtgacaggggccgccccagcctcccccactgtgttagggtttctacgggcagcattaggctgccaggtatatgaaggttatgggcaaactgaatgcacggccggctgtacctttaccaccccaggtgactggacttctggccacgtgggagctccgttgccttgcaaccatatcaaactggtagatgtcgaggaactgaattactgggcttgcaagggggagggcgagatctgtgttcgcgggcccaatgtctttaaggggtacctgaaggatcccgacagaaccaaggaggcgttagacagtgatgggtggctccataccggagatatcggcaagtggttacctgccggtacactgaaaattattgatcgcaagaaacacatctttaagctcgctcaaggagagtacgtagcacctgaaaaaatagaaaacatttacataagatcacagccagtcgctcagatatacgtgcatggagacagtttgaaggcttttctggtagggatagtggtcccagatcccgaagtgatgccctcttgggcacagaaaaggggtatcgagggcacatacgctgacctctgtactaacaaggacttaaaaaaagctattctggaggacatggtcaggctgggaaaggaaagcggccttcactcttttgagcaggtgaaggctatccacatccactcagatatgttttcggtgcagaacggccttcttacccccaccttaaaggccaaaaggcctgagcttcgcgaatactttaaaaaacaaatcgaggagctttatagcatatctatgtag

SEQ ID NO: 81965 - DNA, 2004 bp, Artificial Sequence
  derived and/or modified sequence
atgcagacccaggagatcctgcggatcctgcggctgcccgagctgggggaccttggacagttctttcgctctctgagtgccacaacactcgtctccatgggtgccctcgccgccattttggcttactggtttacccatcgacctaaagcactgcagccaccttgcaacctgttgatgcaaagcgaggaggtggaggacagcggcggcgcccggaggagtgtgattggaagcggcccacagctgttaacccactactacgacgacgcacgaaccatgtatcaggtgttccgtcgcgggcttagcatatccgggaacggcccatgcctgggtttccgcaaaccaaagcaaccctatcagtggctgtcttatcaggaggtggcagacagggcagagtttctcggaagcggcctgctgcagcacaattgcaaagcatgtaccgatcagttcattggcgtcttcgctcaaaaccggcccgagtggataatcgtggagctggcttgctacacttactctatggttgtcgtgccactttatgacacactgggcccaggggctattcgctacattattaataccgcagacatttccactgtgattgtggataagccacagaaagctgtgttgctgttggaacacgtggaaagaaaggagacacccgggctgaagctgattatcctaatggatcccttcgaagaggcgctgaaggaacgcggccagaaatgcggcgtggtcattaagtctatgcaggccgtggaggactgtggccaggagaatcaccaagctcccgtgccaccacaaccagacgacttgtctatagtttgcttcacatccggaaccacaggcaacccaaagggcgccatgctcacgcatgggaacgtcgtagccgacttctctggcttcctgaaagtgacagaaagccaatgggctccaacttgcgccgacgttcacatctcctatcttcccctggcccacatgttcgagcgaatggtgcaaagcgttgtgtactgccacggtggacgggttggatttttccagggggatatcagattgctgtccgatgatatgaaggccctttgtcccacaatctttcccgttgtgcctagactcctgaataggatgtacgacaagatcttctctcaggccaacacccccctaaagcgctggctcctggagtttgctgccaagcgcaaacaggctgaggtacgcagtggaattattcgaaacgattccatatgggatgaattattttttaacaagattcaggccagcttgggaggctgtgttagaatgatcgtaactggagcagctcctgcctcacccaccgtgctgggctttttaagggcagctctgggatgtcaggtgtacgaggggtatggacagaccgagtgtaccgccggatgcacattcaccactcccggagactggacttccggacacgtgggtgcccctcttccctgcaatcacattaagctggtggatgtcgaagagttgaattactgggcttgcaagggcgagggtgagatctgcgtgagaggcccaaatgtcttcaagggctacctgaaagatcccgatcgcacgaaggaagccttggattcggatggatggctgcacaccggagatatcgggaaatggctccccgccggcacactcaagattattgacagaaaaaaacatatcttcaagctggctcagggcgagtacgtggctcccgagaagattgagaacatatacatccgcagtcagcctgtcgctcagatatacgtgcacggagacagcctcaaagcattcctggttggcatcgtagtccctgacccagaggtcatgccctcctgggcgcagaagagaggaattgaaggcacgtatgctgatctgtgcactaacaaggacctgaagaaggcgatactggaagatatggtccggcttggaaaggagtcaggcctccattcttttgagcaagatttaccacaatgtcttatccaaattaaggttttttccaaatattag

SEQ ID NO: 81966 - DNA, 2094 bp, Artificial Sequence
  derived and/or modified sequence
atgcagacccaggagatcctgcggatcctgcggctgcccgagctgggagacttgggccagttcttccgctcactgtcagcaactacactggtgtccatgggcgccctagcggcaatcctagcttattggtttacccaccgacccaaggccctccagccgccctgtaatctgctcatgcagtcggaagaggtcgaggacagcggaggagcccgtaggtcagttatcgggtctggcccccagttattgacgcattactatgacgatgccaggactatgtaccaggtctttcgccgtggcctgagcatcagtgggaacggtccttgtctggggttcaggaagcccaagcagccataccaatggctgagctaccaggaagtcgccgaccgggcagagtttctgggttcaggacttttacagcataattgcaaagcgtgtaccgatcagtttatcggtgtgtttgcccagaatcgcccagagtggatcatagtagagctggcctgctatacttattctatggtcgttgttccactctacgacacccttggaccaggagccattcgatatatcattaacacagcagatatcagcactgtaatcgttgataagccccaaaaagccgtcttgctcctggagcacgtcgaaaggaaggagactcccgggctgaagctcataatcttgatggacccattcgaagaggccctaaaagagagaggacaaaaatgcggcgtggttatcaaatcgatgcaggccgtcgaagactgcggacaggaaaaccaccaggcacctgtccccccccagcctgacgacctcagcatcgtatgttttaccagcggaaccacgggaaacccaaagggggccatgctgacccatggcaacgtagtcgcggactttagtggatttctgaaggtaacagagtcccagtgggccccaacctgtgccgatgtgcacatctcataccttcctctggcccacatgttcgagcggatggtgcagagcgtggtgtactgtcatggcggaagggtgggctttttccagggtgacatccggttattgtcggatgatatgaaggcgctgtgccctacgattttccctgtggtgccaaggctgctcaacagaatgtatgacaagatcttctcccaggccaatacaccattgaagcggtggttgctggagtttgcggccaagagaaagcaagcagaggtgcgctccggcatcattcggaacgattcaatttgggacgaactgtttttcaacaaaatccaggcctccctgggtgggtgtgtccgaatgatcgttaccggagcagctcccgctagtcctacagtcctgggcttcctgagagctgctctggggtgccaggtgtacgagggctatgggcagacggagtgcaccgccgggtgtacgtttaccacgcctggggattggacaagcggccatgtgggcgctccactcccctgcaatcacattaaattggtggacgtcgaggagctcaactactgggcctgtaaaggggaaggagagatctgcgtgagagggcctaatgtgtttaagggttacctgaaggaccccgatcgaactaaggaagctctcgatagcgatggttggctgcatactggagatataggaaagtggctcccagcaggcactcttaaaattattgacagaaaaaaacatattttcaagctcgcccaaggagaatacgtggctcctgaaaaaatcgagaacatctacattagatctcagcccgttgctcagatctacgtgcacggcgatagtcttaaggccttcctggttgggatcgtcgtgcctgatcctgaggttatgccctcttgggcacagaaacgcggcatagaaggcacttacgcagacctctgcacgaacaaggacctcaaaaaggcaatactggaggacatggtgcgactgggcaaggaatctggactacattccttcgagcaggtgaaagcaatccatatccatagtgatatgttttcggtgcagaacggactcctgacccctacgttgaaagctaagaggcctgagctgagggagtactttaagaagcaaatagaggagctgtactccatctcaatgtag

SEQ ID NO: 81967 - DNA, 2094 bp, Artificial Sequence
  derived and/or modified sequence
atgcagacacaggaaattctgcgaatcttacgcctgcccgaactgggcgatctgggccaattctttagatcccttagcgctaccacactggtgtccatgggggcactagctgccattctcgcatattggtttacacatcgaccaaaagctctgcagccgccttgcaacctgttgatgcaaagtgaagaggtcgaagacagtgggggagccaggcgctcagtgattggcagtgggccacaactgctcactcattactacgacgatgcaaggaccatgtaccaagtctttcggaggggactgtctatttcaggcaacgggccatgcttaggctttcgcaaaccaaagcaaccttaccaatggctgtcctaccaggaagtggctgacagagcagagtttctgggatctggattgcttcagcataattgcaaggcttgtactgaccaatttattggggtgttcgcgcagaaccgtcccgagtggatcatcgtggaactggcgtgctacacctacagcatggtggtagtgcctctgtacgacacactgggcccaggagccatccgatacataattaataccgcggatatctccacggtcatcgtggataagccccagaaagccgtgctcctgctggagcatgtagaacgcaaggagacacctggtcttaaacttattatcctaatggacccttttgaggaagccttgaaagagagaggacaaaaatgtggggtggttatcaagagtatgcaggctgtggaggactgcggccaggaaaatcaccaggctcccgttccaccacaaccagacgatctcagcatcgtctgctttacctctggcaccactggaaatccaaagggggctatgctgacccacgggaatgtggtggctgatttttcaggttttctcaaggtcactgagagtcagtgggcacctacttgcgctgacgtgcatattagttatcttcccctcgctcacatgttcgaaaggatggttcagtccgtcgtgtattgccatggtggaagggtcggattctttcagggggatatcaggctcctcagtgacgatatgaaagctctctgccccactatttttcccgtcgtgcccagacttttgaaccgaatgtatgacaaaattttcagccaggccaacaccccccttaagaggtggctgcttgaattcgctgccaaaaggaagcaggctgaggtccgttcaggtattatcaggaacgactccatttgggacgagttattcttcaacaaaatccaggcatctctgggtggttgcgtgcgcatgatcgtgacaggtgcagctcctgcatcaccgactgtcctgggctttctgcgcgctgcactagggtgtcaggtgtacgagggatatggccagacggaatgcacagcaggctgtacctttaccacccccggagactggacctctggacatgttggggctccactgccatgcaaccatattaagctggtggacgtcgaggagctgaactactgggcgtgtaagggggagggcgagatctgtgtgcgcggtcccaacgtcttcaagggctacctgaaggaccctgacagaacaaaggaagctctggactcagatgggtggctgcacacaggggacattggcaagtggctgccggcaggaaccctgaagattattgacaggaaaaagcacattttcaagcttgcccaaggcgagtatgtagcaccagaaaagatcgagaatatctatattagatctcaacccgttgcgcagatttacgtccatggcgattccctgaaagcgtttctagtcggcattgtggtcccagatccagaggttatgccatcctgggcacagaaaagaggcatcgaagggacgtatgctgatctctgcacaaacaaagacctgaaaaaagctattttggaggacatggtgaggctcggtaaggagtctggcctgcacagcttcgagcaggtgaaagccatacacattcacagcgatatgttcagtgtccagaacggcttgttaacgcccaccttgaaggccaagaggcctgaactgcgcgagtatttcaaaaaacagatcgaggaactttactcaatttccatgtag

SEQ ID NO: 81968 - DNA, 2004 bp, Artificial Sequence
  derived and/or modified sequence
atgcagacacaggaaatcttgcgaattctgagattgcccgaactgggggacctcggccagttctttcgctccctatcagccactaccctggtctctatgggagccctggccgcaattttagcctattggttcacacaccgtcctaaagcgctgcaacctccttgtaacctcttgatgcagagcgaagaagtcgaagactcaggtggagctcgacgctccgtgattggttctgggccacagcttctgactcactactatgatgatgcacgcactatgtatcaggtcttccggcgtgggctatcaatctccgggaatggcccatgtttggggttccgcaagcctaagcagccttatcaatggctgtcataccaggaagtggctgatagggccgagtttctagggtctgggctcttacagcacaactgtaaggcctgtaccgatcagtttatcggcgtgttcgctcagaaccggcctgagtggattatcgtcgaactagcctgctacacttatagtatggtggtggtgcctttatatgacactcttggtcctggtgcaataaggtacatcatcaacaccgccgatatctccacagttatcgtggataagccgcagaaggcagtactgctcttggaacacgttgagcgcaaagagacgcctgggcttaagctcattatcctgatggatccctttgaggaagcactgaaggaacggggacagaaatgtggcgtggtgatcaaaagcatgcaggccgtagaagattgtggccaggagaaccatcaagcaccagtgcctcctcagcccgacgacttgagtatcgtatgtttcacctcaggaactacaggcaatccaaagggggctatgcttacccatggaaacgtcgtggccgacttttcaggcttcctcaaagtcacagaaagccagtgggcccctacgtgcgctgacgtccacatttcttacctgcctcttgcgcatatgtttgagcggatggttcagagcgtcgtttactgtcatgggggacgggtaggcttttttcagggtgacatcagactcctttcagacgacatgaaggccctgtgtccaacgatttttccagtcgtccctagactgctgaatagaatgtatgacaaaatcttctcccaagccaatacacccctcaagcgatggctgctggagtttgcagccaagcgaaagcaggctgaggttagaagcggcataatccggaacgatagtatttgggatgaactgttctttaataagatccaagccagtctgggcggatgtgtgcgcatgattgtgaccggagctgcccctgcctcacccacagttctcggtttccttagagcagcgctcgggtgccaagtatacgagggttatggccaaacggaatgtaccgcaggctgcacctttacaaccccaggcgactggacatctggacatgtgggcgctccgctcccttgcaaccacattaaactggtcgatgtggaagagttgaactactgggcatgcaaaggcgagggtgagatctgcgtgagggggcctaacgtgttcaaaggctacctcaaagatcccgaccgcacgaaagaggctctggacagtgatggttggctgcacaccggcgacattggtaaatggctgcctgcaggcactctgaagatcatcgatagaaaaaagcacatttttaaactggcgcagggagagtacgtcgcccctgagaagatagaaaatatatatattagatcccaacctgtggctcagatatacgtccacggcgactcattgaaggcttttctggtgggaatcgtcgtgccagatccagaagtgatgccttcctgggcccagaaacggggaatcgaaggcacatacgcagatctttgcaccaataaggacctgaaaaaggctatcctcgaagatatggtgagacttggcaaggaatccgggctccactccttcgaacaagacctcccccaatgcctgattcagatcaaagtgttcagcaaatattag

SEQ ID NO: 81969 - DNA, 2094 bp, Artificial Sequence
  derived and/or modified sequence
atgcaaacccaagagatactgcggattctgcgtctgccggaactgggcgacctcggacaattttttcgatctctgagcgctacgacactggtgtctatgggagccttggctgccattctggcatactggtttacgcacagacccaaagcactccagccaccttgtaacttgcttatgcagagtgaagaggtcgaggactccggaggtgctcgacggagtgtgattggcagcgggccacagctgctgacccactactacgatgacgcgagaaccatgtatcaggtctttaggagaggactctctatctctggcaatggcccatgtcttgggttccggaagcccaagcagccttatcagtggctgtcgtaccaggaggtggccgatcgagccgaatttctgggcagcgggctgctacagcacaattgtaaagcctgcactgatcagtttatcggagtgtttgcacagaacaggccagaatggattattgttgagctcgcctgctacacgtactctatggtcgtcgtgccactctatgatacactcgggccaggcgctattcgttacattatcaatactgctgacatctcaaccgttatcgtggacaagccgcaaaaggccgtgctgctcctggagcacgtagaacgtaaggagactcctggtttgaaacttatcatattgatggaccccttcgaggaagcactcaaagagagggggcagaaatgtggggttgtgataaaatcgatgcaagccgtggaggactgcggtcaggagaaccatcaagcaccggtacctccccagcctgatgatctgagtatcgtctgtttcacatcaggtactacgggcaaccctaagggagctatgctgacccacggcaatgtggtagcagacttcagcggatttttgaaagtcacagagagccagtgggctccgacttgcgccgatgtacacatatcttatttgcccctggcccacatgtttgagcgcatggtgcagtccgtcgtgtattgtcacggtggacgcgtgggcttctttcagggtgatatcaggctgctatctgatgatatgaaagccctgtgtccaacgatttttcctgttgtgccaagattgctcaatcgcatgtacgataagatcttttcccaggctaatacccctctcaaacgatggctgttggagttcgctgcaaagaggaaacaggcagaagtcagatcgggcattatacgtaatgattcaatttgggatgaattatttttcaataaaatccaggcaagcctgggcggatgcgtccgcatgattgtgacgggcgctgcacctgcatcgcctaccgtccttggattcctgcgggctgccctcgggtgccaggtttacgagggttacggccagactgaatgcacagcaggttgtacctttactacacctggcgattggactagtggccacgtgggggcacctctgccttgtaatcatatcaagctcgttgatgtggaggaactcaattactgggcgtgcaaaggcgaaggggagatctgcgtgagaggtccgaacgtgtttaaaggttatctcaaggatccagaccggaccaaggaggctctcgatagcgatggctggctccatacgggggatattggaaagtggctgccggctgggacactcaaaattatagataggaaaaagcacatattcaagctggctcagggggaatatgtagcgcctgaaaagatagagaacatttatataagatcccagccggttgcacagatttacgtgcatggagattcgctgaaggcttttcttgtagggatcgtggtacccgatccagaggtgatgccaagttgggcgcaaaagagggggatcgagggtacatacgcggacttatgcaccaataaagacctgaagaaggcaattctagaggatatggtcaggcttggtaaggaatccggactccattctttcgaacaggtcaaagcaattcacatccattcggacatgttttccgtgcaaaacggacttctgacacctaccctgaaagccaagcgccctgagctgagggaatactttaagaaacagattgaagagttatatagcattagtatgtag

SEQ ID NO: 81970 - DNA, 2094 bp, Artificial Sequence
  derived and/or modified sequence
atgcagacccaggagatcctgagaatcctgagactgcccgagctgggcgacctgggccagttcttcagaagcctgagcgccaccaccctggtgagcatgggcgccctggccgccatcctggcctactggttcacccacagacccaaggccctgcagcccccctgcaacctgctgatgcagagcgaggaggtggaggacagcggcggcgccagaagaagcgtgatcggcagcggcccccagctgctgacccactactacgacgacgccagaaccatgtaccaggtgttcagaagaggcctgagcatcagcggcaacggcccctgcctgggcttcagaaagcccaagcagccctaccagtggctgagctaccaggaggtggccgacagagccgagttcctgggcagcggcctgctgcagcacaactgcaaggcctgcaccgaccagttcatcggcgtgttcgcccagaacagacccgagtggatcatcgtggagctggcctgctacacctacagcatggtggtggtgcccctgtacgacaccctgggccccggcgccatcagatacatcatcaacaccgccgacatcagcaccgtgatcgtggacaagccccagaaggccgtgctgctgctggagcacgtggagagaaaggagacccccggcctgaagctgatcatcctgatggaccccttcgaggaggccctgaaggagagaggccagaagtgcggcgtggtgatcaagagcatgcaggccgtggaggactgcggccaggagaaccaccaggcccccgtgcccccccagcccgacgacctgagcatcgtgtgcttcaccagcggcaccaccggcaaccccaagggcgccatgctgacccacggcaacgtggtggccgacttcagcggcttcctgaaggtgaccgagagccagtgggcccccacctgcgccgacgtgcacatcagctacctgcccctggcccacatgttcgagagaatggtgcagagcgtggtgtactgccacggcggcagagtgggcttcttccagggcgacatcagactgctgagcgacgacatgaaggccctgtgccccaccatcttccccgtggtgcccagactgctgaacagaatgtacgacaagatcttcagccaggccaacacccccctgaagagatggctgctggagttcgccgccaagagaaagcaggccgaggtgagaagcggcatcatcagaaacgacagcatctgggacgagctgttcttcaacaagatccaggccagcctgggcggctgcgtgagaatgatcgtgaccggcgccgcccccgccagccccaccgtgctgggcttcctgagagccgccctgggctgccaggtgtacgagggctacggccagaccgagtgcaccgccggctgcaccttcaccacccccggcgactggaccagcggccacgtgggcgcccccctgccctgcaaccacatcaagctggtggacgtggaggagctgaactactgggcctgcaagggcgagggcgagatctgcgtgagaggccccaacgtgttcaagggctacctgaaggaccccgacagaaccaaggaggccctggacagcgacggctggctgcacaccggcgacatcggcaagtggctgcccgccggcaccctgaagatcatcgacagaaagaagcacatcttcaagctggcccagggcgagtacgtggcccccgagaagatcgagaacatctacatcagaagccagcccgtggcccagatctacgtgcacggcgacagcctgaaggccttcctggtgggcatcgtggtgcccgaccccgaggtgatgcccagctgggcccagaagagaggcatcgagggcacctacgccgacctgtgcaccaacaaggacctgaagaaggccatcctggaggacatggtgagactgggcaaggagagcggcctgcacagcttcgagcaggtgaaggccatccacatccacagcgacatgttcagcgtgcagaacggcctgctgacccccaccctgaaggccaagagacccgagctgagagagtacttcaagaagcagatcgaggagctgtacagcatcagcatgtag

SEQ ID NO: 81971 - DNA, 2004 bp, Artificial Sequence
  derived and/or modified sequence
atgcagacccaggagatcctgagaatcctgagactgcccgagctgggcgacctgggccagttcttcagaagcctgagcgccaccaccctggtgagcatgggcgccctggccgccatcctggcctactggttcacccacagacccaaggccctgcagcccccctgcaacctgctgatgcagagcgaggaggtggaggacagcggcggcgccagaagaagcgtgatcggcagcggcccccagctgctgacccactactacgacgacgccagaaccatgtaccaggtgttcagaagaggcctgagcatcagcggcaacggcccctgcctgggcttcagaaagcccaagcagccctaccagtggctgagctaccaggaggtggccgacagagccgagttcctgggcagcggcctgctgcagcacaactgcaaggcctgcaccgaccagttcatcggcgtgttcgcccagaacagacccgagtggatcatcgtggagctggcctgctacacctacagcatggtggtggtgcccctgtacgacaccctgggccccggcgccatcagatacatcatcaacaccgccgacatcagcaccgtgatcgtggacaagccccagaaggccgtgctgctgctggagcacgtggagagaaaggagacccccggcctgaagctgatcatcctgatggaccccttcgaggaggccctgaaggagagaggccagaagtgcggcgtggtgatcaagagcatgcaggccgtggaggactgcggccaggagaaccaccaggcccccgtgcccccccagcccgacgacctgagcatcgtgtgcttcaccagcggcaccaccggcaaccccaagggcgccatgctgacccacggcaacgtggtggccgacttcagcggcttcctgaaggtgaccgagagccagtgggcccccacctgcgccgacgtgcacatcagctacctgcccctggcccacatgttcgagagaatggtgcagagcgtggtgtactgccacggcggcagagtgggcttcttccagggcgacatcagactgctgagcgacgacatgaaggccctgtgccccaccatcttccccgtggtgcccagactgctgaacagaatgtacgacaagatcttcagccaggccaacacccccctgaagagatggctgctggagttcgccgccaagagaaagcaggccgaggtgagaagcggcatcatcagaaacgacagcatctgggacgagctgttcttcaacaagatccaggccagcctgggcggctgcgtgagaatgatcgtgaccggcgccgcccccgccagccccaccgtgctgggcttcctgagagccgccctgggctgccaggtgtacgagggctacggccagaccgagtgcaccgccggctgcaccttcaccacccccggcgactggaccagcggccacgtgggcgcccccctgccctgcaaccacatcaagctggtggacgtggaggagctgaactactgggcctgcaagggcgagggcgagatctgcgtgagaggccccaacgtgttcaagggctacctgaaggaccccgacagaaccaaggaggccctggacagcgacggctggctgcacaccggcgacatcggcaagtggctgcccgccggcaccctgaagatcatcgacagaaagaagcacatcttcaagctggcccagggcgagtacgtggcccccgagaagatcgagaacatctacatcagaagccagcccgtggcccagatctacgtgcacggcgacagcctgaaggccttcctggtgggcatcgtggtgcccgaccccgaggtgatgcccagctgggcccagaagagaggcatcgagggcacctacgccgacctgtgcaccaacaaggacctgaagaaggccatcctggaggacatggtgagactgggcaaggagagcggcctgcacagcttcgagcaggacctgccccagtgcctgatccagatcaaggtgttcagcaagtactag

SEQ ID NO: 81972 - protein, 697 aa, Artificial Sequence
  derived and/or modified sequence
MQTQEILRILRLPELGDLGQFFRSLSATTLVSMGALAAILAYWFTHRPKALQPPCNLLMQSEEVEDSGGARRSVIGSGPQLLTHYYDDARTMYQVFRRGLSISGNGPCLGFRKPKQPYQWLSYQEVADRAEFLGSGLLQHNCKACTDQFIGVFAQNRPEWIIVELACYTYSMVVVPLYDTLGPGAIRYIINTADISTVIVDKPQKAVLLLEHVERKETPGLKLIILMDPFEEALKERGQKCGVVIKSMQAVEDCGQENHQAPVPPQPDDLSIVCFTSGTTGNPKGAMLTHGNVVADFSGFLKVTEKVIFPRQDDVLISFLPLAHMFERVIQSVVYCHGGRVGFFQGDIRLLSDDMKALCPTIFPVVPRLLNRMYDKIFSQANTPLKRWLLEFAAKRKQAEVRSGIIRNDSIWDELFFNKIQASLGGCVRMIVTGAAPASPTVLGFLRAALGCQVYEGYGQTECTAGCTFTTPGDWTSGHVGAPLPCNHIKLVDVEELNYWACKGEGEICVRGPNVFKGYLKDPDRTKEALDSDGWLHTGDIGKWLPAGTLKIIDRKKHIFKLAQGEYVAPEKIENIYIRSQPVAQIYVHGDSLKAFLVGIVVPDPEVMPSWAQKRGIEGTYADLCTNKDLKKAILEDMVRLGKESGLHSFEQVKAIHIHSDMFSVQNGLLTPTLKAKRPELREYFKKQIEELYSISM

SEQ ID NO: 81973 - protein, 708 aa, Artificial Sequence
  derived and/or modified sequence
MPEFVLSLLEKMQTQEILRILRLPELGDLGQFFRSLSATTLVSMGALAAILAYWFTHRPKALQPPCNLLMQSEEVEDSGGARRSVIGSGPQLLTHYYDDARTMYQVFRRGLSISGNGPCLGFRKPKQPYQWLSYQEVADRAEFLGSGLLQHNCKACTDQFIGVFAQNRPEWIIVELACYTYSMVVVPLYDTLGPGAIRYIINTADISTVIVDKPQKAVLLLEHVERKETPGLKLIILMDPFEEALKERGQKCGVVIKSMQAVEDCGQENHQAPVPPQPDDLSIVCFTSGTTGNPKGAMLTHGNVVADFSGFLKVTEKVIFPRQDDVLISFLPLAHMFERVIQSVVYCHGGRVGFFQGDIRLLSDDMKALCPTIFPVVPRLLNRMYDKIFSQANTPLKRWLLEFAAKRKQAEVRSGIIRNDSIWDELFFNKIQASLGGCVRMIVTGAAPASPTVLGFLRAALGCQVYEGYGQTECTAGCTFTTPGDWTSGHVGAPLPCNHIKLVDVEELNYWACKGEGEICVRGPNVFKGYLKDPDRTKEALDSDGWLHTGDIGKWLPAGTLKIIDRKKHIFKLAQGEYVAPEKIENIYIRSQPVAQIYVHGDSLKAFLVGIVVPDPEVMPSWAQKRGIEGTYADLCTNKDLKKAILEDMVRLGKESGLHSFEQVKAIHIHSDMFSVQNGLLTPTLKAKRPELREYFKKQIEELYSISM

SEQ ID NO: 81974 - protein, 606 aa, Artificial Sequence
  derived and/or modified sequence
MYQVFRRGLSISGNGPCLGFRKPKQPYQWLSYQEVADRAEFLGSGLLQHNCKACTDQFIGVFAQNRPEWIIVELACYTYSMVVVPLYDTLGPGAIRYIINTADISTVIVDKPQKAVLLLEHVERKETPGLKLIILMDPFEEALKERGQKCGVVIKSMQAVEDCGQENHQAPVPPQPDDLSIVCFTSGTTGNPKGAMLTHGNVVADFSGFLKVTEKVIFPRQDDVLISFLPLAHMFERVIQSVVYCHGGRVGFFQGDIRLLSDDMKALCPTIFPVVPRLLNRMYDKIFSQANTPLKRWLLEFAAKRKQAEVRSGIIRNDSIWDELFFNKIQASLGGCVRMIVTGAAPASPTVLGFLRAALGCQVYEGYGQTECTAGCTFTTPGDWTSGHVGAPLPCNHIKLVDVEELNYWACKGEGEICVRGPNVFKGYLKDPDRTKEALDSDGWLHTGDIGKWLPAGTLKIIDRKKHIFKLAQGEYVAPEKIENIYIRSQPVAQIYVHGDSLKAFLVGIVVPDPEVMPSWAQKRGIEGTYADLCTNKDLKKAILEDMVRLGKESGLHSFEQVKAIHIHSDMFSVQNGLLTPTLKAKRPELREYFKKQIEELYSISM

SEQ ID NO: 81975 - DNA, 2094 bp, Artificial Sequence
  derived and/or modified sequence
atgcagacccaggagatactccggattctacgcctcccagagctgggagacctgggccagtttttcaggtcactgtccgcaacgacccttgtatctatgggcgccctcgccgccattcttgcctattggtttactcaccgccccaaagccctgcagccaccctgcaatctgctgatgcagtccgaagaagtggaggatagtggcggcgcaagaagatcagtaatcggaagcgggcctcagctccttactcactattacgacgacgccaggacaatgtaccaggtctttaggcggggcctatcaataagtggtaatggcccctgcctgggctttcgcaaaccaaagcaaccatatcagtggctatcctaccaggaggtcgccgaccgcgctgaattcctcggcagcgggcttctccagcacaactgcaaggcttgtacagaccagttcattggcgtgttcgctcagaaccgtccagagtggattatcgttgaactcgcctgctatacttactccatggttgtagtcccgctctatgacacattgggaccaggagcaatccgctacatcatcaacaccgctgatatatccaccgtgattgtggataaaccacagaaggccgttctgctgctggaacacgtagagcgcaaggaaacccctggcctgaagttgatcattctaatggatcccttcgaggaggccctgaaggagcgcggacagaagtgcggggtagtaatcaagagtatgcaggcagtggaagattgcggtcaggagaatcatcaggcccccgtccctccacaacccgacgatctttcaatagtttgttttacatccggtacgacgggcaaccccaagggagccatgctaactcatgggaatgtggtcgcagatttctccgggttcctgaaggtcactgaaaaagttatctttccaagacaggatgatgtactcatctcatttctgccattggcccatatgtttgaacgggtcatccagtcagtggtgtactgtcacggggggcgcgttggatttttccagggcgacatcagactgctgtcagacgatatgaaagccctgtgccctacaatcttccccgtggtgccacgcctactaaacaggatgtatgataagatctttagtcaagctaacacacccttgaagcgttggttgcttgaatttgccgcgaagcggaagcaggcagaagtaagaagcggcatcataaggaatgactctatctgggacgagctattcttcaacaaaattcaggcgtccctcggcggatgcgtgcgaatgattgtcaccggggcagctcctgcttcccctactgtgctgggatttctcagagccgccctgggctgtcaagtgtacgagggctacggccaaacagaatgtactgctggttgtaccttcacaaccccgggcgattggaccagcggacatgtgggagcccctctgccgtgcaaccatatcaagttagtcgacgttgaggagttgaactactgggcttgcaagggagagggagagatatgtgtgcgagggccaaatgtgttcaagggctacctgaaggatccagacagaaccaaggaggccctggactcagacgggtggctccacacaggtgatatcgggaaatggctgccagctgggaccctcaagatcatcgatagaaagaagcacatctttaaactagctcagggagaatacgtggcaccagaaaaaatagagaacatatacatccgatctcagcctgtggcccaaatttacgtgcatggagattcactcaaagccttcctcgtgggcatcgtggtgcccgatccggaagtcatgccgtcctgggcacaaaaaaggggaatagaaggcacgtatgctgacctttgcactaataaagatctaaagaaggctatcttagaggatatggttagactgggtaaggaatcaggtctccacagcttcgagcaggtcaaagccatccacattcattccgatatgttttctgttcagaatggtcttcttacgccaacgctaaaagccaaaagacctgaactccgggagtactttaaaaagcagatcgaagaactatatagtatctccatgtag

SEQ ID NO: 81976 - DNA, 2127 bp, Artificial Sequence
  derived and/or modified sequence
atgccagaatttgttttgtcgctccttgaaaaaatgcaaactcaggagattttacggatcctgagactaccagaactgggggacttgggacagttttttcgctcccttagcgccactactttggtgagtatgggcgcactcgccgccatcctggcctactggtttacacacaggcctaaagcgctccagcctccctgtaaccttttgatgcagtctgaggaggtggaggattctgggggggcgcgccgatccgtcattggctcaggcccccagcttctgacccattactatgatgacgctagaacaatgtaccaagtcttccgccgggggctctctatttctggtaacggcccgtgtttaggattccggaaaccgaagcaaccttatcagtggttgtcctatcaggaagtggccgatagagctgagtttctaggctctgggttgctgcagcacaattgtaaagcctgcacagaccaatttatcggtgtcttcgcacagaaccgaccagagtggatcattgtggaactcgcctgctacacctactccatggttgttgtgccactctacgatactctggggcccggggccattcggtatatcatcaacacggcggacatttcaacggtcatcgtggacaagcctcaaaaggcagtattgctactggagcacgtcgagaggaaagaaacacccggccttaaattgatcatactcatggatcctttcgaggaggctctgaaagaaagaggacagaagtgcggcgttgtaattaaaagcatgcaggctgtggaggattgtggtcaggagaaccatcaggcaccagttccacctcagcctgatgacctctctatagtctgtttcactagtgggacaacaggtaacccgaaaggggccatgctaacacatgggaatgttgtggccgacttcagtggctttttaaaagtcacagagaaagtcatttttccaaggcaggacgatgtgctgatatccttccttcctttggctcatatgttcgagcgcgtgatccagagcgtcgtgtactgccacggcggccgcgttggcttctttcagggagacatcagactgttaagcgatgatatgaaagctctatgtccgaccatatttccggtggtccctcggcttctcaaccggatgtacgataagattttctcccaggccaatactcctcttaagaggtggctgctggagttcgccgccaagcgcaaacaagccgaggtaagatccgggattattagaaacgacagcatctgggacgagctatttttcaataagatccaggcctccctgggtggatgcgtgcggatgattgtgacaggtgctgccccagccagccccaccgtattaggctttctgcgcgcggccctgggctgtcaggtgtatgaaggatacggccaaaccgagtgcacagccggttgtacttttactacacccggagactggacgagcgggcatgtgggtgcaccattgccatgcaaccatatcaagctggtggacgttgaagaacttaactattgggcctgtaagggtgagggcgagatttgtgtaagaggaccaaacgtttttaagggatatctcaaagatcctgacaggactaaagaagcattagactctgacggctggctgcatactggcgatatcgggaaatggctgcctgcgggtacgttgaagatcatagaccgtaaaaagcacattttcaaactcgcccagggggagtacgttgccccagagaaaatagaaaatatttatatccggtcccaacctgtcgcacagatttatgtgcacggagacagcctgaaggcctttttagtgggtattgtggtacctgacccagaggttatgcccagttgggctcagaaacgggggatcgagggaacctatgcggatttgtgcaccaacaaagacctcaagaaggccatcctggaagacatggtgcgcctagggaaagaaagcgggctgcactcattcgagcaagtgaaagccatccacatccacagtgacatgttcagtgtgcagaacggattgctgactcccacactcaaggccaagcggccggaactgcgggaatacttcaaaaaacagattgaggaactgtattcaatatccatgtag

SEQ ID NO: 81977 - DNA, 2139 bp, Artificial Sequence
  derived and/or modified sequence
atgcagacccaggagattctgcgaatcctaaggctaccggagctcggggacctggggcaattcttccgatccctgagcgcaactacgctggtttccatgggggctctggccgctattctggcgtactggttcacacaccgtcctaaagcactgcaaccgccttgtaacctgctcatgcagtccgaggaggtggaagactccgggggagctcgccggagcgtcattggctcaggaccccagcttctcacgcattattatgacgacgctcgcaccatgtaccaagtgtttcgccggggcctgtcaattagcggcaacggtccttgcctggggttcaggaaaccaaaacaaccctatcagtggttgagctaccaagaggtcgccgacagagccgagtttctcgggagtggacttctgcagcacaactgtaaagcttgcacagatcaattcatcggcgtatttgcccaaaacaggccagagtggatcatcgtggagttggcctgttatacttattccatggttgtggttccactttatgatacgctcggaccgggcgcgattcggtatataattaataccgggttgtcctgccaggaaggagcttccgcaacggcctccactcaggcagacatcagtaccgtgatcgtagacaaacctcagaaggctgtgttgctgctggagcacgtggaacgaaaggagacccctggattaaagttgatcatccttatggacccattcgaggaagccttaaaagaaagagggcagaagtgcggcgtcgtcatcaagtctatgcaagccgttgaggattgtggacaagaaaaccatcaagcccccgtaccccctcagcctgacgatctgtccatcgtttgtttcaccagcggtactactggcaatcccaagggcgcgatgctaacacacggcaatgtggtggcagatttctctggctttttgaaagtcaccgaaaaggtgatctttccaaggcaggacgatgtgctgataagctttctaccacttgcgcacatgttcgagcgggtgattcagagcgtggtgtactgtcacggtgggcgggtcggattcttccagggggatattaggcttctcagtgatgacatgaaggccctttgcccaaccatctttcccgtggtgccaagacttctcaacaggatgtatgacaaaattttttcccaggcgaataccccgctaaagcgttggctgcttgaattcgctgcgaagcgcaaacaagctgaagtgcggtctggcattataaggaacgattccatatgggacgagctgttcttcaacaagatccaggcctctctcggtgggtgtgtcaggatgatcgtgacaggagccgctccagccagccccacagtgttaggttttctgcgcgctgcgctcggttgccaggtctacgaaggctacggccaaacagaatgtaccgccggatgtacattcaccacaccgggggattggacttctggacatgtaggcgcccctctcccttgcaatcacatcaagttggtggatgtggaggagctgaactattgggcatgcaagggcgagggcgagatctgcgtacgaggtcccaatgtgttcaagggctacttgaaagatccagaccggactaaagaggccctggattcagatgggtggttgcacacaggggacattggaaaatggctgcccgcgggcactctgaaaataattgataggaaaaagcatatattcaaactggcacaaggcgagtacgtcgcaccagaaaaaattgagaatatttacatccggtcccagcctgtggctcagatctacgttcacggcgatagcctgaaagccttcctagtcggcatagtggtgccagatccggaggtcatgccttcttgggctcaaaagaggggtattgaaggtacctacgctgacctgtgcacgaataaggatctcaagaaggcgatcctggaagatatggtgaggctgggaaaggaaagcggtcttcactctttcgagcaagtgaaagccatccatatacactccgacatgttctccgttcaaaacgggctcctgactcccacactcaaagccaagaggcctgagttgcgagagtactttaaaaagcagatcgaggaattgtacagcatcagcatgtag

SEQ ID NO: 81978 - DNA, 1821 bp, Artificial Sequence
  derived and/or modified sequence
atgtaccaagtgtttcgccggggtctgagtatcagcggcaacggcccatgtctcggatttcggaagcctaagcagccctatcaatggctgagctaccaggaggtggccgatagggcagagtttctcggctccggtctgttgcagcataattgcaaggcttgcacagatcagtttatcggagtgttcgcacagaaccggcctgaatggatcatcgtcgagctcgcatgttatacctatagtatggtggtggtgcccctgtatgacacgttgggtccaggagctataaggtatatcattaataccgcagacatctctaccgtcatcgtggataaaccacagaaagcggtgctgcttctggagcatgtggagcggaaggagaccccgggtcttaagctgatcattcttatggacccattcgaggaggccctcaaggagcgggggcagaagtgcggcgttgtgataaaatctatgcaggcagtggaagactgcggacaggagaaccatcaggctccggttccaccgcagccagacgaccttagcattgtgtgttttacatcagggacgaccggtaatcctaagggggccatgctgacacacggcaacgtggtcgctgacttctctggttttttgaaagtgactgagaaggtaatcttcccaaggcaagacgacgtgttgatcagtttcttgccactggcgcatatgttcgagagagtgatccagtccgttgtttactgtcacggtggcagggttggtttctttcagggagatattaggctgttaagtgatgacatgaaggccctctgtcctaccatctttcccgtggtgccccgcctgctgaacagaatgtatgataagatattcagccaggccaataccccattaaaaagatggctcctcgagttcgcggccaagcgcaaacaggctgaagtgcgctctggaatcatccggaatgattccatctgggatgagctgtttttcaataagattcaggcatccctgggtgggtgtgtgcgtatgatcgttactggcgctgcccccgcgtcacctacagtgttagggtttctgcgggcggcacttggatgccaggtgtatgagggatacggccagactgagtgcaccgccggctgcacatttaccactcccggagattggacgtctggccacgtaggtgcccccctcccctgcaaccacataaaactcgtggatgtggaggaactcaattactgggcttgtaaaggtgaaggtgaaatctgcgtaaggggccctaatgtgtttaaaggatatctgaaagatccagatagaacaaaggaggccctcgattcagacggatggctgcacacgggtgacatcggcaaatggctgcccgctggaaccttgaaaatcatcgatagaaagaaacatatcttcaaactggctcagggggagtatgttgcaccggagaagattgagaacatttacatccggtcacagccagtggcccagatatatgtccatggagacagcctgaaagcctttttggttgggattgtcgtgccggatcccgaagtgatgccgagctgggcccagaaaagaggtattgagggaacttatgccgacctctgcacgaataaggacctgaagaaagcaattcttgaagatatggtgagattgggcaaagagagcggccttcacagcttcgaacaggtaaaggcaatccacatacacagtgatatgtttagtgtgcagaatggtctcctcactcctaccctcaaagccaaacgccccgagcttcgcgagtacttcaagaaacagattgaggagttatattctatttcaatgtag

SEQ ID NO: 81979 - DNA, 2094 bp, Artificial Sequence
  derived and/or modified sequence
atgcagacccaggagatcctgcgcatcctgcggctgcctgagctgggggacctgggccagttcttccgcagcctgagcgccaccaccctggtgtccatgggcgccctggccgccatcctggcctactggttcacccaccggcccaaggccctgcagcccccctgcaacctgctgatgcagagcgaggaggtggaggacagcggcggggccaggagatctgtgattggcagcggcccccagctgctgacccactactatgatgatgcccggaccatgtaccaggtgttcagaagaggcctgagcatctctggaaatggcccctgcctgggcttcaggaagcccaagcagccctaccagtggctgagctaccaggaggtggccgacagagctgagttcctgggcagcggcctgctgcagcacaactgcaaggcctgcacagaccagttcatcggcgtgtttgcccagaacagacctgagtggatcatcgtggagctggcctgctacacctacagcatggtggtggtgcccctgtatgacaccctgggccctggggccatccgctacatcatcaacacagctgacatcagcacagtgattgtggacaagccccagaaggctgtgctgctgctggagcacgtggagaggaaggagaccccaggcctgaagctgatcatcctgatggacccctttgaggaggccctgaaggagcggggccagaagtgtggggtggtgatcaagtccatgcaggccgtggaggactgtggccaggagaaccaccaggcccctgtgcccccccagccagatgacctgagcatcgtgtgcttcaccagcggcaccaccggcaaccccaagggggccatgctgacccacggcaatgtggtggccgacttcagcggcttcctgaaggtgacagagaaggtgatcttcccccggcaggatgatgtgctgatctccttcctgcccctggcccacatgtttgagagggtcatccagagcgtggtgtactgccacggcggccgggtgggcttcttccagggcgacatccggctgctgagtgatgacatgaaggccctgtgccccaccatcttccctgtggtgccccggctgctgaacaggatgtatgacaagatcttcagccaggccaacacccccctgaagcgctggctgctggagtttgctgccaagaggaagcaggccgaggtgcgcagcggcatcatcagaaatgacagcatctgggatgagctgttcttcaacaagatccaggccagcctgggcggctgtgtgaggatgattgtgactggagctgccccagccagccccaccgtgctgggcttcctgcgggccgccctgggctgccaggtgtatgagggctacggccagacagagtgcacagctggctgcaccttcaccacccctggggactggaccagcggccacgtgggcgcccccctgccctgcaaccacatcaagctggtggatgtggaggagctgaactactgggcctgcaagggggagggggagatctgtgtgcggggccccaacgtgttcaagggctacctgaaggaccctgacaggaccaaggaggccctggacagtgatggctggctgcacactggagacatcggcaagtggctgcctgctggcaccctgaagatcatcgacaggaagaagcacatcttcaagctggcccagggcgagtatgtggcccctgagaagattgagaacatctacatccgcagccagcctgtggcccagatctacgtgcatggagacagcctgaaggccttcctggtgggcatcgtggtgcctgaccctgaggtgatgcccagctgggcccagaagaggggcatcgagggcacctacgccgacctgtgcaccaacaaggacctgaagaaggccatcctggaggacatggtgcggctgggcaaggagagcggcctgcacagctttgagcaggtgaaggccatccacatccacagcgacatgttttctgtgcagaatggcctgctgacccccaccctgaaggccaagaggcctgagctgcgggagtacttcaagaagcagatcgaggagctgtacagcatctccatgtag

SEQ ID NO: 81980 - DNA, 2127 bp, Artificial Sequence
  derived and/or modified sequence
atgcctgagtttgtgctgagcctgctggagaagatgcagacccaggagatcctgcgcatcctgcggctgcctgagctgggggacctgggccagttcttccgcagcctgagcgccaccaccctggtgtccatgggcgccctggccgccatcctggcctactggttcacccaccggcccaaggccctgcagcccccctgcaacctgctgatgcagagcgaggaggtggaggacagcggcggggcccggcgcagcgtcatcggcagcggcccccagctgctgacccactactatgatgatgcccggaccatgtaccaggtgttccggcggggcctgagcatctctggaaatggcccctgcctgggcttcaggaagcccaagcagccctaccagtggctgagctaccaggaggtggccgacagagctgagttcctgggcagcggcctgctgcagcacaactgcaaggcctgcacagaccagttcatcggcgtgtttgcccagaacagacctgagtggatcatcgtggagctggcctgctacacctacagcatggtggtggtgcccctgtatgacaccctgggccctggggccatccgctacatcatcaacacagctgacatcagcaccgtcatcgtggacaagccccagaaggctgtgctgctgctggagcacgtggagaggaaggagaccccaggcctgaagctgatcatcctgatggacccctttgaggaggccctgaaggagcggggccagaagtgtggggtggtgatcaagtccatgcaggccgtggaggactgtggccaggagaaccaccaggcccctgtgcccccccagccagatgacctgagcatcgtgtgcttcaccagcggcaccactggaaaccccaagggggccatgctgacccatggaaatgtggtggccgacttcagcggcttcctgaaggtgacagagaaggtgatcttcccccggcaggatgatgtgctgatctccttcctgcccctggcccacatgtttgagagggtcatccagagcgtggtgtactgccacggcggccgggtgggcttcttccagggcgacatccggctgctgagtgatgacatgaaggccctgtgccccaccatcttccctgtggtgccccggctgctgaacaggatgtatgacaagatcttcagccaggccaacacccccctgaagcgctggctgctggagtttgctgccaagaggaagcaggccgaggtgcgcagcggcatcatcagaaatgacagcatctgggatgagctgttcttcaacaagatccaggccagcctgggcggctgtgtgaggatgattgtgactggagctgccccagccagccccaccgtgctgggcttcctgcgggccgccctgggctgccaggtgtatgagggctacggccagacagaatgtacagctggctgcaccttcaccacccctggggactggaccagcggccacgtgggcgcccccctgccctgcaaccacatcaagctggtggatgtggaggagctgaactactgggcctgcaagggggagggggagatctgtgtgcggggccccaacgtgttcaagggctacctgaaggaccctgacaggaccaaggaggccctggacagtgatggctggctgcacactggagacatcggcaagtggctgcctgctggcaccctgaagatcatcgacaggaagaagcacatcttcaagctggcccagggcgagtatgtggcccctgagaagattgagaacatctacatccgcagccagcctgtggcccagatctacgtgcacggggacagcctgaaggccttcctggtgggcatcgtggtgcctgaccctgaggtgatgcccagctgggcccagaagaggggcatcgagggcacctatgctgacctgtgcaccaacaaggacctgaagaaggccatcctggaggacatggtgcggctgggcaaggagagcggcctgcacagctttgagcaggtgaaggccatccacatccacagcgacatgttttctgtgcagaatggcctgctgacccccaccctgaaggccaagaggcctgagctgcgggagtacttcaagaagcagatcgaggagctgtacagcatctccatgtag

SEQ ID NO: 81981 - DNA, 2139 bp, Artificial Sequence
  derived and/or modified sequence
atgcagacccaggagatcctgcgcatcctgcggctgcctgagctgggggacctgggccagttcttccgcagcctgagcgccaccaccctggtgtccatgggcgccctggccgccatcctggcctactggttcacccaccggcccaaggccctgcagcccccctgcaacctgctgatgcagagcgaggaggtggaggacagcggcggggccaggagatctgtgattggcagcggcccccagctgctgacccactactatgatgatgcccggaccatgtaccaggtgttcagaagaggcctgagcatctctggaaatggcccctgcctgggcttcaggaagcccaagcagccctaccagtggctgagctaccaggaggtggccgacagagctgagttcctgggcagcggcctgctgcagcacaactgcaaggcctgcacagaccagttcatcggcgtgtttgcccagaacagacctgagtggatcatcgtggagctggcctgctacacctacagcatggtggtggtgcccctgtatgacaccctgggccctggggccatccgctacatcatcaacacaggcctgagctgccaggagggcgccagcgccacagccagcacccaggccgacatcagcaccgtcatcgtggacaagccccagaaggctgtgctgctgctggagcacgtggagaggaaggagaccccaggcctgaagctgatcatcctgatggacccctttgaggaggccctgaaggagcggggccagaagtgtggggtggtgatcaagtccatgcaggccgtggaggactgtggccaggagaaccaccaggcccctgtgcccccccagccagatgacctgagcatcgtgtgcttcaccagcggcaccactggaaaccccaagggggccatgctgacccatggaaatgtggtggccgacttcagcggcttcctgaaggtgacagagaaggtgatcttcccccggcaggatgatgtgctgatctccttcctgcccctggcccacatgtttgagagggtcatccagagcgtggtgtactgccacggcggccgggtgggcttcttccagggcgacatccggctgctgagtgatgacatgaaggccctgtgccccaccatcttccctgtggtgccccggctgctgaacaggatgtatgacaagatcttcagccaggccaacacccccctgaagcgctggctgctggagtttgctgccaagaggaagcaggccgaggtgcgcagcggcatcatcagaaatgacagcatctgggatgagctgttcttcaacaagatccaggccagcctgggcggctgtgtgaggatgattgtgactggagctgccccagccagccccaccgtgctgggcttcctgcgggccgccctgggctgccaggtgtatgagggctacggccagacagaatgtacagctggctgcaccttcaccacccctggggactggaccagcggccacgtgggcgcccccctgccctgcaaccacatcaagctggtggatgtggaggagctgaactactgggcctgcaagggggagggggagatctgtgtgcggggccccaacgtgttcaagggctacctgaaggaccctgacaggaccaaggaggccctggacagtgatggctggctgcacactggagacatcggcaagtggctgcctgctggcaccctgaagatcatcgacaggaagaagcacatcttcaagctggcccagggcgagtatgtggcccctgagaagattgagaacatctacatccgcagccagcctgtggcccagatctacgtgcacggggacagcctgaaggccttcctggtgggcatcgtggtgcctgaccctgaggtgatgcccagctgggcccagaagaggggcatcgagggcacctatgctgacctgtgcaccaacaaggacctgaagaaggccatcctggaggacatggtgcggctgggcaaggagagcggcctgcacagctttgagcaggtgaaggccatccacatccacagcgacatgttttctgtgcagaatggcctgctgacccccaccctgaaggccaagaggcctgagctgcgggagtacttcaagaagcagatcgaggagctgtacagcatctccatgtag

SEQ ID NO: 81982 - DNA, 1821 bp, Artificial Sequence
  derived and/or modified sequence
atgtaccaggtgttccggcggggcctgagcatctctggaaatggcccctgcctgggcttcaggaagcccaagcagccctaccagtggctgagctaccaggaggtggccgacagagctgagttcctgggcagcggcctgctgcagcacaactgcaaggcctgcacagaccagttcatcggcgtgtttgcccagaacagacctgagtggatcatcgtggagctggcctgctacacctacagcatggtggtggtgcccctgtatgacaccctgggccctggggccatccgctacatcatcaacacagctgacatcagcaccgtcatcgtggacaagccccagaaggctgtgctgctgctggagcacgtggagaggaaggagaccccaggcctgaagctgatcatcctgatggacccctttgaggaggccctgaaggagcggggccagaagtgtggggtggtgatcaagtccatgcaggccgtggaggactgtggccaggagaaccaccaggcccctgtgcccccccagccagatgacctgagcatcgtgtgcttcaccagcggcaccactggaaaccccaagggggccatgctgacccatggaaatgtggtggccgacttcagcggcttcctgaaggtgacagagaaggtgatcttcccccggcaggatgatgtgctgatctccttcctgcccctggcccacatgtttgagagggtcatccagagcgtggtgtactgccacggcggccgggtgggcttcttccagggcgacatccggctgctgagtgatgacatgaaggccctgtgccccaccatcttccctgtggtgccccggctgctgaacaggatgtatgacaagatcttcagccaggccaacacccccctgaagcgctggctgctggagtttgctgccaagaggaagcaggccgaggtgcgcagcggcatcatcagaaatgacagcatctgggatgagctgttcttcaacaagatccaggccagcctgggcggctgtgtgaggatgattgtgactggagctgccccagccagccccaccgtgctgggcttcctgcgggccgccctgggctgccaggtgtatgagggctacggccagacagaatgtacagctggctgcaccttcaccacccctggggactggaccagcggccacgtgggcgcccccctgccctgcaaccacatcaagctggtggatgtggaggagctgaactactgggcctgcaagggggagggggagatctgtgtgcggggccccaacgtgttcaagggctacctgaaggaccctgacaggaccaaggaggccctggacagtgatggctggctgcacactggagacatcggcaagtggctgcctgctggcaccctgaagatcatcgacaggaagaagcacatcttcaagctggcccagggcgagtatgtggcccctgagaagattgagaacatctacatccgcagccagcctgtggcccagatctacgtgcacggggacagcctgaaggccttcctggtgggcatcgtggtgcctgaccctgaggtgatgcccagctgggcccagaagaggggcatcgagggcacctatgctgacctgtgcaccaacaaggacctgaagaaggccatcctggaggacatggtgcggctgggcaaggagagcggcctgcacagctttgagcaggtgaaggccatccacatccacagcgacatgttttctgtgcagaatggcctgctgacccccaccctgaaggccaagaggcctgagctgcgggagtacttcaagaagcagatcgaggagctgtacagcatctccatgtag

SEQ ID NO: 81983 - DNA, 2094 bp, Artificial Sequence
  derived and/or modified sequence
atgcagacccaggagatcctgcggatcctgcggctgcccgagctgggagatctcgggcagttcttccggagtctgtctgccactaccctggtctccatgggagcccttgccgcaattcttgcatattggttcacccatagacccaaggctctacagccgccgtgcaacctgctgatgcagagcgaggaggttgaagattccggcggagccagacgatctgttatcggctctggacctcaactgttgacccattactatgacgatgctcgaactatgtaccaagtgtttaggaggggcttgtctatatccggcaacggtccctgtctgggattcagaaagcctaaacagccctatcagtggttatcctaccaggaggtcgccgatcgggctgaatttttggggtcaggtctgctgcaacataattgcaaagcgtgcacggatcagtttattggcgtcttcgcccagaatagacccgagtggataattgtagaactggcctgctatacatactcaatggtcgttgtacccctttatgacacacttggtccaggggctattaggtacattatcaataccgccgacataagtacagtcattgttgataagccacagaaggccgtcctcctgctggaacacgtagagaggaaagagacccccgggctcaagctaatcattttgatggaccccttcgaggaagctctcaaagagagaggacagaaatgcggagtggtgattaaaagcatgcaggctgttgaagattgcggccaggaaaaccatcaggcacccgtgcccccacagcctgacgacctgagcatagtttgcttcacatccggtactactggcaaccccaagggagctatgctgacacacggtaacgtggttgcagacttttctggctttttaaaggtaaccgaaaaagtgatctttcctcgtcaggatgacgtgcttatttccttcttaccattggcccacatgtttgaaagggtaatacaatccgtggtgtattgtcacggagggagagtgggcttttttcagggcgatataaggctgctcagtgacgacatgaaagccctctgccccacgatctttccggttgtgccaaggttacttaataggatgtacgacaagatcttctcgcaagccaatacccctcttaagaggtggctgttggagtttgccgccaaaagaaaacaggccgaggtgcgcagcggaatcattaggaacgactccatatgggacgagctgttcttcaataagatacaagcatctctcggagggtgcgtcagaatgattgtcactggagccgcccccgccagccctacggtcctgggattcttacgtgctgccctcggctgccaggtttacgaaggatatggtcagaccgaatgtaccgccggttgcacattcaccaccccgggcgattggactagcgggcatgtgggagccccgctgccatgtaatcacattaagctggtcgacgtggaggaactgaactactgggcatgtaagggcgaaggggaaatttgcgtgcgaggacccaatgtgtttaaaggctacctgaaagaccccgataggacaaaggaagccctggacagcgacggctggctccacaccggcgatataggcaagtggctgccagccggtacactcaaaataatcgataggaagaagcacatctttaaactcgcgcaaggagaatacgttgcacccgagaaaatagagaatatctacatccgtagtcagccagtggcacagatctacgtgcatggagacagccttaaagcttttcttgtgggcatcgtcgtccccgatcctgaagttatgccctcttgggcccaaaagagggggatagagggaacctacgcggatttgtgtacaaacaaagacctaaaaaaggccatccttgaggacatggtacggcttggcaaggagtctggcctgcactcttttgaacaggttaaggctatccacatccacagtgatatgttctcagttcaaaatgggctcttgactccaacgctgaaggcaaagcggcctgaactgcgagaatattttaagaaacaaattgaggaactttacagtatttctatgtag

SEQ ID NO: 81984 - DNA, 2127 bp, Artificial Sequence
  derived and/or modified sequence
atgcccgagttcgtgctgagcctgctggagaagatgcagacccaggaaattttgcgtatcctccgcctccctgaattaggtgatcttggacagttctttagatcactctctgcaacaacccttgtgtccatgggggcattagccgcaatcctggcgtattggtttacccaccgacccaaagccctccaaccgccgtgtaacctgttaatgcagtctgaagaagtagaggattctggcggggctagacggtccgttatcgggagtggaccacagctactgactcactactacgacgacgcccgtacaatgtatcaggtatttcgacgtggactcagcatttccggcaacggcccatgcttgggcttccggaagcccaaacagccctatcagtggcttagctatcaggaggtggctgatcgggcagaattccttggatccggcctcctccaacataattgcaaagcctgtacagaccagtttatcggagtatttgcccagaatagaccagaatggatcattgtggagctggcttgctatacatattctatggtcgtggtccccttatacgatactctcggccctggcgctatccgctacattattaacactgccgatatctcgactgtgatagtcgacaaacctcagaaggctgtattactgctggagcacgtggaaagaaaagagactccaggcctcaagctaataatcctcatggatccctttgaggaggccctcaaggagcgcggccagaagtgtggagtggtcataaaaagtatgcaggctgtggaggattgcggccaggagaaccaccaggctccagttcccccccagccagacgacctcagcatcgtgtgttttacctccggcacgactggcaatccaaaaggcgccatgctgactcacgggaacgtggttgccgacttcagcggtttccttaaagtgactgagaaggtaatatttcctcggcaggacgacgtcctcattagttttctccctctggcacatatgtttgagcgtgtgatccagagcgtggtttactgtcacggaggcagggttgggtttttccagggggatattcgcttgctgtcagatgacatgaaagccctctgccccacaatcttccccgtggtaccccggttgctgaaccgaatgtacgacaaaatctttagtcaagccaatactccgctaaaacggtggctgttagagtttgctgctaagcggaagcaggccgaggtgcgctcaggcatcatccggaatgactctatctgggatgaactgtttttcaacaagatccaggcctcattgggtggctgcgtccgcatgattgtgactggggctgcacccgcgtcacccactgtcctggggtttcttagagccgcgctgggctgccaggtttacgaaggctatggacagacagagtgcactgccgggtgcaccttcacgacaccaggagattggactagcggtcacgtgggggcacctctgccctgcaaccacatcaagctggttgacgtagaggagctgaattattgggcatgtaaaggagagggggaaatctgtgttcgagggcctaatgtttttaaaggataccttaaagatccggaccggacaaaagaagccttggatagtgacggatggctccacaccggtgatattgggaagtggttgccagctgggacacttaaaattattgataggaagaagcatatcttcaagctagctcaaggggaatatgttgccccagaaaagattgagaacatctacatacgctcccagcccgttgcccaaatttacgtacacggagattccctgaaggcgtttcttgtgggcattgtggtgcccgatcctgaagtaatgcccagctgggcgcagaagcgtggtattgaaggcacatacgcggacctgtgcacaaataaggatttgaaaaaagccattctggaggatatggtcagactcggtaaggagagcggcctccactcgtttgagcaagtgaaggcgattcacattcattccgacatgttctccgtccagaacggtctccttacccccaccttgaaagctaagcgaccggagctgagggaatactttaaaaagcagatcgaagaactctattctatatcgatgtag

SEQ ID NO: 81985 - DNA, 2139 bp, Artificial Sequence
  derived and/or modified sequence
atgcagacccaggagatcctgcggatcctgcggctgcccgagctgggggacttaggccagttttttcgctctttaagcgcaaccacactggtcagtatgggagcgctcgccgctatactcgcatactggttcactcaccgacccaaggcactgcagccaccatgcaatctgcttatgcagtcagaagaggttgaagattcagggggggccaggcgctccgtgatcgggagcggaccacagttgctcacacactattatgatgacgcccgtacaatgtatcaagtgtttcgccgcggcctgagcattagcgggaatggcccttgtctgggattccggaagcccaaacagccctatcagtggctctcataccaggaggtcgccgaccgagccgagttcctgggaagcggactgctacagcataattgcaaggcctgtacggaccagtttatcggggtgttcgcgcagaacagacctgaatggatcatcgtcgagttagcttgctacacctattccatggttgtggttcctctttacgatacgctgggacctggtgctatccgctacatcataaacaccggactatcctgtcaggagggtgcgtccgcaactgccagcactcaggcagatatcagcacggttatcgttgacaaaccccaaaaggcagttttactcctggagcatgtggaaaggaaggaaacaccaggcctcaagcttatcattcttatggatcctttcgaagaagctctgaaggagcggggacagaagtgcggagtcgttatcaagtctatgcaggcagtcgaggactgcggacaggagaaccaccaagcccctgtccccccccagccggacgacctgagtattgtttgcttcacttccggaactaccggcaatcccaagggagccatgctgactcatggaaatgtggtagcagacttttcaggcttcctaaaagtcacagaaaaagtaattttcccccgacaggatgacgtcctgatcagttttttgcctctcgcccacatgttcgagcgcgtgatccagtctgtggtgtattgtcatgggggaagagttggatttttccaaggtgacataagactgttatcagatgacatgaaggccctatgccctacaatcttcccagtcgtaccccggctcctcaacagaatgtacgataagatttttagccaagcaaacacaccgctgaagcgctggctgctagaattcgccgcgaagcgcaaacaagccgaggtgcgctcagggattataaggaacgactctatatgggacgaactgtttttcaataagatccaagcctccctgggtggttgcgtaaggatgatcgtcaccggtgctgctcctgcttctccaactgtgcttggattcctgagagccgccttgggatgtcaggtgtatgagggctatggacagaccgaatgcaccgctggctgtacttttaccaccccaggcgactggaccagcggtcacgtgggggctccgctgccatgcaatcatatcaagctcgttgacgtggaagagctcaattactgggcgtgcaagggggagggcgagatctgcgtgcgtggccctaatgtttttaagggctacttaaaagatcccgacaggacaaaggaagcccttgacagtgacggctggttgcacaccggagacattggcaagtggctgcccgcgggcactctcaagatcatcgaccgaaaaaaacacatctttaaactggcccagggcgagtatgtggctcccgagaagattgaaaacatctacattagatctcaacctgtggcccagatctatgtgcatggagacagcttgaaggctttcctggtaggaatagtggtgcccgatccggaggtcatgccctcctgggcccaaaagaggggaattgaaggtacctatgcagacctgtgcacaaataaagacctgaaaaaggccatccttgaggatatggttagacttggaaaggagtctggcttgcacagctttgaacaagttaaggcgatacatatacatagtgacatgttcagtgtgcagaatgggctcctcacaccgacactcaaggccaagagaccagagttgagggaatatttcaagaaacaaatagaagagctctactccatatccatgtag

SEQ ID NO: 81986 - DNA, 1821 bp, Artificial Sequence
  derived and/or modified sequence
atgtaccaggtgttccggcggggcctgagcatcagcggcaacggcccttgtctgggctttaggaaaccgaaacagccctaccagtggctgtcatatcaggaagtggcagaccgagctgagtttctggggagtggcctcctgcaacacaactgcaaagcttgtaccgaccagtttataggagtgttcgcccaaaacaggcccgaatggattattgtggaattggcatgctacacctactccatggtggttgtccccttgtatgacacgctgggtcctggtgccattaggtatattataaatacggccgacatctccacagtgattgtagacaagcctcaaaaagctgtgctgctgctcgagcacgttgaacgcaaagagacacccggactgaagctgataatacttatggatccgttcgaggaggctttaaaggaacggggccaaaaatgtggcgtagtgatcaagtcgatgcaggccgttgaggactgcggccaagagaatcaccaagcacctgtgccaccgcagcctgatgacttgtcaatcgtctgcttcacaagcggaacgactggcaaccctaaaggtgcaatgctgactcacggcaatgtcgttgcagatttttcgggctttttaaaagtgacagagaaagtcatttttccaaggcaagacgacgttctcatctcatttctcccccttgcacacatgttcgagcgggtcatccagagcgtcgtttattgccacggcggccgggttggcttctttcagggcgatattaggctgctgagcgatgatatgaaagcactctgcccaacaatcttccccgtagttcctcgtctgctcaatcggatgtatgacaaaattttttcccaagcaaatacgcccctgaagcgatggctcctggaattcgcggccaagcgcaagcaggcagaagttcgttcggggattattaggaatgactcaatatgggacgaactgttctttaataagatccaggcatccctgggtggatgtgttcggatgatcgtaacaggcgcagcgccagcatctccaacagtgctcggctttctgagggccgcccttggatgtcaagtttatgaaggatatgggcagactgagtgtacagccggctgtactttcacgacgcctggtgattggacttctggtcatgtgggcgcacccctaccctgtaaccacatcaaactcgtggatgtggaggagcttaactactgggcttgtaagggggagggagaaatatgcgtcagggggccaaacgtgttcaagggttacctgaaagatccagatcgtaccaaggaggcactcgatagcgatgggtggcttcacaccggggatattggtaaatggctccccgccggaaccctcaagattatcgatcggaagaagcacatctttaagctcgcgcagggcgagtatgtggcccccgaaaagattgagaacatttatatccgatctcaacctgtcgcccaaatctacgtccatggtgatagcctgaaggctttcttagtaggaatcgttgtcccggacccagaggttatgcctagctgggcacagaaaagaggcattgagggtacttacgcagacctctgcacaaataaagacctgaagaaagctatcctcgaggacatggtgagactggggaaggagtcaggtctccatagtttcgaacaggttaaagcgatccacatccacagcgatatgttctccgtacagaacggattgcttacaccgacccttaaggccaaaagaccagagctccgggagtactttaagaagcagatcgaggagttgtacagtatctctatgtag

SEQ ID NO: 81987 - DNA, 2094 bp, Artificial Sequence
  derived and/or modified sequence
atgcagacccaggagatcttaaggatcctaagactgcctgaactgggtgatctgggtcagttcttcagatcgttatccgccacaacactcgtttcaatgggtgcacttgccgcaatactggcatactggtttacacatcgacccaaggccctacagccaccttgcaacctcctgatgcagtcagaagaagttgaagatagcggaggtgccaggcgctctgtgatcggaagcggccctcagctgctgacccattactacgatgatgcaaggacaatgtaccaggtgttccgacgtggattgtcaatttcgggtaacggaccatgcctgggcttccgaaagccaaaacagccttaccaatggctgagctatcaggaggtcgctgatcgcgctgaattcctggggtctggacttctccaacacaattgtaaagcctgcaccgaccagtttatcggtgtcttcgcacagaatcggcctgaatggataatcgttgagttggcctgttacacatattctatggtggtggtgcccctgtacgacactttgggccctggagccattcgttatattattaacaccgcagacattagcaccgtgatcgtggataagcctcagaaagctgtgctgctgctggaacacgtggagcgtaaagaaacacccggtctgaaattgatcattctgatggacccatttgaggaagctctaaaggagaggggacagaagtgtggagttgtcattaaatccatgcaagcagtagaagactgtggccaggaaaatcatcaggcccctgtgccgcctcagccagacgatctcagtatcgtgtgtttcacttcggggacgaccggaaatccaaagggggctatgctcacacacggtaacgtggttgctgacttcagtgggtttctcaaggtaaccgaaaaggtgatctttccacgtcaggatgatgttctgattagctttctgccattagcccacatgttcgaacgtgttatacaatcagtggtgtattgtcacggaggcagggtagggtttttccagggcgatatccgcctcttgtcagacgatatgaaggcactgtgccccaccatattccctgtggtgccacgcctgttgaaccgtatgtatgacaagattttctcccaggccaatacaccactgaagagatggctcctggaattcgccgcaaaaaggaagcaggccgaagtgcgtagtggcataatcaggaatgattcaatctgggatgagctgttcttcaacaaaatccaggcaagcttgggcggatgcgttaggatgattgtgacaggagctgcacctgctagccctaccgttctagggtttttgcgagctgcacttggttgccaagtttatgaaggctacggacagactgaatgtacagccggatgcaccttcacgactcccggtgactggactagcgggcatgtgggcgctccactcccatgtaaccacatcaagttggtggatgtggaagaattgaactattgggcctgcaaaggagagggtgagatctgcgtgcgcggaccaaacgttttcaaagggtatctgaaagacccggaccgaactaaggaggctcttgatagcgatgggtggctgcataccggtgatatcggaaagtggctccccgcagggactcttaagatcattgatcgtaagaagcatatatttaaacttgcccaaggcgaatatgttgcaccagagaagatagagaacatctatatcagatcccagccagtagctcaaatctacgtccacggggattcccttaaggctttcctggttggcatcgttgtacccgatcctgaagtgatgcccagttgggcccagaaacgtggcatagaaggtacctatgccgacctctgtacgaataaggacctgaaaaaggcaatattggaagacatggtgcgcctcgggaaggagtctggcttacattccttcgaacaggttaaggcaatccatattcactcagatatgttttcggtgcagaacggattactcacccctacgctcaaagctaaaagacccgaactcagagagtactttaagaagcaaatcgaggaactttactccatttccatgtag

SEQ ID NO: 81988 - DNA, 2127 bp, Artificial Sequence
  derived and/or modified sequence
atgcccgaatttgtgctgagcctgctggaaaagatgcagacccaggagatcctgagaatattgcgactgccagagttgggcgatctcggccagttctttcgatccctgagcgctacaactctggttagcatgggagctctcgcagcaattttagcatactggtttacacatcgcccaaaggcattacagcctccgtgcaatcttctgatgcaatctgaggaggtcgaggactctggtggggctcgtaggagtgtgattggttccggccctcaacttctcactcactactacgacgacgccagaacaatgtaccaagtgttccggagaggtctatccatcagcggtaacggtccatgtttgggcttccgaaaacccaagcagccttaccaatggctgagctatcaggaggttgcagatcgcgctgagttcctaggttcagggctgctgcagcacaactgcaaagcctgcactgatcaatttataggagtattcgcccaaaaccggccagaatggattatcgttgagcttgcgtgttatacctatagcatggtggtggtgccactgtacgacaccctgggccctggagcaattagatacataatcaacacagccgatattagcactgttatcgttgacaaaccacagaaagctgtcttgctcctggaacatgtggaacgtaaagaaaccccgggtctgaagctgatcatactgatggatccgtttgaagaggctcttaaggaacgaggacaaaaatgcggagtggtgatcaaatctatgcaagccgtggaagactgtggacaggaaaatcatcaggcacctgtcccaccccagcctgatgacttgagcatcgtttgctttacgtccggcactacaggtaatccaaaaggggcaatgctgacacacgggaacgtcgtagccgacttctccgggtttctgaaggtcacagagaaagtcatcttccctcggcaggacgacgtcctcattagttttctccctctcgctcatatgttcgaacgcgtcatccagtctgtcgtttattgccacgggggtcgggttggtttctttcaaggcgacatcaggctcctgtccgacgacatgaaagcactgtgcccaactattttcccagtggttccaagactacttaaccgcatgtacgacaaaatcttctcacaggctaacacacctttgaagagatggctccttgaattcgccgctaaacgcaagcaagccgaggtgaggtccggaatcatccgaaacgattccatttgggacgaacttttcttcaacaaaatacaggcctcactcggaggatgcgtgcgcatgattgtgacgggagccgctccagcatcaccaacggttctgggctttctgcgggcagccctggggtgtcaagtatacgagggctacggccagacagagtgtaccgcgggatgcacgttcactacacctggggactggacctctggccacgtgggggcacctctgccttgtaatcatattaagctggtggatgtagaagagctgaactattgggcgtgtaaaggagagggggagatttgtgtcaggggcccaaacgtctttaaggggtatctcaaggatcctgaccgtactaaagaggctctggacagtgatggttggctccacacaggggacatcgggaaatggcttcctgcaggtacactcaaaattattgatagaaagaaacatatttttaaattggcacaaggcgagtatgtggcacccgagaagatcgaaaacatctacatccgatcccagcctgtggcccaaatctatgtccacggcgatagtctcaaagcgttcctggtggggattgtcgttcccgacccggaagttatgccctcttgggcgcaaaaacggggtattgaaggcacttacgccgacctgtgtacgaacaaggatttaaaaaaagctatactagaggacatggttcggcttggcaaggaaagcgggttgcactcctttgaacaagttaaggcaatccacattcactcagatatgttcagcgtgcagaacgggctcctgaccccaacactgaaggctaaaagaccagagctgagggagtatttcaaaaagcagatcgaggaactgtactctattagcatgtag

SEQ ID NO: 81989 - DNA, 2139 bp, Artificial Sequence
  derived and/or modified sequence
atgcagacccaggagatcttacgtattttgcgcctaccagaattgggagatctgggacagtttttcaggagtctctctgcaactactcttgtttccatgggcgcactcgctgccatcctcgcttactggtttactcaccgccctaaggctttacagccgccatgcaatctgctgatgcagagcgaagaagtggaggatagcgggggagctagaaggagcgtgatcggttcaggccctcaacttttaacccattattacgacgacgccagaacaatgtaccaggtgttccgcaggggtctgtcgattagcggaaacggcccttgccttggattccgcaagcccaagcagccatatcaatggttgagttatcaggaagtagccgacagagccgagtttctgggctctgggctgttgcagcataattgcaaggcctgcaccgatcagttcattggagtgtttgcgcagaaccggcctgaatggatcatcgtcgaattggcatgttatacttacagcatggtggttgtccccctttacgacaccctgggtccaggagccatcagatacatcatcaacaccggtctgagttgtcaggaaggtgcctccgccacagcctccacccaggctgacatttctactgtgatcgtcgacaaaccgcagaaggctgtgctgctccttgagcatgttgagcgaaaagaaacaccagggctcaagttaatcatactgatggatccatttgaggaagctctgaaagaaaggggccaaaagtgcggagtggtaattaagtctatgcaggcagtggaagattgtgggcaggaaaaccaccaagcccctgtccctccacaacctgatgatttgtccattgtatgtttcaccagtggtaccactggtaatcctaagggggcaatgctgacacacggtaatgtcgtggcggacttctcgggattcctcaaagtgacggaaaaggtaatcttcccaagacaggacgacgtccttatatcatttctccctcttgctcacatgtttgagagggtgattcaatccgtcgtctattgtcacggcggaagagtgggatttttccagggggacattagactgctgtcagacgacatgaaggccctgtgccctaccatattccccgtggtgcctcgcctgctcaataggatgtatgacaagatcttcagtcaggccaacactccactcaagcgttggcttctggagttcgcagcaaagcgcaaacaagccgaggtcaggagtggaatcatccgtaacgactcaatatgggacgaacttttctttaataaaatccaggcctctctcggtgggtgtgtccggatgatcgttaccggcgctgcccctgcgagtcccaccgtgcttggttttcttcgggctgccctcgggtgccaagtgtacgaaggctatgggcagacagaatgtacagctggatgcaccttcacgacccccggtgactggacgtccggccatgtaggggctccgttaccctgtaaccacattaagctggttgacgtcgaagaacttaattattgggcctgcaaaggggaaggtgaaatttgcgtgcggggacccaatgtgtttaaagggtacctgaaagaccccgatagaacaaaggaagcactggatagtgacggctggctgcatacgggagacattggtaagtggttacctgccggaaccctgaaaatcatcgaccggaaaaagcacatattcaagctggcacaaggcgagtatgtggcgcctgaaaaaatagaaaatatttacattcgcagccagcccgtagcccagatttatgtgcatggagactctttaaaggccttcctcgttgggatagtggtgcctgatccggaggtgatgccctcttgggcacagaaacgtggcattgaaggtacttatgccgacctatgtaccaacaaggatctcaagaaggcaattctggaggatatggtccgactgggtaaagagagcgggctgcacagcttcgagcaggtcaaggctatccacattcacagcgatatgttttccgtgcagaacgggctattgacacctactctgaaagctaagcggccagagttacgggaatatttcaaaaaacagattgaggagctgtattcgatctctatgtag

SEQ ID NO: 81990 - DNA, 1821 bp, Artificial Sequence
  derived and/or modified sequence
atgtaccaggtgtttcggaggggactgtctattagcggaaatgggccttgtttaggcttcagaaagcccaagcagccatatcaatggttaagctaccaggaggtggccgacagggctgagttcctcggcagcggactgcttcagcacaattgcaaggcttgcaccgatcagttcatcggtgtctttgcacagaatagacctgagtggattattgttgagctagcatgctatacctacagtatggtcgtcgtgccactgtacgacactttaggcccaggggctattagatatattattaataccgcagacatcagcacagtcattgtcgacaagccccagaaagccgtccttctgttggaacacgtggaacgcaaagagacacctgggctgaaattgatcatacttatggatccattcgaggaagcactgaaggagagaggacagaagtgcggcgtcgtaattaagtcaatgcaggctgttgaggactgcggccaggagaaccatcaggccccagtgccaccccagcccgatgacctctccatcgtctgttttacctcaggaactaccgggaacccaaagggcgctatgctgacacatgggaatgttgtggcggatttctcgggctttctcaaggtgaccgaaaaggtcatctttcctaggcaagatgacgtgctcatatcattccttcctctggcccatatgttcgaacgtgtaatccaatctgtcgtttactgccatgggggtcgtgtgggcttctttcagggcgacatccggctcctatcagatgacatgaaggctctctgccctacaatcttccctgtcgtgcccagactcctcaatcgtatgtacgataaaatcttctctcaggccaatactccccttaagaggtggctgctcgagtttgccgctaagcggaagcaggccgaggttcggtcaggaatcattcgaaatgactccatttgggatgagctcttctttaataagattcaggccagtttagggggttgcgtgcggatgattgtgactggagcagcacctgcaagcccaaccgtcctggggtttctcagggctgctttaggctgtcaggtttacgaagggtatggccagaccgagtgcactgcagggtgtactttcactactccaggggactggaccagcggacatgtgggggctcctttgccctgtaatcacattaaacttgtcgacgtggaggaactcaattactgggcctgtaagggcgagggtgagatctgcgtgcgtgggccaaacgtgttcaagggttatttgaaggatcccgataggaccaaagaagccctcgactcagatggatggctgcacaccggggacatagggaaatggctccccgcagggaccctgaagattatcgacaggaaaaagcacattttcaaactcgcacaaggagagtatgtagcgcctgagaagatagaaaatatctatattcgctcacagcctgttgctcagatctacgttcacggagacagcctgaaggcattcctcgtgggcatagtggtgcctgacccagaggtcatgccctcatgggcacagaagcgaggaatcgaaggcacctacgccgatctgtgcaccaacaaagatctgaagaaagcaattcttgaagacatggtgcgcctgggcaaggaaagtggacttcatagcttcgaacaagttaaagctatccacatccattccgacatgttcagcgtgcaaaatgggctgttgacgcctaccttaaaggccaaacgacctgaactaagggagtacttcaaaaaacagatagaggagctctacagcatctccatgtag

SEQ ID NO: 81991 - DNA, 2094 bp, Artificial Sequence
  derived and/or modified sequence
atgcagacccaggagatcctgagaatcctgagactgcccgagctgggcgacctgggccagttcttcagaagcctgagcgccaccaccctggtgagcatgggcgccctggccgccatcctggcctactggttcacccacagacccaaggccctgcagcccccctgcaacctgctgatgcagagcgaggaggtggaggacagcggcggcgccagaagaagcgtgatcggcagcggcccccagctgctgacccactactacgacgacgccagaaccatgtaccaggtgttcagaagaggcctgagcatcagcggcaacggcccctgcctgggcttcagaaagcccaagcagccctaccagtggctgagctaccaggaggtggccgacagagccgagttcctgggcagcggcctgctgcagcacaactgcaaggcctgcaccgaccagttcatcggcgtgttcgcccagaacagacccgagtggatcatcgtggagctggcctgctacacctacagcatggtggtggtgcccctgtacgacaccctgggccccggcgccatcagatacatcatcaacaccgccgacatcagcaccgtgatcgtggacaagccccagaaggccgtgctgctgctggagcacgtggagagaaaggagacccccggcctgaagctgatcatcctgatggaccccttcgaggaggccctgaaggagagaggccagaagtgcggcgtggtgatcaagagcatgcaggccgtggaggactgcggccaggagaaccaccaggcccccgtgcccccccagcccgacgacctgagcatcgtgtgcttcaccagcggcaccaccggcaaccccaagggcgccatgctgacccacggcaacgtggtggccgacttcagcggcttcctgaaggtgaccgagaaggtgatcttccccagacaggacgacgtgctgatcagcttcctgcccctggcccacatgttcgagagagtgatccagagcgtggtgtactgccacggcggcagagtgggcttcttccagggcgacatcagactgctgagcgacgacatgaaggccctgtgccccaccatcttccccgtggtgcccagactgctgaacagaatgtacgacaagatcttcagccaggccaacacccccctgaagagatggctgctggagttcgccgccaagagaaagcaggccgaggtgagaagcggcatcatcagaaacgacagcatctgggacgagctgttcttcaacaagatccaggccagcctgggcggctgcgtgagaatgatcgtgaccggcgccgcccccgccagccccaccgtgctgggcttcctgagagccgccctgggctgccaggtgtacgagggctacggccagaccgagtgcaccgccggctgcaccttcaccacccccggcgactggaccagcggccacgtgggcgcccccctgccctgcaaccacatcaagctggtggacgtggaggagctgaactactgggcctgcaagggcgagggcgagatctgcgtgagaggccccaacgtgttcaagggctacctgaaggaccccgacagaaccaaggaggccctggacagcgacggctggctgcacaccggcgacatcggcaagtggctgcccgccggcaccctgaagatcatcgacagaaagaagcacatcttcaagctggcccagggcgagtacgtggcccccgagaagatcgagaacatctacatcagaagccagcccgtggcccagatctacgtgcacggcgacagcctgaaggccttcctggtgggcatcgtggtgcccgaccccgaggtgatgcccagctgggcccagaagagaggcatcgagggcacctacgccgacctgtgcaccaacaaggacctgaagaaggccatcctggaggacatggtgagactgggcaaggagagcggcctgcacagcttcgagcaggtgaaggccatccacatccacagcgacatgttcagcgtgcagaacggcctgctgacccccaccctgaaggccaagagacccgagctgagagagtacttcaagaagcagatcgaggagctgtacagcatcagcatgtag

SEQ ID NO: 81992 - DNA, 2127 bp, Artificial Sequence
  derived and/or modified sequence
atgcccgagttcgtgctgagcctgctggagaagatgcagacccaggagatcctgagaatcctgagactgcccgagctgggcgacctgggccagttcttcagaagcctgagcgccaccaccctggtgagcatgggcgccctggccgccatcctggcctactggttcacccacagacccaaggccctgcagcccccctgcaacctgctgatgcagagcgaggaggtggaggacagcggcggcgccagaagaagcgtgatcggcagcggcccccagctgctgacccactactacgacgacgccagaaccatgtaccaggtgttcagaagaggcctgagcatcagcggcaacggcccctgcctgggcttcagaaagcccaagcagccctaccagtggctgagctaccaggaggtggccgacagagccgagttcctgggcagcggcctgctgcagcacaactgcaaggcctgcaccgaccagttcatcggcgtgttcgcccagaacagacccgagtggatcatcgtggagctggcctgctacacctacagcatggtggtggtgcccctgtacgacaccctgggccccggcgccatcagatacatcatcaacaccgccgacatcagcaccgtgatcgtggacaagccccagaaggccgtgctgctgctggagcacgtggagagaaaggagacccccggcctgaagctgatcatcctgatggaccccttcgaggaggccctgaaggagagaggccagaagtgcggcgtggtgatcaagagcatgcaggccgtggaggactgcggccaggagaaccaccaggcccccgtgcccccccagcccgacgacctgagcatcgtgtgcttcaccagcggcaccaccggcaaccccaagggcgccatgctgacccacggcaacgtggtggccgacttcagcggcttcctgaaggtgaccgagaaggtgatcttccccagacaggacgacgtgctgatcagcttcctgcccctggcccacatgttcgagagagtgatccagagcgtggtgtactgccacggcggcagagtgggcttcttccagggcgacatcagactgctgagcgacgacatgaaggccctgtgccccaccatcttccccgtggtgcccagactgctgaacagaatgtacgacaagatcttcagccaggccaacacccccctgaagagatggctgctggagttcgccgccaagagaaagcaggccgaggtgagaagcggcatcatcagaaacgacagcatctgggacgagctgttcttcaacaagatccaggccagcctgggcggctgcgtgagaatgatcgtgaccggcgccgcccccgccagccccaccgtgctgggcttcctgagagccgccctgggctgccaggtgtacgagggctacggccagaccgagtgcaccgccggctgcaccttcaccacccccggcgactggaccagcggccacgtgggcgcccccctgccctgcaaccacatcaagctggtggacgtggaggagctgaactactgggcctgcaagggcgagggcgagatctgcgtgagaggccccaacgtgttcaagggctacctgaaggaccccgacagaaccaaggaggccctggacagcgacggctggctgcacaccggcgacatcggcaagtggctgcccgccggcaccctgaagatcatcgacagaaagaagcacatcttcaagctggcccagggcgagtacgtggcccccgagaagatcgagaacatctacatcagaagccagcccgtggcccagatctacgtgcacggcgacagcctgaaggccttcctggtgggcatcgtggtgcccgaccccgaggtgatgcccagctgggcccagaagagaggcatcgagggcacctacgccgacctgtgcaccaacaaggacctgaagaaggccatcctggaggacatggtgagactgggcaaggagagcggcctgcacagcttcgagcaggtgaaggccatccacatccacagcgacatgttcagcgtgcagaacggcctgctgacccccaccctgaaggccaagagacccgagctgagagagtacttcaagaagcagatcgaggagctgtacagcatcagcatgtag

SEQ ID NO: 81993 - DNA, 2139 bp, Artificial Sequence
  derived and/or modified sequence
atgcagacccaggagatcctgagaatcctgagactgcccgagctgggcgacctgggccagttcttcagaagcctgagcgccaccaccctggtgagcatgggcgccctggccgccatcctggcctactggttcacccacagacccaaggccctgcagcccccctgcaacctgctgatgcagagcgaggaggtggaggacagcggcggcgccagaagaagcgtgatcggcagcggcccccagctgctgacccactactacgacgacgccagaaccatgtaccaggtgttcagaagaggcctgagcatcagcggcaacggcccctgcctgggcttcagaaagcccaagcagccctaccagtggctgagctaccaggaggtggccgacagagccgagttcctgggcagcggcctgctgcagcacaactgcaaggcctgcaccgaccagttcatcggcgtgttcgcccagaacagacccgagtggatcatcgtggagctggcctgctacacctacagcatggtggtggtgcccctgtacgacaccctgggccccggcgccatcagatacatcatcaacaccggcctgagctgccaggagggcgccagcgccaccgccagcacccaggccgacatcagcaccgtgatcgtggacaagccccagaaggccgtgctgctgctggagcacgtggagagaaaggagacccccggcctgaagctgatcatcctgatggaccccttcgaggaggccctgaaggagagaggccagaagtgcggcgtggtgatcaagagcatgcaggccgtggaggactgcggccaggagaaccaccaggcccccgtgcccccccagcccgacgacctgagcatcgtgtgcttcaccagcggcaccaccggcaaccccaagggcgccatgctgacccacggcaacgtggtggccgacttcagcggcttcctgaaggtgaccgagaaggtgatcttccccagacaggacgacgtgctgatcagcttcctgcccctggcccacatgttcgagagagtgatccagagcgtggtgtactgccacggcggcagagtgggcttcttccagggcgacatcagactgctgagcgacgacatgaaggccctgtgccccaccatcttccccgtggtgcccagactgctgaacagaatgtacgacaagatcttcagccaggccaacacccccctgaagagatggctgctggagttcgccgccaagagaaagcaggccgaggtgagaagcggcatcatcagaaacgacagcatctgggacgagctgttcttcaacaagatccaggccagcctgggcggctgcgtgagaatgatcgtgaccggcgccgcccccgccagccccaccgtgctgggcttcctgagagccgccctgggctgccaggtgtacgagggctacggccagaccgagtgcaccgccggctgcaccttcaccacccccggcgactggaccagcggccacgtgggcgcccccctgccctgcaaccacatcaagctggtggacgtggaggagctgaactactgggcctgcaagggcgagggcgagatctgcgtgagaggccccaacgtgttcaagggctacctgaaggaccccgacagaaccaaggaggccctggacagcgacggctggctgcacaccggcgacatcggcaagtggctgcccgccggcaccctgaagatcatcgacagaaagaagcacatcttcaagctggcccagggcgagtacgtggcccccgagaagatcgagaacatctacatcagaagccagcccgtggcccagatctacgtgcacggcgacagcctgaaggccttcctggtgggcatcgtggtgcccgaccccgaggtgatgcccagctgggcccagaagagaggcatcgagggcacctacgccgacctgtgcaccaacaaggacctgaagaaggccatcctggaggacatggtgagactgggcaaggagagcggcctgcacagcttcgagcaggtgaaggccatccacatccacagcgacatgttcagcgtgcagaacggcctgctgacccccaccctgaaggccaagagacccgagctgagagagtacttcaagaagcagatcgaggagctgtacagcatcagcatgtag

SEQ ID NO: 81994 - DNA, 1821 bp, Artificial Sequence
  derived and/or modified sequence
atgtaccaggtgttcagaagaggcctgagcatcagcggcaacggcccctgcctgggcttcagaaagcccaagcagccctaccagtggctgagctaccaggaggtggccgacagagccgagttcctgggcagcggcctgctgcagcacaactgcaaggcctgcaccgaccagttcatcggcgtgttcgcccagaacagacccgagtggatcatcgtggagctggcctgctacacctacagcatggtggtggtgcccctgtacgacaccctgggccccggcgccatcagatacatcatcaacaccgccgacatcagcaccgtgatcgtggacaagccccagaaggccgtgctgctgctggagcacgtggagagaaaggagacccccggcctgaagctgatcatcctgatggaccccttcgaggaggccctgaaggagagaggccagaagtgcggcgtggtgatcaagagcatgcaggccgtggaggactgcggccaggagaaccaccaggcccccgtgcccccccagcccgacgacctgagcatcgtgtgcttcaccagcggcaccaccggcaaccccaagggcgccatgctgacccacggcaacgtggtggccgacttcagcggcttcctgaaggtgaccgagaaggtgatcttccccagacaggacgacgtgctgatcagcttcctgcccctggcccacatgttcgagagagtgatccagagcgtggtgtactgccacggcggcagagtgggcttcttccagggcgacatcagactgctgagcgacgacatgaaggccctgtgccccaccatcttccccgtggtgcccagactgctgaacagaatgtacgacaagatcttcagccaggccaacacccccctgaagagatggctgctggagttcgccgccaagagaaagcaggccgaggtgagaagcggcatcatcagaaacgacagcatctgggacgagctgttcttcaacaagatccaggccagcctgggcggctgcgtgagaatgatcgtgaccggcgccgcccccgccagccccaccgtgctgggcttcctgagagccgccctgggctgccaggtgtacgagggctacggccagaccgagtgcaccgccggctgcaccttcaccacccccggcgactggaccagcggccacgtgggcgcccccctgccctgcaaccacatcaagctggtggacgtggaggagctgaactactgggcctgcaagggcgagggcgagatctgcgtgagaggccccaacgtgttcaagggctacctgaaggaccccgacagaaccaaggaggccctggacagcgacggctggctgcacaccggcgacatcggcaagtggctgcccgccggcaccctgaagatcatcgacagaaagaagcacatcttcaagctggcccagggcgagtacgtggcccccgagaagatcgagaacatctacatcagaagccagcccgtggcccagatctacgtgcacggcgacagcctgaaggccttcctggtgggcatcgtggtgcccgaccccgaggtgatgcccagctgggcccagaagagaggcatcgagggcacctacgccgacctgtgcaccaacaaggacctgaagaaggccatcctggaggacatggtgagactgggcaaggagagcggcctgcacagcttcgagcaggtgaaggccatccacatccacagcgacatgttcagcgtgcagaacggcctgctgacccccaccctgaaggccaagagacccgagctgagagagtacttcaagaagcagatcgaggagctgtacagcatcagcatgtag

SEQ ID NO: 81995 - DNA, 2548 bp, Artificial Sequence
  derived and/or modified sequence
tccaggaagcatcattcccagagctgccagagcagtggccctggaaaatatggaagcagctgtcagccatggcccagggcctgagcgtatgattctcaggaaaagtgggcaggacatctgactgtcagagtttgtcctctcacttctggagaagatgcagacacaggagatcctgaggatactgcgactgcctgagctaggtgacttgggacagtttttccgcagcctctcggccaccaccctcgtgagtatgggtgccctggctgccatccttgcctactggttcactcaccggccaaaggccttgcagccgccatgcaacctcctgatgcagtcagaagaagtagaggacagtggcggggcacggcgatctgtgattgggtctggccctcagctacttacccactactatgatgatgcccggaccatgtaccaggtgttccgccgtgggcttagcatctcagggaatgggccctgtcttggtttcaggaagcctaagcagccttaccagtggctgtcctaccaggaggtggccgacagggctgaatttctggggtccggacttctccagcacaattgtaaagcatgcactgatcagtttattggtgtttttgcacaaaatcggccagagtggatcattgtggagctggcctgctacacatattccatggtggtggtcccgctctatgacaccctgggccctggggctatccgctacatcatcaatacagcggacatcagcaccgtgattgtggacaaacctcagaaggctgtgcttctgctagagcatgtggagaggaaggagactccaggcctcaagctgatcatcctcatggacccattcgaagaagccctgaaagagagagggcagaagtgcggggtggtcattaagtccatgcaggccgtggaggactgtggccaagagaatcaccaggctcctgtgcccccgcagcctgatgacctctccattgtgtgtttcacaagcggcacgacagggaacccaaaaggtgcgatgctcacccatgggaacgtggtggctgatttctcaggctttctgaaagtgacagagaaagtgatctttccgagacaggacgatgtgctcatctccttcctgcctctggctcacatgtttgagagagtaatccagtctgtcgtctattgccacggagggcgtgttggcttcttccagggagatatccgccttctctcagatgacatgaaggctctatgccccaccatcttccctgtggtcccacgactgctgaaccggatgtacgacaagatcttcagccaggcaaacacaccattaaagcgctggctcctggagtttgcagcaaagcgtaagcaagccgaggtccggagtggaatcatcaggaatgatagtatctgggatgaactcttctttaataagattcaggccagtcttggtgggtgtgtgcggatgattgttactggagcagccccagcatcaccaacagttctgggatttctccgggcagctctagggtgccaggtttatgaaggttatggccaaactgagtgcacagctggatgtaccttcaccactcctggcgactggacctcagggcacgtaggggcgccacttccctgcaatcatatcaagctcgttgatgttgaggaactgaactactgggcctgcaaaggagagggagagatatgtgtgagaggaccaaatgtgttcaaaggctacttgaaagatccagacaggacgaaggaggccctggacagcgatggctggcttcacactggagacatcggaaaatggctgccggcaggaactcttaaaattattgatcggaaaaagcatatatttaaacttgctcagggagaatatgttgcacccgagaagattgagaacatctacatccggagccaacctgtggcgcaaatctatgtccatggggacagcttaaaggcctttttggtaggcattgttgtgcctgaccctgaagttatgccctcctgggcccagaagagaggaattgaaggaacatatgcagatctctgcacaaataaggatctgaagaaagccattttggaagatatggtgaggttaggaaaagaaagtggactccattcttttgagcaggttaaagccattcacatccattctgacatgttctcagttcaaaatggcttgctgacaccaacactaaaagctaagagacctgagctgagagagtacttcaaaaaacaaatagaagagctttactcaatctccatgtgaagttcaaggaaagttcttctcagtgtaatgaactgtctagcaatattatagttattcttgaaagtaatgagtcaaaatgacacagctgaaaatgaataagcatctgattttatgactgagccttttcctgtcccaagaggtctttaacaatattttctctatcatcaatgagtatattttatttttattataaaaatgatattgtggtggactgctaaaaatatcacaaatggcaatgtaaaaatcaagacattttctcaagaactgtgtaccactaaaagtaatatattgtcaatgttc

SEQ ID NO: 81996 - DNA, 2622 bp, Artificial Sequence
  derived and/or modified sequence
aaccgcgacccggctgccattcgagcctgcccagccataaaacccaggctgcgagtcgcgcgggggcagggtcgcgtgttgatggggtgggtggcggcggggtgggctcaatgtcacgctctggcgctcgtcgcccgtgctcccccttccagccggtttccgcagaatgccagagtttgtcctctcacttctggagaagatgcagacacaggagatcctgaggatactgcgactgcctgagctaggtgacttgggacagtttttccgcagcctctcggccaccaccctcgtgagtatgggtgccctggctgccatccttgcctactggttcactcaccggccaaaggccttgcagccgccatgcaacctcctgatgcagtcagaagaagtagaggacagtggcggggcacggcgatctgtgattgggtctggccctcagctacttacccactactatgatgatgcccggaccatgtaccaggtgttccgccgtgggcttagcatctcagggaatgggccctgtcttggtttcaggaagcctaagcagccttaccagtggctgtcctaccaggaggtggccgacagggctgaatttctggggtccggacttctccagcacaattgtaaagcatgcactgatcagtttattggtgtttttgcacaaaatcggccagagtggatcattgtggagctggcctgctacacatattccatggtggtggtcccgctctatgacaccctgggccctggggctatccgctacatcatcaatacagcggacatcagcaccgtgattgtggacaaacctcagaaggctgtgcttctgctagagcatgtggagaggaaggagactccaggcctcaagctgatcatcctcatggacccattcgaagaagccctgaaagagagagggcagaagtgcggggtggtcattaagtccatgcaggccgtggaggactgtggccaagagaatcaccaggctcctgtgcccccgcagcctgatgacctctccattgtgtgtttcacaagcggcacgacagggaacccaaaaggtgcgatgctcacccatgggaacgtggtggctgatttctcaggctttctgaaagtgacagagaaagtgatctttccgagacaggacgatgtgctcatctccttcctgcctctggctcacatgtttgagagagtaatccagtctgtcgtctattgccacggagggcgtgttggcttcttccagggagatatccgccttctctcagatgacatgaaggctctatgccccaccatcttccctgtggtcccacgactgctgaaccggatgtacgacaagatcttcagccaggcaaacacaccattaaagcgctggctcctggagtttgcagcaaagcgtaagcaagccgaggtccggagtggaatcatcaggaatgatagtatctgggatgaactcttctttaataagattcaggccagtcttggtgggtgtgtgcggatgattgttactggagcagccccagcatcaccaacagttctgggatttctccgggcagctctagggtgccaggtttatgaaggttatggccaaactgagtgcacagctggatgtaccttcaccactcctggcgactggacctcagggcacgtaggggcgccacttccctgcaatcatatcaagctcgttgatgttgaggaactgaactactgggcctgcaaaggagagggagagatatgtgtgagaggaccaaatgtgttcaaaggctacttgaaagatccagacaggacgaaggaggccctggacagcgatggctggcttcacactggagacatcggaaaatggctgccggcaggaactcttaaaattattgatcggaaaaagcatatatttaaacttgctcagggagaatatgttgcacccgagaagattgagaacatctacatccggagccaacctgtggcgcaaatctatgtccatggggacagcttaaaggcctttttggtaggcattgttgtgcctgaccctgaagttatgccctcctgggcccagaagagaggaattgaaggaacatatgcagatctctgcacaaataaggatctgaagaaagccattttggaagatatggtgaggttaggaaaagaaagtggactccattcttttgagcaggttaaagccattcacatccattctgacatgttctcagttcaaaatggcttgctgacaccaacactaaaagctaagagacctgagctgagagagtacttcaaaaaacaaatagaagagctttactcaatctccatgtgaagttcaaggaaagttcttctcagtgtaatgaactgtctagcaatattatagttattcttgaaagtaatgagtcaaaatgacacagctgaaaatgaataagcatctgattttatgactgagccttttcctgtcccaagaggtctttaacaatattttctctatcatcaatgagtatattttatttttattataaaaatgatattgtggtggactgctaaaaatatcacaaatggcaatgtaaaaatcaagacattttctcaagaactgtgtaccactaaaagtaatatattgtcaatgttcacagaactattaaacataaaggaaaaaca

SEQ ID NO: 81997 - DNA, 2490 bp, Artificial Sequence
  derived and/or modified sequence
gctcgtcgcccgtgctcccccttccagccggtttccgcagaatgccagagtttgtcctctcacttctggagaagatgcagacacaggagatcctgaggatactgcgactgcctgagctaggtgacttgggacagtttttccgcagcctctcggccaccaccctcgtgagtatgggtgccctggctgccatccttgcctactggttcactcaccggccaaaggccttgcagccgccatgcaacctcctgatgcagtcagaagaagtagaggacagtggcggggcacggcgatctgtgattgggtctggccctcagctacttacccactactatgatgatgcccggaccatgtaccaggtgttccgccgtgggcttagcatctcagggaatgggccctgtcttggtttcaggaagcctaagcagccttaccagtggctgtcctaccaggaggtggccgacagggctgaatttctggggtccggacttctccagcacaattgtaaagcatgcactgatcagtttattggtgtttttgcacaaaatcggccagagtggatcattgtggagctggcctgctacacatattccatggtggtggtcccgctctatgacaccctgggccctggggctatccgctacatcatcaatacagcggacatcagcaccgtgattgtggacaaacctcagaaggctgtgcttctgctagagcatgtggagaggaaggagactccaggcctcaagctgatcatcctcatggacccattcgaagaagccctgaaagagagagggcagaagtgcggggtggtcattaagtccatgcaggccgtggaggactgtggccaagagaatcaccaggctcctgtgcccccgcagcctgatgacctctccattgtgtgtttcacaagcggcacgacagggaacccaaaaggtgcgatgctcacccatgggaacgtggtggctgatttctcaggctttctgaaagtgacagagaaagtgatctttccgagacaggacgatgtgctcatctccttcctgcctctggctcacatgtttgagagagtaatccagtctgtcgtctattgccacggagggcgtgttggcttcttccagggagatatccgccttctctcagatgacatgaaggctctatgccccaccatcttccctgtggtcccacgactgctgaaccggatgtacgacaagatcttcagccaggcaaacacaccattaaagcgctggctcctggagtttgcagcaaagcgtaagcaagccgaggtccggagtggaatcatcaggaatgatagtatctgggatgaactcttctttaataagattcaggccagtcttggtgggtgtgtgcggatgattgttactggagcagccccagcatcaccaacagttctgggatttctccgggcagctctagggtgccaggtttatgaaggttatggccaaactgagtgcacagctggatgtaccttcaccactcctggcgactggacctcagggcacgtaggggcgccacttccctgcaatcatatcaagctcgttgatgttgaggaactgaactactgggcctgcaaaggagagggagagatatgtgtgagaggaccaaatgtgttcaaaggctacttgaaagatccagacaggacgaaggaggccctggacagcgatggctggcttcacactggagacatcggaaaatggctgccggcaggaactcttaaaattattgatcggaaaaagcatatatttaaacttgctcagggagaatatgttgcacccgagaagattgagaacatctacatccggagccaacctgtggcgcaaatctatgtccatggggacagcttaaaggcctttttggtaggcattgttgtgcctgaccctgaagttatgccctcctgggcccagaagagaggaattgaaggaacatatgcagatctctgcacaaataaggatctgaagaaagccattttggaagatatggtgaggttaggaaaagaaagtggactccattcttttgagcaggttaaagccattcacatccattctgacatgttctcagttcaaaatggcttgctgacaccaacactaaaagctaagagacctgagctgagagagtacttcaaaaaacaaatagaagagctttactcaatctccatgtgaagttcaaggaaagttcttctcagtgtaatgaactgtctagcaatattatagttattcttgaaagtaatgagtcaaaatgacacagctgaaaatgaataagcatctgattttatgactgagccttttcctgtcccaagaggtctttaacaatattttctctatcatcaatgagtatattttatttttattataaaaatgatattgtggtggactgctaaaaatatcacaaatggcaatgtaaaaatcaagacattttctcaagaactgtgtaccactaaaagtaatatattgtcaatgttcacagaactattaaacataaagg

SEQ ID NO: 81998 - protein, 622 aa, Artificial Sequence
  derived and/or modified sequence
MQTQEILRILRLPELGDLGQFFRSLSATTLDSGGARRSVIGSGPQLLTHYYDDARTMYQVFRRGLSISGNGPCLGFRKPKQPYQWLSYQEVADRAEFLGSGLLQHNCKACTDQFIGVFAQNRPEWIIVELACYTYSMVVVPLYDTLGPGAIRYIINTADISTVIVDKPQKAVLLLEHVERKETPGLKLIILMDPFEEALKERGQKCGVVIKSMQAVEDCGQENHQAPVPPQPDDLSIVCFTSGTTGNPKGAMLTHGNVVADFSGFLKVTEGDIRLLSDDMKALCPTIFPVVPRLLNRMYDKIFSQANTPLKRWLLEFAAKRKQAEVRSGIIRNDSIWDELFFNKIQASLGGCVRMIVTGAAPASPTVLGFLRAALGCQVYEGYGQTECTAGCTFTTPGDWTSGHVGAPLPCNHIKLVDVEELNYWACKGEGEICVRGPNVFKGYLKDPDRTKEALDSDGWLHTGDIGKWLPAGTLKIIDRKKHIFKLAQGEYVAPEKIENIYIRSQPVAQIYVHGDSLKAFLVGIVVPDPEVMPSWAQKRGIEGTYADLCTNKDLKKAILEDMVRLGKESGLHSFEQVKAIHIHSDMFSVQNGLLTPTLKAKRPELREYFKKQIEELYSISM

SEQ ID NO: 81999 - DNA, 1869 bp, Artificial Sequence
  derived and/or modified sequence
atgcagactcaggagatccttaggatcctgcggttgccagagctgggagatctcgggcaattttttagaagtctgtcagcaactacactagattctggaggagcaagaaggagtgtcattggaagcgggccccagctgttgacccactactatgatgatgcccggaccatgtaccaggttttccgacgcgggctgagtatctcaggcaatggcccgtgcctggggttccgcaagcccaagcaaccatatcagtggcttagctatcaggaggtcgccgacagggccgaatttctcggttcaggactcttgcagcataactgcaaggcttgcaccgatcagttcatcggcgtcttcgctcaaaacaggccggaatggatcatcgttgagctggcttgctatacctatagcatggttgttgtgccactgtatgatactctgggccctggcgcaatccggtatattatcaacaccgccgacatcagcactgtgattgttgacaaacctcagaaggccgtgttgctgctcgagcacgtggaaagaaaggagacccctggactcaagctcattatcctcatggatcctttcgaagaggctctgaaggaaaggggacagaagtgcggtgtcgtgatcaagagcatgcaggccgtcgaggactgcggccaagagaaccaccaggctccagtcccaccacagcctgacgacctctccattgtctgtttcacttccggaactaccggcaatccaaagggagctatgcttactcacggcaacgtcgtggcagacttttccggcttcttgaaggtgaccgagggcgacatacggctactgagtgatgacatgaaagccttatgtcctaccatctttcccgtcgtccccagacttctaaaccgcatgtacgacaagatcttttctcaggccaacacacccctcaaaagatggctattggaattcgctgccaaacgcaaacaagccgaggttagatcaggaatcatccggaacgattccatctgggatgagctgtttttcaataaaatccaggcctcattaggaggatgtgttcggatgatcgttactggagcagcaccggcgagtccgacggtgctgggatttctccgggccgcgttggggtgccaggtatacgaggggtacgggcagaccgaatgtacggctggatgtactttcacgacgcccggcgattggacgagtggtcacgtgggggccccgttaccatgcaatcacatcaaactggtggatgtggaagagctgaattactgggcctgtaagggagagggcgaaatatgcgttagaggccccaatgtgttcaagggttatttgaaagatcccgaccgtacaaaggaagccctcgactccgacggctggctacacaccggcgatatagggaaatggttgccagccggaacacttaagataattgatagaaaaaaacacatcttcaaactggctcaaggagagtatgtggccccagagaagatcgagaatatctatattcgtagccagccggtggctcagatctacgtgcatggcgacagcctgaaggcctttctcgtggggatagtagtgccggatccagaggtgatgccctcatgggcccaaaagcgcggcattgagggcacatatgctgatctttgcacaaacaaggacctgaagaaagcaattctcgaggacatggtgaggcttggcaaggaatccggcctccatagctttgagcaagtgaaagctatccacattcattccgacatgttctctgtccaaaacgggttgcttactcctactctgaaagccaagcggccggagctcagggaatatttcaagaagcagatagaagaactttatagtatatccatgtag

SEQ ID NO: 82000 - DNA, 1869 bp, Artificial Sequence
  derived and/or modified sequence
atgcagacccaggagatcctgcgcatcctgcggctgcctgagctgggggacctgggccagttcttccgcagcctgagcgccaccaccctggacagcggcggggcccggcgcagcgtcatcggcagcggcccccagctgctgacccactactatgatgatgcccggaccatgtaccaggtgttccggcggggcctgagcatctctggaaatggcccctgcctgggcttcaggaagcccaagcagccctaccagtggctgagctaccaggaggtggccgacagagctgagttcctgggcagcggcctgctgcagcacaactgcaaggcctgcacagaccagttcatcggcgtgtttgcccagaacagacctgagtggatcatcgtggagctggcctgctacacctacagcatggtggtggtgcccctgtatgacaccctgggccctggggccatccgctacatcatcaacacagctgacatcagcaccgtcatcgtggacaagccccagaaggctgtgctgctgctggagcacgtggagaggaaggagaccccaggcctgaagctgatcatcctgatggacccctttgaggaggccctgaaggagcggggccagaagtgtggggtggtgatcaagtccatgcaggccgtggaggactgtggccaggagaaccaccaggcccctgtgcccccccagccagatgacctgagcatcgtgtgcttcaccagcggcaccactggaaaccccaagggggccatgctgacccatggaaatgtggtggccgacttcagcggcttcctgaaggtgacagaaggagacatccggctgctgagtgatgacatgaaggccctgtgccccaccatcttccctgtggtgccccggctgctgaacaggatgtatgacaagatcttcagccaggccaacacccccctgaagcgctggctgctggagtttgctgccaagaggaagcaggccgaggtgcgcagcggcatcatcagaaatgacagcatctgggatgagctgttcttcaacaagatccaggccagcctgggcggctgtgtgaggatgattgtgactggagctgccccagccagccccaccgtgctgggcttcctgcgggccgccctgggctgccaggtgtatgagggctacggccagacagaatgtacagctggctgcaccttcaccacccctggggactggaccagcggccacgtgggcgcccccctgccctgcaaccacatcaagctggtggatgtggaggagctgaactactgggcctgcaagggggagggggagatctgtgtgcggggccccaacgtgttcaagggctacctgaaggaccctgacaggaccaaggaggccctggacagtgatggctggctgcacactggagacatcggcaagtggctgcctgctggcaccctgaagatcatcgacaggaagaagcacatcttcaagctggcccagggcgagtatgtggcccctgagaagattgagaacatctacatccgcagccagcctgtggcccagatctacgtgcacggggacagcctgaaggccttcctggtgggcatcgtggtgcctgaccctgaggtgatgcccagctgggcccagaagaggggcatcgagggcacctatgctgacctgtgcaccaacaaggacctgaagaaggccatcctggaggacatggtgcggctgggcaaggagagcggcctgcacagctttgagcaggtgaaggccatccacatccacagcgacatgttttctgtgcagaatggcctgctgacccccaccctgaaggccaagaggcctgagctgcgggagtacttcaagaagcagatcgaggagctgtacagcatctccatgtag

SEQ ID NO: 82001 - DNA, 1869 bp, Artificial Sequence
  derived and/or modified sequence
atgcagacccaggagatcctgcggatcctgcggctgcccgagctgggggacctggggcagtttttccgatccttgagcgctacaacgctggactcaggaggggccagacggagcgtaattggaagtggtccccagctattaactcactactacgacgatgccaggacgatgtatcaggtgttccgacggggactgtccatctcaggcaatggaccatgcctgggtttccgtaagccaaagcagccttatcagtggctaagctatcaggaagtagccgatcgagccgagtttctcggcagcggcctgctgcagcacaattgcaaagcttgtacggatcagtttattggcgtgtttgcgcagaaccgccctgaatggattattgtcgagctcgcctgttatacctacagtatggtcgtggtgccactttacgacacattggggccaggcgctatacgttacatcatcaatactgcagacatttctacagtgatcgtcgacaaaccccagaaagctgtcctcctgctcgagcatgtagagagaaaggagacgcctggtctgaaactaattatcttgatggacccttttgaagaagccctcaaggagcgcgggcagaagtgcggcgtggtgatcaagagcatgcaagccgtggaagactgcggtcaagagaatcaccaagctcctgtccctcctcagcctgatgatctgagtatcgtgtgtttcaccagcggtaccactggaaatccaaagggtgctatgttaacccacggcaatgtcgtcgccgatttctctggctttctgaaggtgactgaaggcgacatcagactattatcagatgacatgaaggctctctgccccactatcttccccgttgtgccaagactgctgaatcgtatgtatgataagattttttcacaagccaacacccccttgaaacggtggttactggaattcgctgcgaagagaaagcaggcggaagtcaggagtgggattatcagaaacgactcaatctgggacgagcttttcttcaataagatacaggccagcctgggcgggtgtgtgcgcatgatcgtgacaggagccgcacccgcctctccaacagtgcttgggtttctcagggcggcattaggctgtcaagtgtatgaggggtacggtcagactgagtgcacggctggctgcactttcacaactccaggcgactggacttctggccatgtcggcgccccccttccttgtaaccatatcaaactcgtcgatgtggaagagttgaactattgggcctgcaagggagagggagaaatttgtgtccgggggcctaacgttttcaaaggctacctcaaggacccagaccgaacaaaagaagccctggactcagacggatggctgcacaccggagacattggtaagtggctccctgccggaacgctcaagattatcgataggaagaagcacattttcaagctcgcccagggcgagtatgtcgcccctgaaaagattgagaacatttatatacgctcacagccagtggcccagatctatgttcacggcgattccctcaaggctttcctcgtcggtattgtcgtgccggacccagaggtcatgccatcttgggcccagaagcgtgggatcgaaggtacctatgcagacctctgcactaacaaagacctgaagaaggctattctggaggacatggtccgtttggggaaagagtctggcctgcacagctttgagcaggtgaaggcaattcacatccactccgacatgttttcagtccagaatgggctgctgacccccaccctgaaggccaagcgccccgaactgcgggagtactttaaaaagcagatcgaagagttgtatagcattagcatgtag

SEQ ID NO: 82002 - DNA, 1869 bp, Artificial Sequence
  derived and/or modified sequence
atgcagacacaggaaatattgcggattctaagactgcccgagctcggggatctcgggcagttcttcaggtcattgtctgccactacgctggattcaggcggtgcaaggaggagtgtcattggatccggtccccagttgttaacacattactatgatgacgctcgcactatgtatcaagtcttcagacggggactatcgataagcggaaatggaccctgtctcggattccgcaaacctaagcagccgtatcaatggctctcctaccaggaagttgccgatcgggcagaatttctcggatccggccttctccagcataactgtaaagcctgcaccgatcagttcataggggtgtttgctcaaaacagaccagagtggattatcgtcgaactggcctgctatacatactccatggtagttgtccccctgtacgataccttggggcctggtgctatcagatatattattaacaccgctgacatcagcacagtcattgttgataaacctcaaaaggccgtgcttctgctggagcatgttgagcgaaaagagactccagggctcaagctgattattttgatggaccctttcgaggaggctctcaaggagaggggacagaaatgtggggtcgtgataaaaagtatgcaggcagtggaagactgtggtcaagagaatcaccaggccccagtgcctccgcagcccgacgacctatccatagtgtgtttcacaagcggaacgaccgggaatccaaagggcgcaatgcttacacatggcaacgtcgtggcagacttctctggattcctgaaagtgacagaaggcgacatccgactgctgagcgacgacatgaaggccttgtgccctactattttccccgtggtaccgcgactgctcaataggatgtacgacaagatattcagccaagccaacacccccttgaagcgttggttactcgagttcgccgcaaaacggaaacaggccgaggtgcggagcggcattatcaggaacgattccatttgggacgaactgttcttcaataagattcaggcctctctaggaggatgtgtgcgcatgatagtgactggggctgccccagcgagtccaacggtgctagggtttttgagagctgccctggggtgccaggtgtacgaaggctacggtcagacagagtgtacagctggatgtaccttcacaacacccggagactggacctcaggccacgtaggcgcacctttaccttgtaatcatatcaagctcgtggacgtggaggagctgaattactgggcatgcaaaggagagggtgaaatctgtgtgaggggccctaatgtatttaagggttatttgaaggaccccgaccggacaaaggaggcattggactctgacggatggctgcacactggggacatcggcaagtggttgcccgcaggcacattgaaaataatcgaccgtaagaagcacatatttaaattggctcaaggagagtacgtggctcctgaaaagatcgagaatatttacatacgctcccagcctgtggctcagatatacgttcacggggatagcctcaaggcatttttggtgggcatagttgtaccagatcccgaagtcatgcccagctgggctcagaagagaggtatcgaaggaacatatgccgatctgtgtacaaataaagatctcaagaaggcgatactagaagacatggtcagactgggcaaggagtcgggattgcacagtttcgagcaggttaaggctattcatattcattcagacatgtttagcgtgcagaacggactcctgactcctacgctcaaggctaagcggccagagttgcgcgagtactttaagaagcagattgaggagttgtactctataagtatgtag

SEQ ID NO: 82003 - DNA, 1869 bp, Artificial Sequence
  derived and/or modified sequence
atgcagacccaggagatcctgagaatcctgagactgcccgagctgggcgacctgggccagttcttcagaagcctgagcgccaccaccctggacagcggcggcgccagaagaagcgtgatcggcagcggcccccagctgctgacccactactacgacgacgccagaaccatgtaccaggtgttcagaagaggcctgagcatcagcggcaacggcccctgcctgggcttcagaaagcccaagcagccctaccagtggctgagctaccaggaggtggccgacagagccgagttcctgggcagcggcctgctgcagcacaactgcaaggcctgcaccgaccagttcatcggcgtgttcgcccagaacagacccgagtggatcatcgtggagctggcctgctacacctacagcatggtggtggtgcccctgtacgacaccctgggccccggcgccatcagatacatcatcaacaccgccgacatcagcaccgtgatcgtggacaagccccagaaggccgtgctgctgctggagcacgtggagagaaaggagacccccggcctgaagctgatcatcctgatggaccccttcgaggaggccctgaaggagagaggccagaagtgcggcgtggtgatcaagagcatgcaggccgtggaggactgcggccaggagaaccaccaggcccccgtgcccccccagcccgacgacctgagcatcgtgtgcttcaccagcggcaccaccggcaaccccaagggcgccatgctgacccacggcaacgtggtggccgacttcagcggcttcctgaaggtgaccgagggcgacatcagactgctgagcgacgacatgaaggccctgtgccccaccatcttccccgtggtgcccagactgctgaacagaatgtacgacaagatcttcagccaggccaacacccccctgaagagatggctgctggagttcgccgccaagagaaagcaggccgaggtgagaagcggcatcatcagaaacgacagcatctgggacgagctgttcttcaacaagatccaggccagcctgggcggctgcgtgagaatgatcgtgaccggcgccgcccccgccagccccaccgtgctgggcttcctgagagccgccctgggctgccaggtgtacgagggctacggccagaccgagtgcaccgccggctgcaccttcaccacccccggcgactggaccagcggccacgtgggcgcccccctgccctgcaaccacatcaagctggtggacgtggaggagctgaactactgggcctgcaagggcgagggcgagatctgcgtgagaggccccaacgtgttcaagggctacctgaaggaccccgacagaaccaaggaggccctggacagcgacggctggctgcacaccggcgacatcggcaagtggctgcccgccggcaccctgaagatcatcgacagaaagaagcacatcttcaagctggcccagggcgagtacgtggcccccgagaagatcgagaacatctacatcagaagccagcccgtggcccagatctacgtgcacggcgacagcctgaaggccttcctggtgggcatcgtggtgcccgaccccgaggtgatgcccagctgggcccagaagagaggcatcgagggcacctacgccgacctgtgcaccaacaaggacctgaagaaggccatcctggaggacatggtgagactgggcaaggagagcggcctgcacagcttcgagcaggtgaaggccatccacatccacagcgacatgttcagcgtgcagaacggcctgctgacccccaccctgaaggccaagagacccgagctgagagagtacttcaagaagcagatcgaggagctgtacagcatcagcatgtag

SEQ ID NO: 82004 - DNA, 4499 bp, Artificial Sequence
  derived and/or modified sequence
atgcagacacaggagatcctgaggatactgcgactgcctgagctaggtgacttgggacagtttttccgcagcctctcggccaccaccctcgacagtggcggggcacggcgatctgtgattgggtctggccctcagctacttacccactactatgatgatgcccggaccatgtaccaggtgttccgccgtgggcttagcatctcagggaatgggccctgtcttggtttcaggaagcctaagcagccttaccagtggctgtcctaccaggaggtggccgacagggctgaatttctggggtccggacttctccagcacaattgtaaagcatgcactgatcagtttattggtgtttttgcacaaaatcggccagagtggatcattgtggagctggcctgctacacatattccatggtggtggtcccgctctatgacaccctgggccctggggctatccgctacatcatcaatacagcggacatcagcaccgtgattgtggacaaacctcagaaggctgtgcttctgctagagcatgtggagaggaaggagactccaggcctcaagctgatcatcctcatggacccattcgaagaagccctgaaagagagagggcagaagtgcggggtggtcattaagtccatgcaggccgtggaggactgtggccaagagaatcaccaggctcctgtgcccccgcagcctgatgacctctccattgtgtgtttcacaagcggcacgacagggaacccaaaaggtgcgatgctcacccatgggaacgtggtggctgatttctcaggctttctgaaagtgacagagggagatatccgccttctctcagatgacatgaaggctctatgccccaccatcttccctgtggtcccacgactgctgaaccggatgtacgacaagatcttcagccaggcaaacacaccattaaagcgctggctcctggagtttgcagcaaagcgtaagcaagccgaggtccggagtggaatcatcaggaatgatagtatctgggatgaactcttctttaataagattcaggccagtcttggtgggtgtgtgcggatgattgttactggagcagccccagcatcaccaacagttctgggatttctccgggcagctctagggtgccaggtttatgaaggttatggccaaactgagtgcacagctggatgtaccttcaccactcctggcgactggacctcagggcacgtaggggcgccacttccctgcaatcatatcaagctcgttgatgttgaggaactgaactactgggcctgcaaaggagagggagagatatgtgtgagaggaccaaatgtgttcaaaggctacttgaaagatccagacaggacgaaggaggccctggacagcgatggctggcttcacactggagacatcggaaaatggctgccggcaggaactcttaaaattattgatcggaaaaagcatatatttaaacttgctcagggagaatatgttgcacccgagaagattgagaacatctacatccggagccaacctgtggcgcaaatctatgtccatggggacagcttaaaggcctttttggtaggcattgttgtgcctgaccctgaagttatgccctcctgggcccagaagagaggaattgaaggaacatatgcagatctctgcacaaataaggatctgaagaaagccattttggaagatatggtgaggttaggaaaagaaagtggactccattcttttgagcaggttaaagccattcacatccattctgacatgttctcagttcaaaatggcttgctgacaccaacactaaaagctaagagacctgagctgagagagtacttcaaaaaacaaatagaagagctttactcaatctccatgtgaagttcaaggaaagttcttctcagtgtaatgaactgtctagcaatattatagttattcttgaaagtaatgagtcaaaatgacacagctgaaaatgaataagcatctgattttatgactgagccttttcctgtcccaagaggtctttaacaatattttctctatcatcaatgagtatattttatttttattataaaaatgatattgtggtggactgctaaaaatatcacaaatggcaatgtaaaaatcaagacattttctcaagaactgtgtaccactaaaagtaatatattgtcaatgttcacagaactattaaacataaaggaaaaacataagtgatatattctacttaattatttgtgaatcagtaaccagatgcagcaaatatctaggcaatgtggactacctcattcagtaactgattgtcaaaatcacaattaaatcagacttcaaaaattaaagctaggtgtatagaatcatgctaaaagaaaacatgataactcatagtctacgtaacttcagagtctttaaacatgacaatccacattgtcatatgtgaaaattttctctctgatttttactttcattcatgaaaaatgaaaattcagaaattctttttttcctttttgttttgagacagggtctgctctgtcacctaggctggagtgcagtggcttaatcatggctcattgcagtctccatctcctgggctcgagtgatcctcctgtctcacctcccaagtagctgagactacagtacaggcacatgccaccacacctggctaatagaaattttttttttagagattttgctcaggctggtctcaaactcctgagctcaagggatcctcccgccttggcctccctaagtgctaggattacaggcatgagccattgttcccagccaaattcagatattattaaaacacatgtcatatttatatagtaacttacaaagacctttcaatacattttctcatttattaagctcattaaagtattcaggaactacctagaaaaaatataatgtaaaactattcaaggatagtgtgtgtatgttcatggacttcttattataatgaattctaaaagacatctgttgactctacaatgaatggatccttgaggaatacttgggagaagaaactcagagttatttctcagggtaggcagcaattaatgtacctacattccttgctggggtcttctagtcttccattcccaatgtgcccatgctatgcctggaaaccctatatggttgtaattctgaacaatttcactttttttccagtaagaatatcaaggcagaaggtgggaaggaggggacattatttccagggaaaatagtttttcaacaatataactttgataaacctctttaaaatgccccaagaaaactttttaagtccatagacaaagaaatactgcctaatggcataattacattcctaaaatctttaagcgtgccgaagtttaaccactaaaacctcctttcttgcattatgtatttagatgcaccctgtattggggtgtcaacaatttcttataattaaaggccagataccatggacagcaattaagttccaagctatagattgtgcctctgaaaaaggcatggaccccaggaacgtgtttttcttctgtagagacaagactctaaaagcatatcaacaatccatatgcaattcatgtgttaatttaaaatgtatgtgctcagtgtttgtagtctagaagctcctttcccttggaggaatgccaagcagtttgcaaaaataaatgctgttagttaaaaaccacataatcacatgggcctactgaataaatatgcatcagtgattatatacttatatttcagtcttgtcaaaagtgaatcactgtttcatttgatgtatttacccagtctttttatccagtttttcttgggcatattctctctgaagacccactgttgcacttctaaatttgacagttaagaaatgagctagttctatacacactgatttttaaaggcgtttctgaataaactaatacttaaaatgtccaaagtcacatctgtacagcattagatttttatatttaatatatatttgactaattaaaagtgaaagttgttacctgaactggatattcatactattttaagggcaagttgcttacatttcaataacaacaaaaaaagaatctgtttcccattgtcctcctactcaactaaaattcatagttggctttaagcccaaaagaattttgaacaatgtgacagaaacaagtaatgtaaaacttattttgttttatttatactttataatagttagatataacagattatggacaacttaatatttcttctttttggctgggcgcggtggctcatgcctgtaatcccagcactttgggaggccgaggcgggcagatcacgaagtcaggagatcgagaccatcctggctaacacagtgaaaccccgtctctactaaaaaaatacaaaaaattagccgggcgttgtggcgggcgcctgtagtcccagctactcgggaggctgaggcaggagaatggcatgaacctgggaggcggagcttgcagtgagccgagatcccgccactgtactccagcctgggcaacagaacgagactccgtctc

SEQ ID NO: 82005 - protein, 522 aa, Artificial Sequence
  derived and/or modified sequence
MSSRPLESPPPYRPDEFKPNHYAPSNDIYGGEMHVRPMLSQPAYSFYPEDEILHFYKWTSPPGVIRILSMLIIVMCIAIFACVASTLAWDRGYGTSLLGGSVGYPYGGSGFGSYGSGYGYGYGYGYGYGGYTDPRAAKGFMLAMAAFCFIAALVIFVTSVIRSEMSRTRRYYLSVIIVSAILGIMVFIATIVYIMGVNPTAQSSGSLYGSQIYALCNQFYTPAATGLYVDQYLYHYCVVDPQEAIAIVLGFMIIVAFALIIFFAVKTRRKMDRYDKSNILWDKEHIYDEQPPNVEEWVKNVSAGTQDVPSPPSDYVERVDSPMAYSSNGKVNDKRFYPESSYKSTPVPEVVQELPLTSPVDDFRQPRYSSGGNFETPSKRAPAKGRAGRSKRTEQDHYETDYTTGGESCDELEEDWIREYPPITSDQQRQLYKRNFDTGLQEYKSLQSELDEINKELSRLDKELDDYREESEEYMAAADEYNRLKQVKGSADYKSKKNHCKQLKSKLSHIKKMVGDYDRQKT

SEQ ID NO: 82006 - protein, 468 aa, Artificial Sequence
  derived and/or modified sequence
MSSRPLESPPPYRPDEFKPNHYAPSNDIYGGEMHVRPMLSQPAYSFYPEDEILHFYKWTSPPGVIRILSMLIIVMCIAIFACVASTLAWDRGYGTSLLGGSVGYPYGGSGFGSYGSGYGYGYGYGYGYGGYTDPRAAKGFMLAMAAFCFIAALVIFVTSVIRSEMSRTRRYYLSVIIVSAILGIMVFIATIVYIMGVNPTAQSSGSLYGSQIYALCNQFYTPAATGLYVDQYLYHYCVVDPQEVKNVSAGTQDVPSPPSDYVERVDSPMAYSSNGKVNDKRFYPESSYKSTPVPEVVQELPLTSPVDDFRQPRYSSGGNFETPSKRAPAKGRAGRSKRTEQDHYETDYTTGGESCDELEEDWIREYPPITSDQQRQLYKRNFDTGLQEYKSLQSELDEINKELSRLDKELDDYREESEEYMAAADEYNRLKQVKGSADYKSKKNHCKQLKSKLSHIKKMVGDYDRQKT

SEQ ID NO: 82007 - protein, 200 aa, Artificial Sequence
  derived and/or modified sequence
MAYSSNGKVNDKRFYPESSYKSTPVPEVVQELPLTSPVDDFRQPRYSSGGNFETPSKRAPAKGRAGRSKRTEQDHYETDYTTGGESCDELEEDWIREYPPITSDQQRQLYKRNFDTGLQEYKSLQSELDEINKELSRLDKELDDYREESEEYMAAADEYNRLKQVKGSADYKSKKNHCKQLKSKLSHIKKMVGDYDRQKT

SEQ ID NO: 82008 - DNA, 1569 bp, Artificial Sequence
  derived and/or modified sequence
atgagcagcagacccctggagagcccccccccctacagacccgacgagttcaagcccaaccactacgcccccagcaacgacatctacggcggcgagatgcacgtgagacccatgctgagccagcccgcctacagcttctaccccgaggacgagatcctgcacttctacaagtggaccagcccccccggcgtgatcagaatcctgagcatgctgatcatcgtgatgtgcatcgccatcttcgcctgcgtggccagcaccctggcctgggacagaggctacggcaccagcctgctgggcggcagcgtgggctacccctacggcggcagcggcttcggcagctacggcagcggctacggctacggctacggctacggctacggctacggcggctacaccgaccccagagccgccaagggcttcatgctggccatggccgccttctgcttcatcgccgccctggtgatcttcgtgaccagcgtgatcagaagcgagatgagcagaaccagaagatactacctgagcgtgatcatcgtgagcgccatcctgggcatcatggtgttcatcgccaccatcgtgtacatcatgggcgtgaaccccaccgcccagagcagcggcagcctgtacggcagccagatctacgccctgtgcaaccagttctacacccccgccgccaccggcctgtacgtggaccagtacctgtaccactactgcgtggtggacccccaggaggccatcgccatcgtgctgggcttcatgatcatcgtggccttcgccctgatcatcttcttcgccgtgaagaccagaagaaagatggacagatacgacaagagcaacatcctgtgggacaaggagcacatctacgacgagcagccccccaacgtggaggagtgggtgaagaacgtgagcgccggcacccaggacgtgcccagcccccccagcgactacgtggagagagtggacagccccatggcctacagcagcaacggcaaggtgaacgacaagagattctaccccgagagcagctacaagagcacccccgtgcccgaggtggtgcaggagctgcccctgaccagccccgtggacgacttcagacagcccagatacagcagcggcggcaacttcgagacccccagcaagagagcccccgccaagggcagagccggcagaagcaagagaaccgagcaggaccactacgagaccgactacaccaccggcggcgagagctgcgacgagctggaggaggactggatcagagagtacccccccatcaccagcgaccagcagagacagctgtacaagagaaacttcgacaccggcctgcaggagtacaagagcctgcagagcgagctggacgagatcaacaaggagctgagcagactggacaaggagctggacgactacagagaggagagcgaggagtacatggccgccgccgacgagtacaacagactgaagcaggtgaagggcagcgccgactacaagagcaagaagaaccactgcaagcagctgaagagcaagctgagccacatcaagaagatggtgggcgactacgacagacagaagacctag

SEQ ID NO: 82009 - DNA, 1407 bp, Artificial Sequence
  derived and/or modified sequence
atgagcagcagacccctggagagcccccccccctacagacccgacgagttcaagcccaaccactacgcccccagcaacgacatctacggcggcgagatgcacgtgagacccatgctgagccagcccgcctacagcttctaccccgaggacgagatcctgcacttctacaagtggaccagcccccccggcgtgatcagaatcctgagcatgctgatcatcgtgatgtgcatcgccatcttcgcctgcgtggccagcaccctggcctgggacagaggctacggcaccagcctgctgggcggcagcgtgggctacccctacggcggcagcggcttcggcagctacggcagcggctacggctacggctacggctacggctacggctacggcggctacaccgaccccagagccgccaagggcttcatgctggccatggccgccttctgcttcatcgccgccctggtgatcttcgtgaccagcgtgatcagaagcgagatgagcagaaccagaagatactacctgagcgtgatcatcgtgagcgccatcctgggcatcatggtgttcatcgccaccatcgtgtacatcatgggcgtgaaccccaccgcccagagcagcggcagcctgtacggcagccagatctacgccctgtgcaaccagttctacacccccgccgccaccggcctgtacgtggaccagtacctgtaccactactgcgtggtggacccccaggaggtgaagaacgtgagcgccggcacccaggacgtgcccagcccccccagcgactacgtggagagagtggacagccccatggcctacagcagcaacggcaaggtgaacgacaagagattctaccccgagagcagctacaagagcacccccgtgcccgaggtggtgcaggagctgcccctgaccagccccgtggacgacttcagacagcccagatacagcagcggcggcaacttcgagacccccagcaagagagcccccgccaagggcagagccggcagaagcaagagaaccgagcaggaccactacgagaccgactacaccaccggcggcgagagctgcgacgagctggaggaggactggatcagagagtacccccccatcaccagcgaccagcagagacagctgtacaagagaaacttcgacaccggcctgcaggagtacaagagcctgcagagcgagctggacgagatcaacaaggagctgagcagactggacaaggagctggacgactacagagaggagagcgaggagtacatggccgccgccgacgagtacaacagactgaagcaggtgaagggcagcgccgactacaagagcaagaagaaccactgcaagcagctgaagagcaagctgagccacatcaagaagatggtgggcgactacgacagacagaagacctag

SEQ ID NO: 82010 - DNA, 1569 bp, Artificial Sequence
  derived and/or modified sequence
atgagcagtcggccactggagagccccccaccttataggccagacgagttcaagccaaatcactacgcccctagtaacgatatctatggcggagagatgcacgtgcggccgatgctgagtcaaccggcatattcattttacccagaagacgagatcctccacttttacaagtggacctccccccctggcgtcattcgcattcttagcatgctgatcattgtgatgtgcattgcgatctttgcttgcgtggcttcaaccctggcttgggatcgtgggtacggcacaagcttactgggtggtagcgtcgggtatccctacggaggcagcgggtttggaagttacggctcaggttatgggtatggttatggctatggatatggctatggaggatataccgacccaagggcggcaaaaggattcatgctggctatggcagctttttgttttatcgctgccttggtcatctttgttacctcggtgataagatcagaaatgagtcggacgaggaggtattacctttcggttattatcgtatccgctatcttgggtatcatggtgtttatagctacgattgtctacataatgggagtaaaccctacagcccagtccagcggttcactgtacggatctcagatatacgcactctgcaaccagttttacacccctgccgccaccggtctttacgtggatcagtacctctatcattactgtgtggttgacccccaggaggccatagctattgtcttggggtttatgattattgtggcctttgccctcattatcttttttgccgttaagactagacgcaaaatggatcgctacgataaaagtaacattctgtgggacaaagagcacatttacgatgagcagcccccaaatgtagaggaatgggtaaagaacgtgagcgccggaacccaggacgtaccatcacctccatcggactacgtggaacgagtggattcgcccatggcttactcatcaaatggaaaagtgaacgacaaacgtttttatcccgagtctagctacaagtcaacacccgtgcccgaggtcgtgcaagagctccccttgacgagtcctgtagatgactttaggcaaccccgatactccagtggcgggaattttgagacacccagtaaaagagcaccagcaaagggcagagccggtcggtccaagaggactgaacaggatcactacgagacagactacaccaccggcggggagtcttgtgatgagttggaagaggactggattcgggagtacccaccgataacatcagatcagcagagacaactgtataagcgaaactttgacacagggctgcaggagtataagagtctccagtctgaactggatgagatcaacaaagagctgtcccggctggacaaagagctggacgactatagagaggagtcagaggagtatatggcggccgccgacgagtataacagactcaagcaggtgaagggcagcgccgattacaaatcgaaaaaaaaccactgcaagcaacttaagagtaagttgagccatataaaaaagatggtgggtgattatgaccgccagaagacctag

SEQ ID NO: 82011 - DNA, 1407 bp, Artificial Sequence
  derived and/or modified sequence
atgagctcccgccccctcgaatcacccccgccataccgaccagatgagtttaaaccaaaccactacgcaccatcaaacgatatatacggcggtgaaatgcatgtcagacctatgctgagtcagcccgcctacagcttttacccagaagacgagattctgcacttttacaagtggactagtccccctggggtgatcagaatcctcagcatgctgataattgtcatgtgtatagcgatcttcgcttgtgtggcgtccacccttgcgtgggatcgggggtatggaacctccctgctgggaggcagcgttggatacccgtatggcgggagtggttttggttcgtacggatcggggtatggctatggctacggctacggctacgggtacggtggctatacagatccccgtgccgccaagggttttatgctggcgatggccgccttctgcttcattgccgctctggtcatcttcgtcacctctgttatcagatcagaaatgtcacgcacaagaagatattaccttagcgtcatcattgtttctgccattctgggaatcatggttttcattgctacaatagtctacattatgggtgtcaatcctaccgcgcaaagttccggcagtctgtatggctcccagatctatgccctctgtaaccaattttatacacccgccgccactggactgtacgtggatcagtatctctaccattactgcgtggtcgacccacaggaagtgaagaacgtgtctgcaggaacacaagatgtgcctagtccccccagcgactatgttgagcgagtcgacagcccgatggcctacagttcaaacgggaaagttaatgataagcgcttctatcccgagagctcctataaaagcactccggtacctgaggtggtgcaggagctgccacttactagtccagtggatgacttcagacagccacgttattcaagcggcggcaacttcgaaacaccaagtaagcgcgcacccgctaaaggcagggcaggtcggtcaaaaaggactgagcaagaccactatgaaactgattacaccaccggaggtgagtcctgtgacgagctggaagaggattggattagggaatacccacccatcacctccgaccagcagaggcagctctacaaacgaaattttgacactggtttgcaggagtacaaatcccttcaaagtgaacttgacgaaatcaacaaagagctatccaggcttgacaaggaactggatgattatcgcgaggagagcgaagaatacatggctgccgctgatgaatataataggctgaagcaggtcaaggggtcagcagactataaaagcaaaaagaaccactgtaagcagctcaagagcaagctgtcacatattaaaaagatggtgggagactatgatcgacagaagacttag

SEQ ID NO: 82012 - DNA, 1569 bp, Artificial Sequence
  derived and/or modified sequence
atgagcagtaggcctctggagtccccccccccttacagacccgatgaattcaaacctaatcattatgcgccttcaaacgatatttatggcggtgagatgcacgtcaggccaatgttgtctcagccggcgtactctttttaccctgaagacgaaatcctgcacttttacaagtggactagccctccgggggtgattagaattctttcaatgctgattatcgtaatgtgcatcgccatttttgcttgcgtagccagcacccttgcttgggaccggggctacggaacgtcactgctgggcggcagcgtgggctatccttatggcgggagtgggttcggcagctatggctctggctacggttacggatatggatacggatatgggtatggggggtatacagatccaagagccgctaagggcttcatgttagctatggctgccttttgttttatcgccgctttggtcattttcgtgacctctgtcattcggagcgagatgtcaaggaccagacgctattacctttcagtgataatagtgtctgccattctggggatcatggtcttcattgccacgattgtgtacatcatgggcgtgaatcctaccgcccaatcctctgggagcctttacggcagccagatctatgcactgtgtaaccagttctatacccccgccgccaccggcctgtacgtggatcaatacttgtaccactactgcgtggtggatcctcaggaagcgattgccatcgtgctggggttcatgattattgtagcttttgcccttatcattttttttgcggtgaaaacgaggcgcaagatggaccgctacgataaaagtaatatactctgggataaagaacatatttatgacgagcaaccacccaatgtggaggaatgggtgaaaaatgtgtctgccggcacccaggacgtgcctagcccgccgtcagattacgttgaacgcgtggactctcctatggcctattcaagcaacgggaaggtcaacgataagcgtttttaccctgagtcatcatacaaaagtacgccagtcccggaagtagttcaggaactcccacttacttctcctgtcgacgattttaggcaacctaggtacagcagtgggggaaattttgagacaccttcaaagagggcaccagctaaggggcgcgccgggcggagtaaacgcaccgagcaagatcattatgaaaccgactacacaactggaggggaaagttgtgacgagctggaagaagactggattcgcgagtatccacccattactagcgaccagcagaggcaactgtacaagaggaactttgatactggactgcaagaatacaagtcactgcagagcgagctggacgagatcaacaaggagctgtctaggctggataaagagttagacgattaccgagaagaatccgaggaatatatggccgctgcagacgagtacaacagactcaaacaagtaaagggttccgcagactataagtccaagaaaaaccattgcaagcagcttaaaagtaaattgagtcacatcaaaaagatggtcggggactacgatcgtcaaaaaacctag

SEQ ID NO: 82013 - DNA, 1569 bp, Artificial Sequence
  derived and/or modified sequence
atgagcagccggcccctggagagccccccaccctacagaccagatgagttcaagcccaaccactacgcccccagcaatgacatctatggaggagagatgcacgtgcggcccatgctgagccagcctgcctacagcttctacccagaagatgagatcctgcacttctacaagtggaccagccccccaggagtcatccgcatcctgtccatgctgatcatcgtgatgtgcatcgccatctttgcctgtgtggccagcaccctggcctgggaccggggctacggcaccagcctgctgggcggctctgtgggctacccctacggcggcagcggcttcggcagctatggcagcggctacggctacggctacggctacggctacggctacggcggctacacagacccccgggccgccaagggcttcatgctggccatggccgccttctgcttcatcgccgccctggtgatctttgtgaccagcgtcatccgctctgagatgagcaggacccggcgctactacctgagcgtcatcatcgtgtctgccatcctgggcatcatggtgttcatcgccaccatcgtgtacatcatgggcgtgaaccccacagcccagagcagcggcagcctgtatggcagccagatctatgccctgtgcaaccagttctacaccccagctgccaccggcctgtatgtggaccagtacctgtaccactactgtgtggtggacccccaggaggccatcgccatcgtgctgggcttcatgatcatcgtggcctttgccctgatcatcttctttgctgtgaagaccaggaggaagatggacagatatgacaagagcaacatcctgtgggacaaggagcacatctatgatgagcagcccccaaatgtggaggagtgggtgaagaatgtgtctgctggcacccaggatgtgcccagccccccaagtgactatgtggagcgggtggacagccccatggcctacagcagcaatggcaaggtgaatgacaagcgcttctacccagagagcagctacaagagcacccctgtgcctgaggtggtgcaggagctgcccctgaccagccctgtggatgacttccggcagccccgctacagcagcggcggcaactttgagacccccagcaagagggccccagccaagggccgggccggccgcagcaagaggacagagcaggaccactatgaaacagactacaccaccggcggggagagctgtgatgagctggaggaggactggatccgggagtacccacccatcaccagtgaccagcagaggcagctgtacaagaggaactttgacaccggcctgcaggagtacaagagcctgcagagcgagctggatgagatcaacaaggagctgagccggctggacaaggagctggatgactaccgggaggagagcgaggagtacatggctgctgctgatgagtacaaccggctgaagcaggtgaagggcagcgctgactacaagagcaagaagaaccactgcaagcagctgaagagcaagctgagccacatcaagaagatggtgggggactatgaccggcagaagacctag

SEQ ID NO: 82014 - DNA, 1407 bp, Artificial Sequence
  derived and/or modified sequence
atgagcagccggcccctggagagccccccaccctacagaccagatgagttcaagcccaaccactacgcccccagcaatgacatctatggaggagagatgcacgtgcggcccatgctgagccagcctgcctacagcttctacccagaagatgagatcctgcacttctacaagtggaccagccccccaggagtcatccgcatcctgtccatgctgatcatcgtgatgtgcatcgccatctttgcctgtgtggccagcaccctggcctgggaccggggctacggcaccagcctgctgggcggctctgtgggctacccctacggcggcagcggcttcggcagctatggcagcggctacggctacggctacggctacggctacggctacggcggctacacagacccccgggccgccaagggcttcatgctggccatggccgccttctgcttcatcgccgccctggtgatctttgtgaccagcgtcatccgctctgagatgagcaggacccggcgctactacctgagcgtcatcatcgtgtctgccatcctgggcatcatggtgttcatcgccaccatcgtgtacatcatgggcgtgaaccccacagcccagagcagcggcagcctgtatggcagccagatctatgccctgtgcaaccagttctacaccccagctgccaccggcctgtatgtggaccagtacctgtaccactactgtgtggtggacccccaggaggtgaagaatgtgtctgctggcacccaggatgtgcccagccccccaagtgactatgtggagcgggtggacagccccatggcctacagcagcaatggcaaggtgaatgacaagcgcttctacccagagagcagctacaagagcacccctgtgcctgaggtggtgcaggagctgcccctgaccagccctgtggatgacttccggcagccccgctacagcagcggcggcaactttgagacccccagcaagagggccccagccaagggccgggccggccgcagcaagaggacagagcaggaccactatgaaacagactacaccaccggcggggagagctgtgatgagctggaggaggactggatccgggagtacccacccatcaccagtgaccagcagaggcagctgtacaagaggaactttgacaccggcctgcaggagtacaagagcctgcagagcgagctggatgagatcaacaaggagctgagccggctggacaaggagctggatgactaccgggaggagagcgaggagtacatggctgctgctgatgagtacaaccggctgaagcaggtgaagggcagcgctgactacaagagcaagaagaaccactgcaagcagctgaagagcaagctgagccacatcaagaagatggtgggggactatgaccggcagaagacctag

SEQ ID NO: 82015 - DNA, 1569 bp, Artificial Sequence
  derived and/or modified sequence
atgagcagccggcccctggagagcccccccccctaccggcccgacgaatttaagcccaaccactacgcaccatctaacgacatttacggcggcgagatgcatgtcaggcctatgctcagtcagcccgcctatagtttctatcctgaagatgagattcttcacttttataagtggacgagtcccccaggagtaattcgcatcctcagcatgctaatcatcgtcatgtgtattgctattttcgcctgcgtggcgtctacattagcctgggatcgaggctacggaacctcgctcttaggcggctccgttgggtacccctatggaggtagcggcttcggaagctatggctcagggtacgggtacggatacggctatggctacggctatggtggatacacagatccacgagctgccaaaggctttatgcttgccatggctgctttctgtttcattgccgccctcgttatcttcgtgacaagcgttatccggagcgagatgagccgaacaagaagatactatctaagcgtgattatcgtgagcgccatcctggggatcatggtgtttatcgccacaattgtatatattatgggtgtcaatcccacagcccagagctcaggctcactgtacgggagccagatatatgccttgtgtaaccaattctatacacctgcagccaccggtctttacgtggatcagtacctttatcactattgcgtggtggatccgcaagaggccatcgcgatcgttcttggattcatgatcatcgtggcctttgctctgatcatcttcttcgccgtaaaaaccaggagaaagatggataggtatgacaaaagcaacatcctttgggacaaggaacatatctacgatgaacagcccccaaatgtggaggagtgggtaaagaacgtctctgcggggactcaagacgtgccctcacccccatcagattacgtggagcgggtcgactctccgatggcctatagcagtaatggcaaagtaaacgataagcgcttctatccggagtctagctataagtctacccccgtgcccgaagtggtgcaagagctgccactgaccagtccagtggacgactttcggcaaccgcggtactcctctggtggaaattttgaaacacccagcaaacgcgcccctgcaaagggtagagccggcaggtccaagaggacggagcaggatcattacgagactgattacaccacaggcggagaatcttgtgatgaacttgaggaagattggatccgtgagtaccccccaatcacaagcgaccagcaaagacaattatacaagcgcaactttgacacgggacttcaggagtacaagtcccttcagtccgagctggacgagatcaataaagagctcagtaggctcgataaggaactggatgactatcgggaggaaagcgaggagtatatggctgctgcagatgaatacaataggctcaagcaggtgaaaggcagcgccgattataagtcaaagaagaatcactgtaaacaattgaagtccaagctgtcccacataaaaaagatggtcggcgattacgaccggcagaaaacctag

SEQ ID NO: 82016 - DNA, 1407 bp, Artificial Sequence
  derived and/or modified sequence
atgagcagccggcccctggagagcccccccccctaccggcccgacgagtttaaaccgaaccactacgcaccttcaaacgacatctatggcggtgagatgcacgttcggcccatgctatcgcaacccgcctacagcttttatcctgaggacgagatcctgcacttctataaatggacatcacctcccggggtcatcagaatccttagcatgctgataatcgtgatgtgtatagcgatttttgcgtgtgtggcttcgacactggcctgggacagagggtatgggacttctctcctgggggggagcgtgggatatccctacggcggttctggatttgggtcctacggctccggttacggttatgggtatggttatgggtacggatacggcggctacacggatccacgcgccgctaaaggattcatgttggccatggctgctttctgtttcatagcagcccttgtgatctttgtgaccagcgtgatcaggagcgaaatgtctcgaactcgccgatattacctctccgtaatcattgtatctgccatactgggaattatggtgttcatagccacaatagtgtacatcatgggtgtgaaccccaccgcccagagcagcgggtcactttacggctctcagatctacgccttgtgtaatcagttctatacgcctgctgcgactgggctatatgtcgatcaatatctgtaccactattgcgtggtagacccccaggaagtgaagaacgtatctgcgggaacacaggacgttccatctcctcctagtgattacgtggagcgcgttgattccccaatggcctactcatccaatggcaaggtgaacgacaagcgcttttaccccgaatcatcgtataagtccacacccgtcccggaagtggtgcaggaactccccctgaccagcccagttgatgacttcaggcagccccgatactcctctggtggcaactttgagacccccagcaagagagcacctgcaaaggggcgggcggggcgcagcaagagaaccgagcaggaccattatgaaacagactataccaccggtggcgaatcttgtgacgagctggaagaggattggattcgagagtaccctcctattacctctgatcagcaacggcagctctataagagaaacttcgatacgggcctgcaagagtataagagcctgcagagtgaactcgacgaaatcaacaaggagcttagcagactggataaagagctagacgactatcgggaggagtctgaggagtatatggcagcagctgatgaatataataggctcaagcaggtcaaaggttcagccgactacaagtcaaagaagaaccactgcaagcagctgaagtcaaaattgagccatatcaaaaagatggtgggggattatgacagacagaagacatag

SEQ ID NO: 82017 - DNA, 1569 bp, Artificial Sequence
  derived and/or modified sequence
atgagcagccggcccctggagagcccccccccctaccggcccgacgagtttaagcccaaccattacgccccaagcaatgacatctatggcggtgagatgcacgtgagaccaatgttgtcccagcccgcgtattcattctatccggaggatgaaatcttgcacttttacaaatggacctcccctcccggcgtgattagaattctctccatgctgattattgtgatgtgcatcgcaatatttgcctgcgtggcctccaccctggcctgggaccgcgggtatggaacctcactgctcgggggatcagtgggatacccttacggcggatccggatttgggtcctacggcagcggctatgggtatgggtatggctacggttatggctatggcggatacaccgaccctagagcagcaaaaggctttatgctcgcaatggctgccttttgcttcatcgccgccctggtcattttcgtgacctcagtaattagatccgagatgtctcgtaccaggagatattatctctccgtcatcattgtgagtgccattcttggcatcatggtattcatcgctacaattgtgtatattatgggggtcaacccaacagcccagtcttcggggtccttgtacggctcccagatatacgcactgtgtaatcagttctatacgcccgccgctaccggcctttacgtcgaccagtatctgtaccattactgcgttgtggatccacaggaggcgatcgcaattgtgcttgggttcatgatcatagtcgcattcgcacttattattttttttgccgtgaagactaggcgcaagatggatcgctatgataagagcaacatactgtgggacaaggaacatatatacgatgagcagccgcctaatgtggaggaatgggtgaaaaacgtcagcgctggaacccaagatgtcccctctccccctagcgactatgtggaaagagttgactcacccatggcttattcctccaacggcaaggtcaacgacaaacggttctacccagagtcctcctacaagtctacccccgttccagaggtggtgcaggagctccctctcactagtccagtggacgattttcgccaacctaggtattctagtggcggtaatttcgagactccttctaaacgcgccccggccaaaggaagggctggaagatcaaagcggactgagcaggatcactacgagaccgactacacgaccggcggggagagctgcgacgagctcgaggaggattggatcagggaatacccacccatcacgagtgatcagcaaagacaactctacaagaggaacttcgacacaggactgcaggagtataagtcacttcaaagtgagctcgacgagattaacaaggaactatccaggctggataaggagcttgatgactatagagaagaaagtgaggaatatatggctgccgcggacgagtataacagactgaagcaggttaaggggtccgccgactacaagagcaagaagaaccactgcaaacaactgaaaagcaagttatctcatattaagaaaatggtgggggactatgaccggcaaaagacatag

SEQ ID NO: 82018 - DNA, 6438 bp, Artificial Sequence
  derived and/or modified sequence
gcctctctccatcagacaccccaaggttccatccgaagcaggcggagcaccgaacgcaccccggggtggtcagggacccccatccgtgctgccccctaggagcccgcgcctctcctctgcgccccgcctctcgggccgcaacgtcgcgcggttcctttaacagcgcgctggcagggtgtgggaagcaggaccgcgtcctcccgccccctcccatccgagtttcaggtgaattggtcaccgagggaggaggccgacacaccacacctacactcccgcgtccacctctccctccctgcttcctctggcggaggcggcaggaaccgagagccaggtccagagcgccgaggagccggtctaggacgcagcagattggtttatcttggaagctaaagggcattgctcatcctgaagatcagctgaccattgacaatcagccatgtcatccaggcctcttgaaagtccacctccttacaggcctgatgaattcaaaccgaatcattatgcaccaagcaatgacatatatggtggagagatgcatgttcgaccaatgctctctcagccagcctactctttttacccagaagatgaaattcttcacttctacaaatggacctctcctccaggagtgattcggatcctgtctatgctcattattgtgatgtgcattgccatctttgcctgtgtggcctccacgcttgcctgggacagaggctatggaacttcccttttaggaggtagtgtaggctacccttatggaggaagtggctttggtagctacggaagtggctatggctatggctatggttatggctatggctacggaggctatacagacccaagagcagcaaagggcttcatgttggccatggctgccttttgtttcattgccgcgttggtgatctttgttaccagtgttataagatctgaaatgtccagaacaagaagatactacttaagtgtgataatagtgagtgctatcctgggcatcatggtgtttattgccacaattgtctatataatgggagtgaacccaactgctcagtcttctggatctctatatggttcacaaatatatgccctctgcaaccaattttatacacctgcagctactggactctacgtggatcagtatttgtatcactactgtgttgtggatccccaggaggccattgccattgtactggggttcatgattattgtggcttttgctttaataattttctttgctgtgaaaactcgaagaaagatggacaggtatgacaagtccaatattttgtgggacaaggaacacatttatgatgagcagccccccaatgtcgaggagtgggttaaaaatgtgtctgcaggcacacaggacgtgccttcacccccatctgactatgtggaaagagttgacagtcccatggcatactcttccaatggcaaagtgaatgacaagcggttttatccagagtcttcctataaatccacgccggttcctgaagtggttcaggagcttccattaacttcgcctgtggatgacttcaggcagcctcgttacagcagcggtggtaactttgagacaccttcaaaaagagcacctgcaaagggaagagcaggaaggtcaaagagaacagagcaagatcactatgagacagactacacaactggcggcgagtcctgtgatgagctggaggaggactggatcagggaatatccacctatcacttcagatcaacaaagacaactgtacaagaggaattttgacactggcctacaggaatacaagagcttacaatcagaacttgatgagatcaataaagaactctcccgtttggataaagaattggatgactatagagaagaaagtgaagagtacatggctgctgctgatgaatacaatagactgaagcaagtgaagggatctgcagattacaaaagtaagaagaatcattgcaagcagttaaagagcaaattgtcacacatcaagaagatggttggagactatgatagacagaaaacatagaaggctgatgccaagttgtttgagaaattaagtatctgacatctctgcaatcttctcagaaggcaaatgactttggaccataaccccggaagccaaacctctgtgagcatcacaaagttttggttgctttaacatcatcagtattgaagcattttataaatcgcttttgataatcaactgggctgaacactccaattaaggattttatgctttaaacattggttcttgtattaagaatgaaatactgtttgaggtttttaagccttaaaggaaggttctggtgtgaactaaactttcacaccccagacgatgtcttcatacctacatgtatttgtttgcataggtgatctcatttaatcctctcaaccacctttcagataactgttatttataatcacttttttccacataaggaaactgggttcctgcaatgaagtctctgaagtgaaactgcttgtttcctagcacacacttttggttaagtctgttttatgacttcattaataataaattccctggcctttcatattttagctactatatatgtgatgatctaccagcctccctattttttttctgttatataaatggttaaaagaggtttttcttaaataataaagatcatgtaaaagtaacaaatgtgtgaaatttaaagattgtaaatatatatttacttttttaagatcaaagtttaaaccccgtggttagaattttgtgtgtttttaaatactttttatctttttgcatgccttttttaaaaaaccaactagaacttttcattatatcagaatatctgattacatttataattcaattgtgacttgaactgtatcttacaggaatgttcaatttctatacatattttataaggtattaaacctggtgttttctttccataataacctgtttgatgttattagtgctgttaacatacagcaatggaaaaccacactcaggagttgtatctgttgttgtttatactcctttggatgctgtgctggttagtcgtttcccattcctttggctgtaagaatgctgatatgtctgggaatagaatgctataccacgaaataccaaataatttcaaatggtgcccttaaattgtatcacttttttaaaaattcagattcttattagtaaaattagttgatagcactgtgctgaccaagttgattgtgatcatcccagcttagacttttctaaaaacttttttttagaataatctataaactgaactttagtatgcatttcagatatttaggtatataatttttttttttttttgagacagagtctcactctcacccaggctggaatgcagtggtgctatcttggctcactgcaacctccacctcccgggttcaagcaattctcctgcctcagcctctcgagtagttgagactacaggtgcccatcaccatgcgtggctaatttttgtatttttaatagagacggggttttaccatagtggccaggttggtcttgaactcctgaccttgtggtctgcctgcctcggcctcccaaagtgctgggattacaggcgtgagccaccatgcctggcctaagtgtgtgtgtgtgtgtgtgtgtgtatttttttttttttttttttgagatggagttttgctcttgttgaacaggctggagtgcaatgtcgcgatctcagctcaccacaacctccgcctcccaggttcaaacaattctcctgcctcggcctcccgagtagctgggattacaggcatgcgccaccacacctggctaattttttttttgtatttttagtagagatggggtttctccatgttggtcaggctggtctcgaactcctgacctcaggtgatccatccacctcggcctcccaaagtgctgggattagaggcgtgagccactgtgcccggcctataatttttgatagatgattttgaattattttccagagataaaattttaaatgtttccattatatcactgatttatttctgcaaattgaataaattcttaattttctgcatgcacataatacaaaaggtattttcatagttttggatttataccaaatgaaaaggattctcttgatgagcacctttaactgatttttctgttaaagttttaacaatttgttcttggaagtcagttcgtgaaggcaagtttgtcagtattttcacaaaactattcagctgaatccagaaagtgaaacagcaagaatttgcattgtaaaattgtgttataaaattggactttgaaatttcaaaaataagaaaaattttcatgtgtatttatactaaataccgttttaggaaactaggatcagggtgtttctgttggcgttggcattaactagctggatgtaaatttgaaaagccactcaagcagcttcctagtctagaaagtcagaggtttagattagatttccgacatcccttccatttctgacctgtagttcttgtctggaattctgctttgttataaactattgttctaaggagtttgttgtgatagcacatagttcattttgtaaagattccctgcgtataaagtgatgccctacatatgtgattttgtattaaaagtatataggatcattattttattttgaaaaatttaaatacagaaaagtataaaatataagtaccatccgcccagaaataacatgtgttaatgttttgtcatatgtgctttatattttttgaaataaagtgaagtcaactagtatttatagtaaataagttacatacacataagtacatatatgatatttaatcctcacaacgatcttttgacatgtgaccatttcttattcttcttttatagacaaggaactaatgatatgatagattaactggctgttgtcacactagcaagtggcaaaacaagggattaggatcttagtctcttcaactgttagattctatacttccatcctgtgttgactttgttaatggattggataatgtgagatcactctgatgtaaataaagtatcctatattaatttcgagtgcattttaagtacttgtaacataaatgcttcctgtgaaatatctgtaaagacctgaatgggtacatgtgtgtaaagaagaatcagggcagaaaagtgcttttatcatggctccggggaccttagcttcagttggtgttgtgagaattcctcacacaaggacattctccttgcttcagcatcaggatggaagtgtttctcatctggactttttcaaagactcagctggaggaatcagaattcataatttcctggcagctcatgattctgctacactacaccatgccatctcttgtgtgaaaggacagatttgatggaggactatgtcatccctcatgcgtttcttattgtctacatttattctaatgggaagaagtgagcaaaaacacctcaataatttgggtagtttttagaaaaccttgttagtaaattagaatagtgccactttggcattatgagaaagaagcatggatacataactagggttttgtgtatgactacaacgaaatgcagaatggtgtctccaaaaggtttccaattgctgccacaagaactgcttggtattgcctacatgtgttgtcctatttttgctttgcccttctgcagttacttgctgtgggaccttggagaaattaacttagcctctctgtacttcagttttttgtatttgtaaaatatatttgtaataatctcatagttaagaaggtagttaatgtgtgactcagtccttgtctaaaagtaaatatgcctagctacccccatcttccaaagccagaaggtgaaactttaacaagttttctaaaagcaaattgtgttttttaaaagtgcatgtgtcatccaatcccatatgattgatctgtgctgggtgcagccttagaatgtaaattcttttgaattctaggcagagaatgcaggattggcattctaaatatttgtacatgataaacaaatgcttctttaggttagagcaaatagtttacttatcaagatcacaattgttagatactgttgtcaattacagaggttttagatgaggctttctggaatgatttagtttccctgtaagggagcctgtctattggaatagacaggttcacttctcccagtctttcaagttgcatgctttttatatctgattccactggctgagctgattgtgaatgtcctaaccctgttgattgtgtctggccactcatgggcaaagaacagattatccattctttatagttgtcttttagttttacaagttgaaaaaacatctgagtaggttagataatttattctaccactttgtaaatgattagaatatgtcagtcataatcatgccaagagattatggatttatgcatattttgttttgctgtagtaccattcctagttgaatcttaacatccatgtctaaaatctatacagaacaaatattacagttgggaaaactg

SEQ ID NO: 82019 - DNA, 2218 bp, Artificial Sequence
  derived and/or modified sequence
gtccccggctgagcgctggcggtcggtgcggcgtcaggtgcgcccgccaggtgagcgcgctccctggcaccgttggcccccggagggtcgggcccagttgcggcgagcggattggtttatcttggaagctaaagggcattgctcatcctgaagatcagctgaccattgacaatcagccatgtcatccaggcctcttgaaagtccacctccttacaggcctgatgaattcaaaccgaatcattatgcaccaagcaatgacatatatggtggagagatgcatgttcgaccaatgctctctcagccagcctactctttttacccagaagatgaaattcttcacttctacaaatggacctctcctccaggagtgattcggatcctgtctatgctcattattgtgatgtgcattgccatctttgcctgtgtggcctccacgcttgcctgggacagaggctatggaacttcccttttaggaggtagtgtaggctacccttatggaggaagtggctttggtagctacggaagtggctatggctatggctatggttatggctatggctacggaggctatacagacccaagagcagcaaagggcttcatgttggccatggctgccttttgtttcattgccgcgttggtgatctttgttaccagtgttataagatctgaaatgtccagaacaagaagatactacttaagtgtgataatagtgagtgctatcctgggcatcatggtgtttattgccacaattgtctatataatgggagtgaacccaactgctcagtcttctggatctctatatggttcacaaatatatgccctctgcaaccaattttatacacctgcagctactggactctacgtggatcagtatttgtatcactactgtgttgtggatccccaggaggttaaaaatgtgtctgcaggcacacaggacgtgccttcacccccatctgactatgtggaaagagttgacagtcccatggcatactcttccaatggcaaagtgaatgacaagcggttttatccagagtcttcctataaatccacgccggttcctgaagtggttcaggagcttccattaacttcgcctgtggatgacttcaggcagcctcgttacagcagcggtggtaactttgagacaccttcaaaaagagcacctgcaaagggaagagcaggaaggtcaaagagaacagagcaagatcactatgagacagactacacaactggcggcgagtcctgtgatgagctggaggaggactggatcagggaatatccacctatcacttcagatcaacaaagacaactgtacaagaggaattttgacactggcctacaggaatacaagagcttacaatcagaacttgatgagatcaataaagaactctcccgtttggataaagaattggatgactatagagaagaaagtgaagagtacatggctgctgctgatgaatacaatagactgaagcaagtgaagggatctgcagattacaaaagtaagaagaatcattgcaagcagttaaagagcaaattgtcacacatcaagaagatggttggagactatgatagacagaaaacatagaaggctgatgccaagttgtttgagaaattaagtatctgacatctctgcaatcttctcagaaggcaaatgactttggaccataaccccggaagccaaacctctgtgagcatcacaaagttttggttgctttaacatcatcagtattgaagcattttataaatcgcttttgataatcaactgggctgaacactccaattaaggattttatgctttaaacattggttcttgtattaagaatgaaatactgtttgaggtttttaagccttaaaggaaggttctggtgtgaactaaactttcacaccccagacgatgtcttcatacctacatgtatttgtttgcataggtgatctcatttaatcctctcaaccacctttcagataactgttatttataatcacttttttccacataaggaaactgggttcctgcaatgaagtctctgaagtgaaactgcttgtttcctagcacacacttttggttaagtctgttttatgacttcattaataataaattccctggcctttcatattttagctactatatatgtgatgatctaccagcctccctattttttttctgttatataaatggttaaaagaggtttttcttaaataataaagatcatgtaaaagt

SEQ ID NO: 82020 - DNA, 1748 bp, Artificial Sequence
  derived and/or modified sequence
agtccccggctgagcgctggcggtcggtgcggcgtcaggtgcgcccgccaggtgagcgcgctccctggcaccgttggcccccggagggtcgggcccagttgcggcgagcggattggtttatcttggaagctaaagggcattgctcatcctgaagatcagctgaccattgacaatcagccatgtcatccaggcctcttgaaagtccacctccttacaggcctgatgaattcaaaccgaatcattatgcaccaagcaatgacatatatggtggagagatgcatgttcgaccaatgctctctcagccagcctactctttttacccagaagatgaaattcttcacttctacaaatggacctctcctccaggagtgattcggatcctgtctatgctcattattgtgatgtgcattgccatctttgcctgtgtggcctccacgcttgcctgggacagaggctatggaacttcccttttaggaggtagtgtaggctacccttatggaggaagtggctttggtagctacggaagtggctatggctatggctatggttatggctatggctacggaggctatacagacccaagagcagcaaagggcttcatgttggccatggctgccttttgtttcattgccgcgttggtgatctttgttaccagtgttataagatctgaaatgtccagaacaagaagatactacttaagtgtgataatagtgagtgctatcctgggcatcatggtgtttattgccacaattgtctatataatgggagtgaacccaactgctcagtcttctggatctctatatggttcacaaatatatgccctctgcaaccaattttatacacctgcagctactggactctacgtggatcagtatttgtatcactactgtgttgtggatccccaggaggccattgccattgtactggggttcatgattattgtggcttttgctttaataattttctttgctgtgaaaactcgaagaaagatggacaggtatgacaagtccaatattttgtgggacaaggaacacatttatgatgagcagccccccaatgtcgaggagtgggttaaaaatgtgtctgcaggcacacaggacgtgccttcacccccatctgactatgtggaaagagttgacagtcccatggcatactcttccaatggcaaagtgaatgacaagcggttttatccagagtcttcctataaatccacgccggttcctgaagtggttcaggagcttccattaacttcgcctgtggatgacttcaggcagcctcgttacagcagcggtggtaactttgagacaccttcaaaaagagcacctgcaaagggaagagcaggaaggtcaaagagaacagagcaagatcactatgagacagactacacaactggcggcgagtcctgtgatgagctggaggaggactggatcagggaatatccacctatcacttcagatcaacaaagacaactgtacaagaggaattttgacactggcctacaggaatacaagagcttacaatcagaacttgatgagatcaataaagaactctcccgtttggataaagaattggatgactatagagaagaaagtgaagagtacatggctgctgctgatgaatacaatagactgaagcaagtgaagggatctgcagattacaaaagtaagaagaatcattgcaagcagttaaagagcaaattgtcacacatcaagaagatggttggagactatgatagacagaaaacatag

SEQ ID NO: 82021 - DNA, 1569 bp, Artificial Sequence
  derived and/or modified sequence
atgtctagcagaccattggaaagtccacccccatataggccggacgaatttaagccaaaccactacgcaccgtccaacgatatttatggcggagagatgcacgttcgccctatgctgagtcaacccgcttattcattttatcctgaggatgagattctgcacttttacaagtggaccagtccacccggtgtcatccgcattctatctatgctgataattgttatgtgcatagcaatattcgcgtgtgtcgcaagcaccttggcttgggatcgaggctatggcacctccctcttggggggaagtgtagggtatccttatggaggcagcggattcggctcttatggcagcggttacgggtacgggtatgggtatggatacgggtacggaggatacaccgatccccgagcagccaaggggtttatgctcgcgatggccgcattttgttttatcgctgcactcgtgatcttcgtgacgagcgtcatccggagcgagatgtccaggacaagaaggtattacctgtccgtgatcatcgtgagcgcaattctgggaataatggtatttatcgctactattgtatacatcatgggagtgaaccccaccgcccagagtagtggaagcctgtatggatctcaaatttacgccctctgtaatcagttttatacgccagcagctactgggctatacgtagaccagtatttatatcattactgcgtggtggacccacaggaggccatcgccattgtccttggctttatgattatcgtcgcatttgctttgatcatcttcttcgcagtgaagacccgaagaaagatggaccggtacgacaagagcaacattctgtgggacaaagaacatatatatgacgaacaaccacccaacgtggaagaatgggttaaaaatgtgtctgctggcacacaagacgtgccatccccaccctctgactatgtcgagagagtagacagccctatggcctattcctccaacggaaaggtcaatgataaacggttctatcctgagtcctcttacaagagcacaccggtcccagaagtcgttcaggaattacctctgacaagtcctgtggacgactttcggcaacccaggtactcttctggtgggaatttcgaaacaccttctaagagagcaccagcgaaaggcagggccggtaggtcaaagcggacggagcaggaccactacgaaacagactatactaccggaggtgagagttgcgacgagctggaagaggattggattcgcgagtaccccccaataacctccgatcaacaacgacaactgtataaacgcaactttgataccggtctgcaggagtataaaagtttacagtctgagcttgacgaaatcaacaaagagctttccaggcttgataaagagctggacgattaccgtgaagaatcagaagaatatatggccgcagccgacgagtataatcggctcaaacaggtgaagggaagtgctgactacaagtcaaagaagaaccactgcaaacagcttaagtcgaaactgtcccatatcaagaaaatggtcggtgactatgatcgacagaaaacatag

SEQ ID NO: 82022 - DNA, 1407 bp, Artificial Sequence
  derived and/or modified sequence
atgagctcccgaccgctggaaagtcccccaccctacaggcccgacgagttcaagcccaatcattacgcccctagcaacgatatttacggaggtgagatgcatgttagaccaatgctatcccagccagcctattcattttatcccgaggacgaaatcctgcatttctataaatggactagcccccctggtgtaatccgtattttgagtatgctgattattgtgatgtgtatcgcgatcttcgcgtgtgtggcaagtacacttgcctgggaccgcggatacggaacaagcctcctaggcggttctgtaggttacccatacggcggttctggctttggctcatacggctcaggctatggctatggatatggttatgggtatggctatgggggatacacagatccacgcgcagcaaaaggatttatgctggctatggccgcattctgttttattgctgcactggtcatatttgtaaccagtgttattcggtccgagatgtctcggaccaggcgttactatctgtccgtgatcatcgtctccgccattctgggaataatggtgttcattgccaccatcgtttatatcatgggcgtgaaccctaccgcacagtcctctggcagcctgtatgggagtcagatatacgcgttgtgtaaccagttttacacccccgctgctacagggctctacgtggaccaatatctgtatcactactgcgtcgttgacccacaggaggtgaagaatgttagtgccggaactcaggacgtgccaagccctcctagcgattacgtagagcgggtggactccccaatggcctactcaagcaacggaaaggtaaacgataaaagattttacccggagagcagctacaaaagtacccccgtcccggaggtcgtgcaggagctgcccctgactagccccgtcgatgacttcagacaaccacggtacagcagtggcggaaattttgaaacacccagtaagcgcgctcctgctaaaggcagagctggccgtagcaagagaaccgagcaggaccattatgagaccgactatacgaccggtggagagagttgtgacgaattggaggaagattggatcagggagtatcctccaataacttctgaccagcagcgccagctctacaagcgcaatttcgatacaggcctccaagaatataagagtctgcaatccgaactggatgaaatcaataaggagctgagccggctcgataaagagctggacgactacagggaagaatccgaggaatatatggcggctgccgatgaatataatcggctgaaacaagttaaaggcagtgctgattacaagtccaagaaaaaccactgcaagcagctgaagagtaagctcagccatatcaaaaagatggtgggtgattatgaccgtcaaaagacctag

SEQ ID NO: 82023 - DNA, 1569 bp, Artificial Sequence
  derived and/or modified sequence
atgagttcccgaccactggaatccccaccgccatacagaccggacgaattcaaaccaaaccactacgcccctagcaacgacatatacggcggagagatgcatgttcgacccatgctttctcagccagcatatagtttctatcccgaggacgagatattacacttttataaatggacgtccccacccggagttataagaattttgtctatgctcattatagtcatgtgcatcgcgatttttgcgtgcgttgcgtcaactctcgcttgggatcgcggatacggcacaagtctgctgggcggaagtgtgggatacccctacgggggaagcgggtttggaagttacgggtctggctacggctacggttacggctacggatacggctatggcggatataccgacccacgtgctgcaaaaggcttcatgcttgccatggccgctttttgtttcattgccgctctcgtcatttttgtgacctctgtgattcgatctgagatgagcaggacccgacgttattatctgagcgtcattattgtatctgcaatcttagggataatggtgttcattgctacgattgtttatattatgggggtaaacccaacagctcagtctagtggatccctctatgggagtcagatttatgccctgtgtaaccaattttataccccggcagccacaggactttacgtggaccagtatctctaccactactgtgttgttgatccccaggaggctattgccatcgttctcggctttatgattatcgtggcctttgccctgatcatatttttcgccgtgaagacccggagaaaaatggaccgatacgataaatccaacatcctgtgggataaggagcacatatacgacgaacaacccccaaatgtcgaggaatgggtgaaaaatgtatctgccggaacccaggacgtacctagccctccttccgactacgtagagagagtcgactctcccatggcctacagcagtaacggaaaagtgaacgacaaaagattttatcccgagtcctcctacaaaagcacccccgtgccagaagtagtgcaggaactcccactgacatcgcccgtcgatgattttcggcagccaaggtattcatctggagggaactttgaaactccttccaagagggcccctgccaaagggcgtgccggacggtccaagcgcaccgagcaggatcactacgaaaccgattatacaactggtggcgagagttgtgacgaactcgaagaagactggatccgggagtacccacctatcacctccgatcaacaacgccaattgtataaaaggaacttcgacacaggccttcaagagtataagtcattacagtctgagctggatgagattaacaaagagctttcccggctggacaaggagcttgacgactatagggaggaatccgaagagtacatggccgcagccgacgagtacaatcgtctgaaacaggtgaaagggtccgccgactataagagtaagaagaatcactgcaagcagctgaagtcgaagttgagtcatataaaaaagatggtgggcgactatgatcggcagaagacctag

SEQ ID NO: 82024 - protein, 271 aa, Artificial Sequence
  derived and/or modified sequence
MIIVAFALIIFFAVKTRRKMDRYDKSNILWDKEHIYDEQPPNVEEWVKNVSAGTQDVPSPPSDYVERVDSPMAYSSNGKVNDKRFYPESSYKSTPVPEVVQELPLTSPVDDFRQPRYSSGGNFETPSKRAPAKGRAGRSKRTEQDHYETDYTTGGESCDELEEDWIREYPPITSDQQRQLYKRNFDTGLQEYKSLQSELDEINKELSRLDKELDDYREESEEYMAAADEYNRLKQVKGSADYKSKKNHCKQLKSKLSHIKKMVGDYDRQKT

SEQ ID NO: 82025 - DNA, 816 bp, Artificial Sequence
  derived and/or modified sequence
atgatcatcgtggccttcgccctgatcatcttcttcgccgtgaagaccagaagaaagatggacagatacgacaagagcaacatcctgtgggacaaggagcacatctacgacgagcagccccccaacgtggaggagtgggtgaagaacgtgagcgccggcacccaggacgtgcccagcccccccagcgactacgtggagagagtggacagccccatggcctacagcagcaacggcaaggtgaacgacaagagattctaccccgagagcagctacaagagcacccccgtgcccgaggtggtgcaggagctgcccctgaccagccccgtggacgacttcagacagcccagatacagcagcggcggcaacttcgagacccccagcaagagagcccccgccaagggcagagccggcagaagcaagagaaccgagcaggaccactacgagaccgactacaccaccggcggcgagagctgcgacgagctggaggaggactggatcagagagtacccccccatcaccagcgaccagcagagacagctgtacaagagaaacttcgacaccggcctgcaggagtacaagagcctgcagagcgagctggacgagatcaacaaggagctgagcagactggacaaggagctggacgactacagagaggagagcgaggagtacatggccgccgccgacgagtacaacagactgaagcaggtgaagggcagcgccgactacaagagcaagaagaaccactgcaagcagctgaagagcaagctgagccacatcaagaagatggtgggcgactacgacagacagaagacctag

SEQ ID NO: 82026 - DNA, 603 bp, Artificial Sequence
  derived and/or modified sequence
atggcctacagcagcaacggcaaggtgaacgacaagagattctaccccgagagcagctacaagagcacccccgtgcccgaggtggtgcaggagctgcccctgaccagccccgtggacgacttcagacagcccagatacagcagcggcggcaacttcgagacccccagcaagagagcccccgccaagggcagagccggcagaagcaagagaaccgagcaggaccactacgagaccgactacaccaccggcggcgagagctgcgacgagctggaggaggactggatcagagagtacccccccatcaccagcgaccagcagagacagctgtacaagagaaacttcgacaccggcctgcaggagtacaagagcctgcagagcgagctggacgagatcaacaaggagctgagcagactggacaaggagctggacgactacagagaggagagcgaggagtacatggccgccgccgacgagtacaacagactgaagcaggtgaagggcagcgccgactacaagagcaagaagaaccactgcaagcagctgaagagcaagctgagccacatcaagaagatggtgggcgactacgacagacagaagacctag

SEQ ID NO: 82027 - DNA, 816 bp, Artificial Sequence
  derived and/or modified sequence
atgataattgtggcattcgcattgattatcttctttgccgtgaaaacgaggcgaaaaatggaccgatatgataagtcaaatatcctgtgggacaaggagcatatatacgacgaacagccccccaacgtggaggagtgggtgaagaatgtctctgccggaacacaggacgtcccgtcaccaccctcagactatgttgagcgagttgacagtcccatggcctactcttctaacggcaaagtaaacgacaagaggttctatcctgaaagcagttataagtctacacccgtccccgaggtggtgcaggagttgccactgaccagccctgtcgacgactttcgccagccgaggtactcctccggggggaatttcgagactcctagcaagagggctcccgctaaagggagggctgggcgctccaagagaacagagcaggatcactatgagacagactatacgacgggcggtgaatcatgtgacgagttagaggaggactggattcgcgagtacccacccattacgagcgaccagcaaagacagttgtacaagcgtaattttgatacaggcctccaagagtataagtccctgcagagtgagctggacgaaatcaacaaggagctctcgcggcttgataaggagcttgacgattaccgtgaggaaagcgaggagtacatggcagctgctgatgagtataataggctgaagcaagtaaagggctccgccgactataagtcaaaaaagaaccactgcaagcagctgaaatctaaattgagccacattaagaagatggtcggagattatgatagacagaaaacatag

SEQ ID NO: 82028 - DNA, 603 bp, Artificial Sequence
  derived and/or modified sequence
atggcctacagttcaaacgggaaagtgaatgacaaaaggttttaccctgaatccagctacaaatctacccccgtgccagaagtggtccaggaactcccactgacgtctcctgtagatgactttcgccaacctaggtactcgtctggcggaaatttcgagacgccatccaaacgtgctcccgctaaaggaagggctggccggtctaagcggactgagcaggaccattacgagactgactacaccacgggtggtgaatcctgcgacgagctcgaagaagattggatccgggagtatcctcccatcacctccgaccagcaaagacagttgtacaagcgaaatttcgacaccggtctgcaggaatacaaaagtctgcagagtgaactggacgagatcaacaaggagctcagtagattggataaggaactggatgattatcgtgaggaatcagaggaatacatggccgctgccgacgagtacaacaggctgaagcaggtgaagggcagtgcagattacaaatccaagaagaatcattgcaaacagctgaagtctaagctgagccacatcaagaagatggtgggagactacgaccggcaaaaaacatag

SEQ ID NO: 82029 - DNA, 816 bp, Artificial Sequence
  derived and/or modified sequence
atgatcatcgtggcctttgccctgatcatcttctttgctgtgaagaccaggaggaagatggacagatatgacaagagcaacatcctgtgggacaaggagcacatctatgatgagcagccccccaacgtggaggagtgggtgaagaatgtgtctgctggcacccaggatgtgcccagcccccccagcgactatgtggagcgggtggacagccccatggcctacagcagcaatggcaaggtgaatgacaagcgcttctacccagagagcagctacaagagcacccctgtgcctgaggtggtgcaggagctgcccctgaccagccctgtggatgacttccggcagccccgctacagcagcggcggcaactttgagacccccagcaagagggccccagccaagggccgggccggccgcagcaagaggacagagcaggaccactatgaaacagactacaccactggaggagagagctgtgatgagctggaggaggactggatccgggagtacccacccatcaccagtgaccagcagaggcagctgtacaagaggaactttgacaccggcctgcaggagtacaagagcctgcagagcgagctggatgagatcaacaaggagctgagccggctggacaaggagctggatgactaccgggaggagagcgaggagtacatggctgctgctgatgagtacaaccggctgaagcaggtgaagggcagcgctgactacaagagcaagaagaaccactgcaagcagctgaagagcaagctgagccacatcaagaagatggtgggggactatgaccggcagaagacctag

SEQ ID NO: 82030 - DNA, 603 bp, Artificial Sequence
  derived and/or modified sequence
atggcctacagcagcaatggcaaggtgaatgacaagcgcttctacccagagagcagctacaagagcacccctgtgcctgaggtggtgcaggagctgcccctgaccagccctgtggatgacttccggcagccccgctacagcagcggcggcaactttgagacccccagcaagagggccccagccaagggccgggccggccgcagcaagaggacagagcaggaccactatgaaacagactacaccaccggcggggagagctgtgatgagctggaggaggactggatccgggagtacccacccatcaccagtgaccagcagaggcagctgtacaagaggaactttgacaccggcctgcaggagtacaagagcctgcagagcgagctggatgagatcaacaaggagctgagccggctggacaaggagctggatgactaccgggaggagagcgaggagtacatggctgctgctgatgagtacaaccggctgaagcaggtgaagggcagcgctgactacaagagcaagaagaaccactgcaagcagctgaagagcaagctgagccacatcaagaagatggtgggggactatgaccggcagaagacctag

SEQ ID NO: 82031 - DNA, 816 bp, Artificial Sequence
  derived and/or modified sequence
atgatcatcgtggccttcgccctgatcatcttcttcgccgtgaagacccgaagaaagatggaccgctacgacaaatctaacattctatgggacaaggaacatatctacgatgaacaaccacctaacgtcgaggagtgggtgaagaatgtgagtgccggcacgcaggacgttccgagcccccccagcgattacgtggagagagtcgactctcctatggcgtacagctcgaatgggaaagttaatgataagcgtttttaccccgagagcagttacaagagtactcctgtgcccgaagtggtgcaagagctgcccctcacatcgccggtcgatgactttcgacagccccgttattccagcggaggaaactttgagaccccctccaagagagctccagctaagggcagagccggaagatctaagagaaccgagcaggaccactacgagacagactacacaacaggaggcgaatcatgtgacgagttagaggaggattggatcagagagtacccccccattacgtcagaccagcagagacaactgtacaagcgaaatttcgatactggacttcaagagtataagtccctgcagagtgaactggatgagatcaacaaagagctaagtaggctcgacaaagagctcgatgactatagggaggagtcagaggagtacatggcagccgctgatgagtacaacagactgaaacaggtgaaggggtctgccgattacaaaagcaagaagaaccactgtaagcagctgaagtctaagctgtctcacattaaaaagatggtcggggattacgatagacagaagacttag

SEQ ID NO: 82032 - DNA, 603 bp, Artificial Sequence
  derived and/or modified sequence
atggcctacagcagcaacggcaaggtgaacgacaagcggttctaccctgagtccagttataaatctacccccgtgccagaagtcgttcaggagcttccactgacaagtcccgttgatgacttcagacagccgcggtacagctcaggtggcaactttgagaccccatccaagcgagcccctgccaaaggacgggccggaagaagcaaacgcactgaacaggatcactacgagaccgactacacaaccggaggcgaatcttgcgacgagctggaggaagattggatccgggagtaccccccgatcacatccgatcaacagcgccagctctacaagaggaattttgataccggtctgcaggaatacaagagtttacaatctgaactggacgaaatcaataaagagctctctcgtttggacaaggaacttgacgattaccgcgaggaatctgaagaatatatggctgctgctgatgaatacaacaggcttaagcaggtgaagggtagcgcagactataagagtaaaaagaatcactgcaaacaactgaagtcgaaactgagccacattaaaaaaatggttggcgattacgaccgccaaaagacctag

SEQ ID NO: 82033 - DNA, 975 bp, Artificial Sequence
  derived and/or modified sequence
ggcattgctcatcctgaagatcagctgaccattgacaatcagccatgtcatccaggcctcttgaaagtccacctccttacaggcctgatgaattgccattgccattgtactggggttcatgattattgtggcttttgctttaataattttctttgctgtgaaaactcgaagaaagatggacaggtatgacaagtccaatattttgtgggacaaggaacacatttatgatgagcagccccccaatgtcgaggagtgggttaaaaatgtgtctgcaggcacacaggacgtgccttcacccccatctgactatgtggaaagagttgacagtcccatggcatactcttccaatggcaaagtgaatgacaagcggttttatccagagtcttcctataaatccacgccggttcctgaagtggttcaggagcttccattaacttcgcctgtggatgacttcaggcagcctcgttacagcagcggtggtaactttgagacaccttcaaaaagagcacctgcaaagggaagagcaggaaggtcaaagagaacagagcaagatcactatgagacagactacacaactggcggcgagtcctgtgatgagctggaggaggactggatcagggaatatccacctatcacttcagatcaacaaagacaactgtacaagaggaattttgacactggcctacaggaatacaagagcttacaatcagaacttgatgagatcaataaagaactctcccgtttggataaagaattggatgactatagagaagaaagtgaagagtacatggctgctgctgatgaatacaatagactgaagcaagtgaagggatctgcagattacaaaagtaagaagaatcattgcaagcagttaaagagcaaattgtcacacatcaagaagatggttggagactatgatagacagaaaacatagaaggctgatgccaagttgtttgagaaattaagtatctgaca

SEQ ID NO: 82034 - DNA, 813 bp, Artificial Sequence
  derived and/or modified sequence
ggcattgctcatcctgaagatcagctgaccattgacaatcagccatgtcatccaggcctcttgaaagtccacctccttacaggcctgatgaattgttaaaaatgtgtctgcaggcacacaggacgtgccttcacccccatctgactatgtggaaagagttgacagtcccatggcatactcttccaatggcaaagtgaatgacaagcggttttatccagagtcttcctataaatccacgccggttcctgaagtggttcaggagcttccattaacttcgcctgtggatgacttcaggcagcctcgttacagcagcggtggtaactttgagacaccttcaaaaagagcacctgcaaagggaagagcaggaaggtcaaagagaacagagcaagatcactatgagacagactacacaactggcggcgagtcctgtgatgagctggaggaggactggatcagggaatatccacctatcacttcagatcaacaaagacaactgtacaagaggaattttgacactggcctacaggaatacaagagcttacaatcagaacttgatgagatcaataaagaactctcccgtttggataaagaattggatgactatagagaagaaagtgaagagtacatggctgctgctgatgaatacaatagactgaagcaagtgaagggatctgcagattacaaaagtaagaagaatcattgcaagcagttaaagagcaaattgtcacacatcaagaagatggttggagactatgatagacagaaaacatagaaggctgatgccaagttgtttgagaaattaagtatctgaca

SEQ ID NO: 82035 - DNA, 816 bp, Artificial Sequence
  derived and/or modified sequence
atgattatagtggccttcgctctaatcattttctttgctgtcaagacacggcgaaagatggaccgttacgataagtccaatatcctatgggacaaggaacacatatatgacgaacagcccccaaacgtggaggagtgggtgaagaacgtgtcagccggaactcaagatgtgccttcaccgccatctgattacgtggagcgtgtggactcaccaatggcctacagcagcaacggaaaggtgaacgataagcggttttaccccgagtcgtcctacaagagcacacctgtgccagaagtggtgcaggaactgcctctgacatctcctgtcgatgactttcgccagcctaggtatagttcaggcggaaattttgagactccaagtaagcgtgctcccgctaaaggcagggccggtcgaagtaaacggacagagcaggatcattacgagaccgactacacaactggcggagaatcttgcgatgagttggaggaagactggattcgcgagtatccaccaataacgtctgatcagcaaagacagttgtataagaggaattttgataccggattgcaagaatacaagtcactacaaagtgaactggacgagattaacaaggaactaagcaggctggataaggagttggacgactaccgggaggaatccgaggaatacatggccgctgctgacgagtacaaccggcttaagcaggttaaggggtccgccgactacaagtcaaagaagaaccattgtaaacagttaaagtcgaaactctcacacatcaagaaaatggtgggggattacgaccggcagaagacttag

SEQ ID NO: 82036 - DNA, 603 bp, Artificial Sequence
  derived and/or modified sequence
atggcatatagtagtaatggaaaagttaacgataaaaggttttaccccgaatcctcctataagtcgacccccgtacccgaagtggtgcaagaactgcctctgacgtcccccgtggacgattttaggcaaccacggtacagttcaggtggcaactttgaaactcccagtaagagagcaccggctaagggccgtgctggcaggtccaaaaggacagagcaagaccattacgaaactgattacacaaccggaggtgagagttgcgatgaactcgaagaagactggattagggagtatccccctatcacctcagaccaacagcgccagctatacaaacggaacttcgacacagggctccaggagtataagtcactccagtcagaactggacgaaataaacaaagaactgtcccgcctggacaaggaactggatgactatcgagaagagtcagaagagtacatggcggcagcagatgaatacaaccgccttaaacaggtgaaaggctccgccgattacaaaagtaagaaaaatcactgtaagcagctgaagagtaaactgtcccacatcaagaaaatggtaggagactacgaccggcagaagacatag

SEQ ID NO: 82037 - protein, 124 aa, Artificial Sequence
  derived and/or modified sequence
MRASPCISQPAASWHPRPSALRPTAGSGPDTRTPGTVEDGSAPCPAFRSPAVSPCGEEPCCFQISPAEETLELGRLVSPGNCDTLSPRAAGFYACHVRSLIPCRSTKGRWPLTASAAGLSSFSG

SEQ ID NO: 82038 - protein, 102 aa, Artificial Sequence
  derived and/or modified sequence
MRASPCISQPAASWHPRPSALRPTAGSGPDTRTPGTVEDGSAPCPAFRSPAVSPCGEEPCCFQISPAEETLELGRLVSPGCHKSSAPQERRLDPRARCVVHI

SEQ ID NO: 82039 - DNA, 375 bp, Artificial Sequence
  derived and/or modified sequence
atgagagccagcccctgcatcagccagcccgccgccagctggcaccccagacccagcgccctgagacccaccgccggcagcggccccgacaccagaacccccggcaccgtggaggacggcagcgccccctgccccgccttcagaagccccgccgtgagcccctgcggcgaggagccctgctgcttccagatcagccccgccgaggagaccctggagctgggcagactggtgagccccggcaactgcgacaccctgagccccagagccgccggcttctacgcctgccacgtgagaagcctgatcccctgcagaagcaccaagggcagatggcccctgaccgccagcgccgccggcctgagcagcttcagcggctag

SEQ ID NO: 82040 - DNA, 309 bp, Artificial Sequence
  derived and/or modified sequence
atgagagccagcccctgcatcagccagcccgccgccagctggcaccccagacccagcgccctgagacccaccgccggcagcggccccgacaccagaacccccggcaccgtggaggacggcagcgccccctgccccgccttcagaagccccgccgtgagcccctgcggcgaggagccctgctgcttccagatcagccccgccgaggagaccctggagctgggcagactggtgagccccggctgccacaagagcagcgccccccaggagagaagactggaccccagagccagatgcgtggtgcacatctag

SEQ ID NO: 82041 - DNA, 1407 bp, Artificial Sequence
  derived and/or modified sequence
atgcgcgcctcaccctgcatctcccagcccgcagccagctggcatcctagaccctctgccctgcgaccaacagccgggagcggaccagacaccagaactcccggaacggttgaagacggttccgctccctgtcccgcctttcgcagcccagcagtttcgccctgcggagaggagccttgctgtttccaaatctctcctgctgaagagacattggagctagggcggctagtttcacctggtaattgtgacaccctgtctcctcgagctgcaggcttttatgcttgtcatgttcgaagtttgataccttgcagatcaacaaagggccggtggcctctcactgcctccgcggcagggttgtcaagtttttcaggttaagtactgcacgactactcgcttctgaaactgatagacactgcctcagctccgtgcagggcagacgcacaagagcagaatctccgtgggacatctctctggagcatcaatattactgcagtatttggaagaaacaaatttaaataagttctaaggtgaagaatggaacatttaagacaagtctggaaagtcatctgcctttaataactgtcgtttgtccttaacgtcagactttctccaagaccaaaactctaagaacttatttccattcttacaaatagtaaaaatgataaatcatatcaagtcaattgaaagtcctgcctgctgctttcctaaattgcaatatggccttggtatggttttatttgtacttttgtgggggattcgtggatctttagattaaaaaaaaaaaaataggtttttgaacaatttttgcaagtttgcagctgttagttattgatttatttttccaacccatctaattcttctgtctctctcctctcctcaggctcaataattccatgggtctctaaggctgtgtttattttctttaaattttgttgatttacttttatactccatttgattttttctatctctcaccttttctcagactcagtcatcccacaggtctgtaaggctctgttcattttctttaaacttcttttttttttcctctcctcagattggataaattatattgctatgtctctgtttctgaactatagaaaagctcaaaattattatttttatttctcattttttatatggctattttttctctgctgatgtttcacatctattcatttatgagaatattttcctttgccctcatgagcgtgtttataatagctgccttcaaattcttgtctgccgtttacatcttggacatcttggagatggctactgcctgctttttatcttgtgtatttattacattttcacgtgtcttcacgcatcccttgaattggaaattgtgccctggagactgtatacaagactggattaaaaagactggattctgttttgtccctg

SEQ ID NO: 82042 - DNA, 375 bp, Artificial Sequence
  derived and/or modified sequence
atgagggccagtccatgtatctcccagccggctgcctcgtggcacccgcgacccagcgctttgaggcccacggctggttccggacccgatactcggacacctggcacagtcgaggatggtagcgcaccttgcccggcctttcggtctcctgctgtgagcccatgtggcgaagagccatgttgctttcagataagccccgcagaagaaaccctggagctgggcaggttggtgtcccccggtaattgcgacactctctcacccagagccgcaggattttatgcttgtcacgtgaggtccctcatcccctgtcgctcaaccaaagggcgctggccgttgaccgcttcagctgctggtcttagcagttttagcggatag

SEQ ID NO: 82043 - DNA, 1116 bp, Artificial Sequence
  derived and/or modified sequence
gagagactacaactcccagtatgcaccgcgatgcgcgcctcaccctgcatctcccagcccgcagccagctggcatcctagaccctctgccctgcgaccaacagccgggagcggaccagacaccagaactcccggaacggttgaagacggttccgctccctgtcccgcctttcgcagcccagcagtttcgccctgcggagaggagccttgctgtttccaaatctctcctgctgaagagacattggagctagggcggctagtttcacctggctgtcacaaatcctctgcaccccaggagcgccgcttggacccccgggctcgctgcgtggtccatatctaggtcgggcctctcacggagactttcccaccagtgtaataaagaggagaaaacgtcacagcggaagggcctgaccctgctgcatccactaaggaaacagctacggggatgggaccctgggagctgctgtggagcctcatccaccgcttctctgaccccacccaggctgcttcccaggcctcagggtcttagtgtggacctccgggccgtgattaatgcaggtcagcaggaccagagcgccccttggtccctcccaacacatgagggtagtttgtgtggtgaggtcagggatagtgtctgcgcttctaccctgaatagggctcccttggaaaatactttaatatctctttttaaatacccccttggaccacttttaatagttttctgatagaactaaacagtgatcattctcttaattcatgtttccattaagtttttcaggttaagtactgcacgactactcgcttctgaaactgatagacactgcctcagctccgtgcagggcagacgcacaagagcagaatctccgtgggacatctctctggagcatcaatattactgcagtatttggaagaaacaaatttaaataagttctaaggtgaagaatggaacatttaagacaagtctggaaagtcatctgcctttaataactgtcgtttgtccttaacgtcagactttctccaagaccaaaactctaagaacttatttccattcttacaaatagtaaaaatgataaatcatatcaagtcaattgaaagtcctgcctgctgctttcctaaa

SEQ ID NO: 82044 - DNA, 309 bp, Artificial Sequence
  derived and/or modified sequence
atgcgagcgtcaccctgcatctcacagcccgccgctagttggcaccctcggccgtccgccctgcgaccaacagccggatccgggcctgatactcgtactcctggaacggtcgaagacgggtccgctccttgccctgctttcagaagtcccgcagttagcccgtgtggggaggagccgtgttgttttcagatctctccagctgaggaaactttggaactggggcgactggtaagtcccggctgccataagtctagcgcccctcaggaaaggagactggaccctagagccagatgcgtggtacacatatag

SEQ ID NO: 82045 - DNA, 375 bp, Artificial Sequence
  derived and/or modified sequence
atgagggcatctccatgcatttctcaacctgccgcttcttggcacccacggcccagcgcactgaggcccaccgcaggctctggccccgacacaagaacccccggaaccgtggaagacggaagcgccccatgccctgccttccggtctcctgccgtgtcaccatgtggcgaagagccttgctgtttccaaattagtccagcggaggaaactctggagctgggaaggctcgttagccctggaaattgtgacactctttccccccgcgctgctggcttctatgcttgccacgtccggtctctcattccatgtaggtctactaaagggcgatggccactgaccgcttctgccgcgggattaagctctttctccggctag

SEQ ID NO: 82046 - DNA, 375 bp, Artificial Sequence
  derived and/or modified sequence
atgcgggccagcccatgcatctcacagcccgccgcctcctggcaccctcggccaagcgccctcaggcctacagcaggttcaggtccagacacacgtacgcccgggactgtggaagatggctctgcaccctgtccagcatttcgtagccccgctgtgtctccgtgcggggaggagccttgttgcttccaaatttcaccagccgaggaaaccctggaactcggacggctggtgtctcccggaaattgcgataccctgtctcctcgggcagccggtttttacgcctgccacgtgagatctctcataccctgcaggtccaccaagggtcgctggcccctgacggctagcgcagccggactttcctctttcagcggctag

SEQ ID NO: 82047 - DNA, 375 bp, Artificial Sequence
  derived and/or modified sequence
atgagagcgtctccatgcatcagccaacccgccgcttcatggcacccaagaccaagcgcactccggccaaccgccggctccggtccagatacaaggacaccaggcacagtcgaggatgggtctgctccctgcccagcatttcggagcccagcagtcagtccatgcggcgaggaaccgtgttgtttccagattagccccgctgaggaaacattagagctgggtaggctggtaagccccgggaattgtgatacgctctccccccgtgcggcaggcttttatgcctgccacgtgagaagcctgattccctgccgcagtactaaagggagatggcccctgacagccagcgctgctggcctgagttcgttctctggctag

SEQ ID NO: 82048 - DNA, 309 bp, Artificial Sequence
  derived and/or modified sequence
atgcgcgcatctccatgcattagtcagcccgctgcatcttggcacccccgcccatcagccctgcgccccacggctggctctgggcccgatactcggacacccggtacagtcgaggatggcagcgcgccttgcccggccttcagatctcccgccgtctccccatgcggcgaagagccttgttgctttcagattagcccagccgaggaaactctggaactgggtagattagtctctcctgggtgccacaagtcaagtgccccgcaggagcggaggctggacccgcgggcccgttgtgttgtgcatatctag

SEQ ID NO: 82049 - DNA, 375 bp, Artificial Sequence
  derived and/or modified sequence
atgagggccagcccctgcatcagccagcctgctgcctcctggcacccccggcccagcgccctgcggcccacagctggcagcggccctgacaccaggaccccaggcaccgtggaggatggcagcgccccctgcccagccttccgcagccctgctgtgagcccctgtggggaggagccctgctgcttccagatcagccctgctgaggagaccctggagctgggccgcctggtgtccccaggcaactgtgacaccctgagccccagggctgctggcttctacgcctgccacgtgcgcagcctcatcccctgccgcagcaccaagggccgctggcccctgacagccagcgctgctggcctgagcagcttctctggatag

SEQ ID NO: 82050 - DNA, 309 bp, Artificial Sequence
  derived and/or modified sequence
atgagggccagcccctgcatcagccagcctgctgcctcctggcacccccggcccagcgccctgcggcccacagctggcagcggccctgacaccaggaccccaggcaccgtggaggatggcagcgccccctgcccagccttccgcagccctgctgtgagcccctgtggggaggagccctgctgcttccagatcagccctgctgaggagaccctggagctgggccgcctggtgtccccaggctgccacaagagcagcgccccccaggagcggcggctggacccccgggcccgctgtgtggtgcacatctag

SEQ ID NO: 82051 - DNA, 375 bp, Artificial Sequence
  derived and/or modified sequence
atgcgggccagcccctgcatcagccagcccgccgccagctggcaccctagaccaagcgccctccgacctaccgctggatccggccctgatacccgcacaccggggacagtggaagacggctccgccccatgcccagcgttcagaagtcctgcagtcagtccatgcggtgaagagccctgttgctttcagatcagccccgctgaggagacacttgaattggggaggttagtcagccctggcaactgcgatactctcagcccccgggcagctgggttctatgcatgtcacgtaaggtcgctgatcccctgccggtccacaaagggtcgatggccgctgacggcgtccgccgccggcctgagttcctttagcggctag

SEQ ID NO: 82052 - DNA, 309 bp, Artificial Sequence
  derived and/or modified sequence
atgcgggccagcccctgcatcagccagcccgccgccagctggcacccccggccctccgccctccggccaactgctggatcgggtccggatacaagaactcccggcacggtggaagatggctcagccccatgcccggcattcagatctcctgccgtgagcccctgtggagaagagccttgttgcttccagatctcaccggctgaagaaactctggaattaggacgtcttgtgtcacccggatgccacaaatccagtgcccctcaggaacggcggctggatccaagggccaggtgcgttgtccatatctag

SEQ ID NO: 82053 - DNA, 375 bp, Artificial Sequence
  derived and/or modified sequence
atgcgggccagcccctgcatcagccagcccgccgccagctggcacccaagaccaagtgctctgcggcccacagccggaagcggaccggacaccaggaccccgggcactgtggaggacgggtccgctccctgccctgctttcaggagcccggcagtgagtccctgcggggaggagccttgctgtttccagatatctcctgcggaggagacacttgagctcgggagactggtctccccagggaattgcgacaccctgtcaccacgcgcagccggcttttatgcgtgtcatgtcagatccctgataccatgtaggtccactaaaggcagatggccccttacagcctcggccgccggactgagcagtttctcagggtag

SEQ ID NO: 82054 - DNA, 375 bp, Artificial Sequence
  derived and/or modified sequence
atgcgggccagcccctgcatcagccagcccgccgccagctggcacccacgtcctagcgcccttcggccaacagcaggatctggacccgacacgcgaactcctggcacggtagaagacggctcagccccgtgtcccgccttccgctcaccagccgtctcaccgtgcggggaggagccttgctgctttcagatctccccagcagaggagaccctggagctcggccgcctggtatcccccggaaactgtgatacactgtccccccgagcagctgggttttatgcctgtcacgtaaggagcttaattccatgtagaagcacaaagggacgttggcctttgaccgccagtgctgctggactgagctccttttctggatag

SEQ ID NO: 82055 - DNA, 2866 bp, Artificial Sequence
  derived and/or modified sequence
tccattccaaataaaatctataacaaattaggtatagaaagaatatacctcaaaataaagagatatgttctttataagctataggacaatcccatggttaacattattgtcaatggtgaaattttggaattgtttttaagatttattataagaaaaagatgcccactctcactacttctttcaacaccgtattggaaatcctgctcagaatctaagacaagagaaaaaagagcatttaaataagaaacaacaagttcttctattcatggagattaacgctcaggtttttgcagattagatttaacagcatgaaatctgtaccatccaggaatcaaaggatataggactttagggcatcaattattaagaggctataggaaagcagaaatgctcctggatgtttccattgtccacacacaaaatttcaacagaccagccccaggaagtaaaggcacattcctgactactgttagttgatgagcttttcaccaaaagcagagatgtgagacctggcaggtttcaaagacccctcaagtgctccataccttgaaattcacttccacaaagctagaacaccatctgttcctgagggatcaggttatcgtctgtttcttttaggcactggccagtcaggctttagtggacacgaagccacagatttttagtgtaaaatgcctaatctatcataatctttaggtagatatttggaggcctgcacacttaaatgggttggtgaaatgtcataccagacacatggctgggaattgggtttttctcctccgctcttagcagcacctttgtaacccagtgattacccccctcatggctccacggccacatccgcaaaaagggtactggtgaacgtgacattttcacgaagccacagcccatggtcactccctgcaaagctctgaacttgcgcattcccaggccaggccgtggttgtctttccaaggcggctcagcttgtgctttgcttggagagagcggagggcagcagcacagtgacagcgtctgggacctcagaccagtttccacagccacttatgaaagcagacggctccatgggctggaggaggtgggacgctctggaaagaactcgggtgcgagtgggaaagaaaatcgagctgagcagctggaagtcgaagtcgcgtgagtgaggaccagacactctcgatttaggcaaaggcggggtgcacttcccaacaacacatcctcctcactggcgagaccaggcctgcccttcaagttcctctcctgatttaatccccttggcgagggtttggcatgaaatcaatggccagcaagcttggtaaacgaagccgcctacaccgccctccccctccctgcacggccgcgccccgcctccgctcctgtctcaatctgggattgtcctcctgtagccccaccatccaccgtggggaacggtggagagactacaactcccagtatgcaccgcgatgcgcgcctcaccctgcatctcccagcccgcagccagctggcatcctagaccctctgccctgcgaccaacagccgggagcggaccagacaccagaactcccggaacggttgaagacggttccgctccctgtcccgcctttcgcagcccagcagtttcgccctgcggagaggagccttgctgtttccaaatctctcctgctgaagagacattggagctagggcggctagtttcacctggtaattgtgacaccctgtctcctcgagctgcaggcttttatgcttgtcatgttcgaagtttgataccttgcagatcaacaaagggccggtggcctctcactgcctccgcggcagggttgtcaagtttttcaggttaagtactgcacgactactcgcttctgaaactgatagacactgcctcagctccgtgcagggcagacgcacaagagcagaatctccgtgggacatctctctggagcatcaatattactgcagtatttggaagaaacaaatttaaataagttctaaggtgaagaatggaacatttaagacaagtctggaaagtcatctgcctttaataactgtcgtttgtccttaacgtcagactttctccaagaccaaaactctaagaacttatttccattcttacaaatagtaaaaatgataaatcatatcaagtcaattgaaagtcctgcctgctgctttcctaaattgcaatatggccttggtatggttttatttgtacttttgtgggggattcgtggatctttagattaaaaaaaaaaaaataggtttttgaacaatttttgcaagtttgcagctgttagttattgatttatttttccaacccatctaattcttctgtctctctcctctcctcaggctcaataattccatgggtctctaaggctgtgtttattttctttaaattttgttgatttacttttatactccatttgattttttctatctctcaccttttctcagactcagtcatcccacaggtctgtaaggctctgttcattttctttaaacttcttttttttttcctctcctcagattggataaattatattgctatgtctctgtttctgaactatagaaaagctcaaaattattatttttatttctcattttttatatggctattttttctctgctgatgtttcacatctattcatttatgagaatattttcctttgccctcatgagcgtgtttataatagctgccttcaaattcttgtctgccgtttacatcttggacatcttggagatggctactgcctgctttttatcttgtgtatttattacattttcacgtgtcttcacgcatcccttgaattggaaattgtgccctggagactgtatacaagactggattaaaaagactggattctgttttgtccctg

SEQ ID NO: 82056 - DNA, 2867 bp, Artificial Sequence
  derived and/or modified sequence
tccattccaaataaaatctataacaaattaggtatagaaagaatatacctcaaaataaagagatatgttctttataagctataggacaatcccatggttaacattattgtcaatggtgaaattttggaattgtttttaagatttattataagaaaaagatgcccactctcactacttctttcaacaccgtattggaaatcctgctcagaatctaagacaagagaaaaaagagcatttaaataagaaacaacaagttcttctattcatggagattaacgctcaggtttttgcagattagatttaacagcatgaaatctggtaccatccaggaatcaaaggatataggactttagggcatcaattattaagaggctataggaaagcagaaatgctcctggatgtttccattgtccacacacaaaatttcaacagaccagccccaggaagtaaaggcacattcctgactactgttagttgatgagcttttcaccaaaagcagagatgtgagacctggcaggtttcaaagacccctcaagtgctccataccttgaaattcacttccacaaagctagaacaccatctgttcctgagggatcaggttatcgtctgtttcttttaggcactggtcagtcaggctttagtggacacgaagccacagatttttagtgtaaaatgcctaatctatcataatctttaggtagatatttggaggcctgcacacttaaatgggttggtgaaatgtcataccagacacatggctgggaattgggtttttctcctccgctcttagcagcacctttgtaacccagtgattacccccctcatggctccacggccacatccgcaaaaagggtactggtgaacgtgacattttcacgaagccacagcccatggtcactccctgcaaagctctgaacttgcgcattcccaggccaggccgtggttgtctttccaaggcggctcagcttgtgctttgcttggagagagcggagggcagcagcacagtgacagcgtctgggacctcagaccagtttccacagccacttatgaaagcagacggctccatgggctggaggaggtgggacgctctggaaagaactcgggtgcgagtgggaaagaaaatcgagctgagcagctggaagtcgaagtcgcgtgagtgaggaccagacactctcgatttaggcaaaggcggggtgcacttcccaacaacacatcctcctcactggcgagaccaggcctgcccttcaagttcctctcctgatttaatccccttggcgagggtttggcatgaaatcaatggccagcaagcttggtaaacgaagccgcctacaccgccctccccctccctgcacggccgcgccccgcctccgctcctgtctcaatctgggattgtcctcctgtagccccaccatccaccgtggggaacggtggagagactacaactcccagtatgcaccgcgatgcgcgcctcaccctgcatctcccagcccgcagccagctggcatcctagaccctctgccctgcgaccaacagccgggagcggaccagacaccagaactcccggaacggttgaagacggttccgctccctgtcccgcctttcgcagcccagcagtttcgccctgcggagaggagccttgctgtttccaaatctctcctgctgaagagacattggagctagggcggctagtttcacctggtaattgtgacaccctgtctcctcgagctgcaggcttttatgcttgtcatgttcgaagtttgataccttgcagatcaacaaagggccggtggcctctcactgcctccgcggcagggttgtcaagtttttcaggttaagtactgcacgactactcgcttctgaaactgatagacactgcctcagctccgtgcagggcagacgcacaagagcagaatctccgtgggacatctctctggagcatcaatattactgcagtatttggaagaaacaaatttaaataagttctaaggtgaagaatggaacatttaagacaagtctggaaagtcatctgcctttaataactgtcgtttgtccttaacgtcagactttctccaagaccaaaactctaagaacttatttccattcttacaaatagtaaaaatgataaatcatatcaagtcaattgaaagtcctgcctgctgctttcctaaattgcaatatggccttggtatggttttatttgtacttttgtgggggattcgtggatctttagattaaaaaaaaaaaaataggtttttgaacaatttttgcaagtttgcagctgttagttattgatttatttttccaacccatctaattcttctgtctctctcctctcctcaggctcaataattccatgggtctctaaggctgtgtttattttctttaaattttgttgatttacttttatactccatttgattttttctatctctcaccttttctcagactcagtcatcccacaggtctgtaaggctctgttcattttctttaaacttcttttttttttcctctcctcagattggataaattatattgctatgtctctgtttctgaactatagaaaagctcaaaattattatttttatttctcattttttatatggctattttttctctgctgatgtttcacatctattcatttatgagaatattttcctttgccctcatgagcgtgtttataatagctgccttcaaattcttgtctgccgtttacatcttggacatcttggagatggctactgcctgctttttatcttgtgtatttattacattttcacgtgtcttcacgcatcccttgaattggaaattgtgccctggagactgtatacaagactggattaaaaagactggattctgttttgtccctg

SEQ ID NO: 82057 - DNA, 375 bp, Artificial Sequence
  derived and/or modified sequence
atgcgggccagcccctgcatcagccagcccgccgccagctggcaccctagacccagcgctttgcggccaacggccggatccggcccagacacccgcacccctggaaccgtcgaggacggcagcgcgccctgcccggccttccgcagcccagctgtatctccatgtggggaagaaccatgctgtttccaaattagtcccgcagaggagactctcgagctgggccgtctggttagccccggcaactgcgatactctaagtcctagggcagccgggttctacgcctgtcacgtgcgctcattgatcccatgtagatccaccaaagggagatggcctcttaccgccagtgcggcgggcttatcatcttttagcggatag

SEQ ID NO: 82058 - DNA, 309 bp, Artificial Sequence
  derived and/or modified sequence
atgcgggccagcccctgcatcagccagcccgccgccagctggcacccacggccatctgctttgcggcccactgctgggagcggtccagataccagaacccctggtaccgtcgaggacgggtcagccccctgtcctgcattccgatctcctgctgtgtcaccctgcggagaggaaccgtgctgctttcagatttcacccgctgaggaaactctcgagctgggcagactggtgtcacccggttgtcataagtcctcagctccccaggagagaaggttggatccgcgagccaggtgtgtggttcacatctag

SEQ ID NO: 82059 - DNA, 375 bp, Artificial Sequence
  derived and/or modified sequence
atgagagccagtccttgtatatcccagccagccgctagctggcatccacgcccaagcgcactccgaccaaccgccggaagcgggcctgataccaggacccctgggaccgtggaggatggatcagctccctgtcccgctttccgatccccagctgtctccccatgcggggaagagccctgctgttttcaaatctcaccagccgaagagaccctcgagttggggcgactggtctccccaggaaactgtgataccctgtctcctcgcgctgcgggattctatgcctgccacgtgaggagtttaatcccctgccgctcaactaaagggcgatggcccttgaccgcttctgcggctggtttgtcatcatttagcgggtag

SEQ ID NO: 82060 - DNA, 309 bp, Artificial Sequence
  derived and/or modified sequence
atgcgggctagcccgtgcatctcccaacctgcggcatcttggcaccccagaccatccgctctgcgtccgaccgccggaagtgggcctgatacccgaactcccggaacagtcgaagacggttccgcaccgtgcccggcttttaggagtccagccgtcagcccctgtggagaggagccatgctgttttcaaatctcccccgctgaagagaccctggagcttggcagattggtctcccccggatgccacaagtccagtgcacctcaagaacgcagattagacccacgagctcgctgtgtggttcacatttag

SEQ ID NO: 82061 - DNA, 375 bp, Artificial Sequence
  derived and/or modified sequence
atgagggcgagtccgtgtatcagtcagcctgcggcatcatggcaccctcgaccctcagccctcaggcctaccgctggcagtgggcctgacacgcgaaccccaggcactgtcgaggatggttctgccccttgcccggcatttcgttcccctgccgtctccccctgtggcgaagagccttgttgctttcaaataagccccgctgaggaaactctcgagcttgggagactcgtatcaccgggaaattgtgatactctgtcgccgcgagctgccggattttacgcgtgccacgtgcgctccctcatcccttgtcgttcaacaaaggggagatggccccttactgccagtgcagcagggctcagctcgttcagtggctag

SEQ ID NO: 82062 - DNA, 375 bp, Artificial Sequence
  derived and/or modified sequence
atgcgggcttcaccctgtatttctcagcccgcagcatcctggcaccccagaccgtccgccctccgccctacagcaggctccggacccgatacaagaacccccggtacggtggaagacgggtccgctccctgtcctgctttcaggtcaccagcggtttccccatgtggtgaggaaccatgctgttttcagatatctcctgccgaagaaacacttgagcttggccgtttggtttcaccgggtaactgcgatacgctgagccctagggctgctggcttctacgcgtgccatgtgcggagcctcattccctgccgcagcactaagggcaggtggcccctgacggcgtcagctgctggcctgtcttcattttcaggatag

SEQ ID NO: 82063 - DNA, 375 bp, Artificial Sequence
  derived and/or modified sequence
atgagggcgtcgccctgcatctcacaaccagccgcttcctggcatccccgtccaagtgcactaagaccaaccgcgggttctggccctgatacgcgcacacctggcaccgttgaggatgggtcagccccttgccctgccttcaggagcccagctgtttcaccctgcggggaggagccttgctgtttccagataagtcccgcagaagagacactcgaacttggcaggctggtctccccaggcaactgcgacaccttgagtccacgagctgctggcttctacgcatgccacgtacgatccctgataccttgtaggagcactaaagggcgatggccgctgacagcttctgctgcaggactatcatccttttctggttag

SEQ ID NO: 82064 - DNA, 309 bp, Artificial Sequence
  derived and/or modified sequence
atgagggccagcccatgcataagtcagcccgcagccagttggcaccctaggccgagcgctctgcgtccgaccgcagggagcggaccggacactagaactcccggaactgtggaagatggaagtgctccatgcccagcgtttagaagtcccgctgtatccccatgtggcgaggaaccatgttgcttccagatatctcctgccgaggaaacactcgaacttggtaggttggtgtctcccggttgccataaaagctctgctcctcaagagcgtcggctcgaccccagggcgaggtgcgtcgtacatatctag

SEQ ID NO: 82065 - DNA, 2026 bp, Artificial Sequence
  derived and/or modified sequence
ggctccacggccacatccgcaaaaagggtactggtgaacgtgacattttcacgaagccacagcccatggtcactccctgcaaagctctgaacttgcgcattcccaggccaggccgtggttgtctttccaaggcggctcagcttgtgctttgcttggagagagcggagggcagcagcacagtgacagcgtctgggacctcagaccagtttccacagccacttatgaaagcagacggctccatgggctggaggaggtgggacgctctggaaagaactcgggtgcgagtgggaaagaaaatcgagctgagcagctggaagtcgaagtcgcgtgagtgaggaccagacactctcgatttaggcaaaggcggggtgcacttcccaacaacacatcctcctcactggcgagaccaggcctgcccttcaagttcctctcctgatttaatccccttggcgagggtttggcatgaaatcaatggccagcaagcttggtaaacgaagccgcctacaccgccctccccctccctgcacggccgcgccccgcctccgctcctgtctcaatctgggattgtcctcctgtagccccaccatccaccgtggggaacggtggagagactacaactcccagtatgcaccgcgatgcgcgcctcaccctgcatctcccagcccgcagccagctggcatcctagaccctctgccctgcgaccaacagccgggagcggaccagacaccagaactcccggaacggttgaagacggttccgctccctgtcccgcctttcgcagcccagcagtttcgccctgcggagaggagccttgctgtttccaaatctctcctgctgaagagacattggagctagggcggctagtttcacctggtaattgtgacaccctgtctcctcgagctgcaggcttttatgcttgtcatgttcgaagtttgataccttgcagatcaacaaagggccggtggcctctcactgcctccgcggcagggttgtcaagtttttcaggttaagtactgcacgactactcgcttctgaaactgatagacactgcctcagctccgtgcagggcagacgcacaagagcagaatctccgtgggacatctctctggagcatcaatattactgcagtatttggaagaaacaaatttaaataagttctaaggtgaagaatggaacatttaagacaagtctggaaagtcatctgcctttaataactgtcgtttgtccttaacgtcagactttctccaagaccaaaactctaagaacttatttccattcttacaaatagtaaaaatgataaatcatatcaagtcaattgaaagtcctgcctgctgctttcctaaattgcaatatggccttggtatggttttatttgtacttttgtgggggattcgtggatctttagattaaaaaaaaaaaaataggtttttgaacaatttttgcaagtttgcagctgttagttattgatttatttttccaacccatctaattcttctgtctctctcctcaggctcaataattccatgggtctctaaggctgtgtttattttctttaaattttgttgatttacttttatactccatttgattttttctatctctcaccttttctcagactcagtcatcccacaggtctgtaaggctctgttcattttctttaaacttcttttttttttcctctcctcagattggataaattatattgctatgtctctgtttctgaactatagaaaagctcaaaattattatttttatttctcattttttatatggctattttttctctgctgatgtttcacatctattcatttatgagaatattttcctttgccctcatgagcgtgtttataatagctgccttcaaattcttgtctgccgtttacatcttggacatcttggagatggctactgcctgctttttatcttgtgtatttattacattttcacgtgtcttcacgcatcccttgaattggaaattgtgccctggagactgtatacaagactggattaaaaagactggattctg

SEQ ID NO: 82066 - DNA, 309 bp, Artificial Sequence
  derived and/or modified sequence
atgagagcatctccctgtatcagccagccagccgcttcttggcaccctagaccttccgctctcaggcccaccgctggaagcggaccagatacccgcaccccaggcaccgtggaggacggtagcgctccatgccccgctttcagatctccagccgtaagcccttgtggtgaagagccttgctgttttcagatatctcccgccgaagagaccctggagctcggccgtctggtctcacctggttgtcataaatccagtgcaccacaagaacgacgactggacccaagagcacgatgcgtggttcacatctag

SEQ ID NO: 82067 - DNA, 375 bp, Artificial Sequence
  derived and/or modified sequence
atgcgtgctagcccatgtatttcccagcccgcggcctcttggcatccccggcccagtgccctccgcccgaccgccggtagcggccctgacacgcgtactcccggcaccgtggaggacggctcagctccgtgcccagcattccgttcccctgccgtgtctccctgtggggaagagccttgttgttttcagatctcacccgcggaggaaacactggagctcggaaggctcgtgtcacccggcaactgtgataccctgtctccacgggctgcaggcttttacgcctgtcatgtccgaagtctgattccttgtagaagcaccaaaggtaggtggccgctaactgcaagcgccgccggcctttcctctttctcagggtag

SEQ ID NO: 82068 - DNA, 309 bp, Artificial Sequence
  derived and/or modified sequence
atgcgggccagcccctgcatcagccagcccgccgccagctggcacccgcggccctctgcactgcgacccacggccgggtctggtccagacacccggactcctgggaccgttgaggatggttctgcaccgtgtccggccttccgttctcccgctgtaagtccctgtggtgaggaaccgtgctgtttccagatttcaccagcagaagaaaccctagaattaggaaggctcgtttctcctggctgtcataagtccagtgcaccacaggagcggcgtctagaccctagagcgagatgcgttgtgcatatatag

SEQ ID NO: 82069 - DNA, 375 bp, Artificial Sequence
  derived and/or modified sequence
atgcgggccagcccctgcatcagccagcccgccgccagctggcacccccggccttccgcccttcgccccaccgccggctccgggcccgatactagaactccaggcaccgtggaagatggctcagccccctgcccggctttccggtcgcctgctgtgagcccatgcggggaggagccttgctgcttccagatatcaccagcagaagagacactggagctgggcagactggtctctcccggcaactgtgacacgctgtccccccgtgctgcagggttttacgcttgtcacgtaaggtctctgatcccttgtcgctccaccaaaggccgatggcccttgaccgcatccgccgctggcctctccagtttcagtggctag

SEQ ID NO: 82070 - DNA, 309 bp, Artificial Sequence
  derived and/or modified sequence
atgcgcgcttccccgtgcatatctcagcccgcagccagttggcaccccaggccaagcgccctgaggcctacggcgggttccggccctgataccaggaccccgggtacggttgaagatggtagcgccccttgtccagcttttaggagtcctgcagtgagtccgtgtggggaggaaccctgttgctttcagatttcaccagcagaggagaccttggagctcggcagattggtgagccccggatgtcacaagtcgagtgccccacaggagcggagactggatcccagagctaggtgtgtggttcacatttag

SEQ ID NO: 82071 - DNA, 375 bp, Artificial Sequence
  derived and/or modified sequence
atgagggccagcccatgcatttcccaaccggctgcgagttggcaccctagaccttcagctctgcggccaactgcagggtccggacccgatacacgcacaccaggcactgtagaggatgggtcagccccatgcccagcatttcgcagtccggctgtttctccatgtggagaggaaccatgttgtttccagatttccccagccgaggagaccttggaactcgggagattggttagtcccggaaactgcgataccctttcgcccagggccgcaggtttctatgcctgccacgtcaggagcctgatcccttgcaggagcaccaagggccgttggccattgacggcttctgccgctgggctgtcttcttttagcggctag

SEQ ID NO: 82072 - DNA, 2026 bp, Artificial Sequence
  derived and/or modified sequence
ggctccacggccacatccgcaaaaagggtactggtgaacgtgacattttcacgaagccacagcccatggtcactccctgcaaagctctgaacttgcgcattcccaggccaggccgtggttgtctttccaaggcggctcagcttgtgctttgcttggagagagcggagggcagcagcacagtgacagcgtctgggacctcagaccagtttccacagccacttatgaaagcagacggctccatgggctggaggaggtgggacgctctggaaagaactcgggtgcgagtgggaaagaaaatcgagctgagcagcgggaagtcgaagtcgcgtgagtgaggaccagacactctcgatttaggcaaaggcggggtgcacttcccaacaacacatcctcctcactggcgagaccaggcctgcccttcaagttcctctcctgatttaatccccttggcgagggtttggcatgaaatcaatggccagcaagcttggtaaacgaagccgcctacaccgccctccccctccctgcacggccgcgccccgcctccgctcctgtctcaatctgggattgtcctcctgtagccccaccatccaccgtggggaacggtggagagactacaactcccagtatgcaccgcgatgcgcgcctcaccctgcatctcccagcccgcagccagctggcatcctagaccctctgccctgcgaccaacagccgggagcggaccagacaccagaactcccggaacggttgaagacggttccgctccctgtcccgcctttcgcagcccagcagtttcgccctgcggagaggagccttgctgtttccaaatctctcctgctgaagagacattggagctagggcggctagtttcacctggtaattgtgacaccctgtctcctcgagctgcaggcttttatgcttgtcatgttcgaagtttgataccttgcagatcaacaaagggtcggtggcctctcactgcctccgcggcagggttgtcaagtttttcaggttaagtactgcacgactactcgcttctgaaactgatagacactgcctcagctccgtgcagggcagacgcacaagagcagaatctccgtgggacatctctctggagcatcaatattactgcagtatttggaagaaacaaatttaaataagttctaaggtaaagaatggaacatttaagacaagtctggaaagtcatctgcctttaataactgtcgtttgtccttaacgtcagactttctccaagacaaaaactctaagaacttatttccattcttacaaatagtaaaaatgataaatcatatcaagtcaattgaaagtcctgcctgctgctttcctaaatcacaatatggccttggtatggttttatttgtacttttgtgggggattcgtggatctttagattaaaaaaaaaaataggtttttgaacaatttttgcaagtttgcagctgttagttattgatttatttttgcaacccatctaattcttctgtctctctcctctcctcaggctcaataattccatgggtctctaaggctgtgtttattttctttaaattttgttgatttacttttatactccatttgattttttctatctctcaccttttctcagactcagtcatcccacaggtctgtaaggctctgttcattttctttaaacttttttttttcctctcctcagattggataaattatattgctatgtctctgtttctgaactatagaaaagctcaaaattactatttttatttctcattttttatatggctattttttctctgctgatgtttcacatctattcatttatgagaatattttcctttgccctcatgagcgtgtttataatagctgccttcaaattcttgtctgccgtttacatcttggacatcttggagatggctactgcctgctttttatcttgtgtatttattacattttcacgtgtcttcacgcatctcttgaattggaaattgtgccctggagactgtatacaagactggattaaaaagactggattctg

SEQ ID NO: 82073 - protein, 117 aa, Artificial Sequence
  derived and/or modified sequence
MRRSAAPSQLQGNSFKKPKFIPPGRSNPGLNEEITKLNPDIKLFEGVAINNTFLPSQNDLRICSLNLPSEESTREINNRDNCSGKYCFEAPTLATLDPPHTVQTWMRRHRLVPVHYR

SEQ ID NO: 82074 - DNA, 354 bp, Artificial Sequence
  derived and/or modified sequence
atgagaagaagcgccgctccttctcagctccaggggaactcttttaagaagcccaaattcatcccccctgggcggtcgaatcccggtcttaatgaggaaatcactaaactgaacccggatatcaaattgttcgagggggtagcgatcaacaacacatttctcccctcgcagaatgaccttcggatctgcagcttgaatctgccctctgaagagtccacccgcgaaataaacaacagggacaattgctcaggcaaatattgtttcgaggctccaacgctcgcaacactggatcccccccatacagtacagacttggatgagaaggcatcgcctggtgccagtgcattatcgttag

SEQ ID NO: 82075 - DNA, 354 bp, Artificial Sequence
  derived and/or modified sequence
atgagaagatctgctgcccccagccagctgcagggcaacagcttcaagaagcccaagttcatccccccaggccgcagcaaccctggcctgaatgaggagatcaccaagctgaacccagacatcaagctgtttgagggcgtggccatcaacaacaccttcctgcccagccagaatgacctgcgcatctgcagcctgaacctgcccagcgaggagagcacccgggagatcaacaacagagacaactgcagcggcaagtactgctttgaggcccccaccctggccaccctggaccccccccacacagtgcagacctggatgagaagacaccggctggtgcctgtgcactacagatag

SEQ ID NO: 82076 - DNA, 354 bp, Artificial Sequence
  derived and/or modified sequence
atgcggcggagcgccgcccccagccagctgcagggcaacagcttcaagaaaccaaagttcataccccctggcaggtcaaatcccggtcttaatgaagagataacaaagttgaatcctgatattaagctctttgaaggagtcgccattaataacacttttctcccatcacagaatgatctgagaatctgtagccttaacctgccatccgaagagagcacacgggagattaataacagagacaactgctcggggaagtactgtttcgaggctccaacgttggctactttggatccacctcacacagtacagacctggatgcgccgtcacaggctggtccctgtccactatcgctag

SEQ ID NO: 82077 - DNA, 354 bp, Artificial Sequence
  derived and/or modified sequence
atgaggagatctgcagcgccatcccagctgcaaggcaatagctttaagaagcccaagtttatccccccaggacggtctaaccccggattgaatgaagagattactaaattgaacccggacatcaagctcttcgaaggcgtggcgatcaataacacttttttaccctctcaaaatgacctgagaatttgcagtctcaacctgccgtcagaagaatctactcgagagattaacaatcgcgacaactgctccggtaaatattgtttcgaggcacctacgctggctactctggatccaccgcatacagttcagacctggatgaggcgacataggctcgtgcctgttcattatcgctag

SEQ ID NO: 82078 - DNA, 354 bp, Artificial Sequence
  derived and/or modified sequence
atgagaagaagcgccgcccccagccagctgcagggcaacagcttcaagaagcccaagttcatcccccccggcagaagcaaccccggcctgaacgaggagatcaccaagctgaaccccgacatcaagctgttcgagggcgtggccatcaacaacaccttcctgcccagccagaacgacctgagaatctgcagcctgaacctgcccagcgaggagagcaccagagagatcaacaacagagacaactgcagcggcaagtactgcttcgaggcccccaccctggccaccctggaccccccccacaccgtgcagacctggatgagaagacacagactggtgcccgtgcactacagatag

SEQ ID NO: 82079 - DNA, 1749 bp, Artificial Sequence
  derived and/or modified sequence
atgggactcggcaaaactctacaatgtatctcactgatctggaccctgcagtgccagggcccctacgggggaaagccagtgatcaagaaaaccctaatcgtaactccgggatcccttgtgaacaactggaaaaaggagtttcagaagtggctgggctcagagaggatcaagatttttacagtcgaccaggaccacaaggtggaggagtttattaagtcaatattctattctgttctcattatttcttacgagatgctgctccggtctctcgatcagattaaaaatattaagtttgatctactcatctgtgatgaaggccataggctcaaaaatagtgccatcaagaccacgaccgcactcatctccctctcttgtgaaaagagaattattctgacgggcaccccaatacagaacgatttacaggaatttttcgccctgatcgacttcgtcaatccggggatacttggaagtctcagcagttatcggaagatctacgaagagcctattatcctgtcccgagagccgtccgcttcagaagaggaaaaggaactaggcgaacgtgagcagctgaacttgctggccagtttggattccctactacggcgcacgcaggagatcataaataaatatctgccccctaagatcgagaacgtggtcttctgccgacccggcgccctgcagattgaactgtaccgcaaactgctcaattcccaggtcgtacggttttgcttgcagggtctccttgagaactcgccccatctcatctgcatcggtgcattgaagaagctctgtaaccacccgtgtttgctgtttaacagcataaaagagaaagagtgcagttctacatgcgacaaaaacgaggagaagagcttgtacaagggcttattgtccgtttttcccgccgactacaacccactgctctttaccgagaaggaatctggcaagcttcaggtgctctccaaactcctggctgtgatccatgagctgcgacctacagagaaggtggtcttagtttcaaattacacgcagacactgaatatactgcaggaggtgtgcaagcgccatggttacgcttacacgaggctcgacggacagacccccatctcacaacgccagcagatcgtcgacgggttcaattcccagcacagcagcttcttcatttttctgctgtcatccaaggccgggggagttggtctgaatttgatagggggatctcatctcattctttatgatattgactggaacccagccacagatatacaggcaatgagtcgcgtgtggcgcgatggccagaagtatcccgttcacatctatcgcctgctgaccactggcaccatcgaggagaagatctatcagaggcagatctctaagcaggggttgtgtggggccgttgtggatttgacaaaaacaagcgaacacatacagttctcagtcgaggagctcaagaacttgtttaccctccacgaatcaagtgattgcgtgacacatgacctgctggattgcgaatgcactggggaggaagtgcacactggcgattccctggagaaatttattgtgagccgagattgtcagcttggccctcatcaccagaagagcaactccttaaagcctctgtcaatgtcccagctgaaacagtggaaacatttctctggggaccacctcaacctgacagatccttttttggaaaggattacagagaatgtctccttcattttccagaatatcaccacgcaggccactggcacatag

SEQ ID NO: 82080 - DNA, 1749 bp, Artificial Sequence
  derived and/or modified sequence
atgggcctgggcaagaccctgcagtgcatcagcctcatctggaccctgcagtgccagggcccctacggcggcaagcctgtgatcaagaagaccctgattgtgaccccaggcagcctggtgaacaactggaagaaggagttccagaagtggctgggcagcgagcgcatcaagatcttcaccgtggaccaggaccacaaggtggaggagttcatcaagagcatcttctacagcgtgctgatcatctcctatgagatgctgctgcggagcctggaccagatcaagaacatcaagtttgacctgctgatctgtgatgagggccaccggctgaagaacagcgccatcaagaccaccacagccctgatcagcctgagctgtgagaagaggatcatcctgaccggcacccccatccagaatgacctgcaggagttctttgccctgattgactttgtgaaccctggcatcctgggcagcctgagcagctacaggaagatctatgaggagcccatcatcctgagccgggagcccagcgccagcgaggaggagaaggagctgggggagcgggagcagctgaacctgctggccagcctggacagcctgctgcggaggacccaggagatcatcaacaagtacctgccccccaagattgaaaatgtggtgttctgcaggcctggggccctgcagatcgagctgtacaggaagctgctgaacagccaggtggtgcgcttctgcctgcagggcctgctggagaacagcccccacctgatctgcattggagccctgaagaagctgtgcaaccacccctgcctgctcttcaacagcatcaaggagaaggagtgcagcagcacctgtgacaagaatgaggagaagagcctgtacaagggcctgctgtctgtgtttcctgctgactacaaccccctgctcttcacagagaaggagagcggcaagctgcaggtgctgagcaagctgctggccgtcatccacgagctgcggcccacagagaaggtggtgctggtgagcaactacacccagaccctgaacatcctgcaggaggtgtgcaagagacatggctacgcctacacccggctggatggccagacccccatcagccagaggcagcagatcgtggatggcttcaacagccagcacagcagcttcttcatcttcctgctgagcagcaaggccggcggcgtgggcctgaacctgattggaggcagccacctgatcctgtatgacatcgactggaacccagccacagacatccaggccatgagccgggtgtggagagatggccagaagtaccctgtgcacatctaccgcctgctgaccaccggcaccatcgaggagaagatctaccagaggcagatcagcaagcagggcctgtgtggggctgtggtggacctgaccaagaccagcgagcacatccagttctctgtggaggagctgaagaacctcttcaccctgcacgagagcagtgactgtgtgacccatgacctgctggactgtgagtgcaccggggaggaggtgcacactggagacagcctggagaagttcatcgtgtcccgggactgccagctgggcccccaccaccagaagagcaacagcctgaagcccctgtccatgagccagctgaagcagtggaagcacttcagcggggaccacctgaacctgacagaccccttcctggagcgcatcacagaaaatgtgtccttcatcttccagaacatcaccacccaggccaccggcacctag

SEQ ID NO: 82081 - DNA, 1749 bp, Artificial Sequence
  derived and/or modified sequence
atgggcctgggcaagaccctgcagtgcatcagcctgatctggaccctgcagtgtcagggaccctacggggggaaaccagtcatcaagaagacccttatcgtgacacccggttcgttagtcaacaattggaagaaggagtttcaaaagtggctggggtcggaacgaataaagatcttcacagtagatcaggatcacaaagtggaggaattcattaaatcaatcttctatagtgttctgattatttcatacgaaatgctgcttcgcagcctggatcagatcaagaatataaagttcgatttgttgatctgcgatgaaggccatcgattgaagaatagcgccatcaaaaccacaacagcacttatctcactatcatgcgagaagcggatcatccttaccggaacccctatccagaacgacctgcaggaattcttcgccctcatcgactttgtaaatcctggcatcctcggcagtctgtcttcctataggaagatttacgaagagcctattatattgagcagagagccatcagcttctgaagaagaaaaagagcttggggagagggagcaactgaatctgctggcctccctggatagcctcctgcggcggacccaagagattatcaacaagtatctgcctccaaagattgaaaacgtcgtgttttgtaggcccggcgcactgcagattgaattgtataggaaactcttaaatagtcaagtggtgagattctgtctgcaaggattgctcgagaactctccccacctgatctgtatcggtgcacttaaaaaattgtgtaatcacccttgtcttctattcaatagcataaaagagaaggagtgcagtagtacttgcgacaaaaatgaagagaagagcctgtataaaggccttctgtctgtctttccagcagattacaatccactgttgttcaccgaaaaagagagcggaaaactacaggtgctgtctaagctcctcgccgttattcacgagctgaggcccaccgagaaagtggttcttgtatccaattatacacagacgctgaacatcctgcaggaggtgtgcaagaggcatggctacgcttacacaaggctggacgggcagacccccatcagtcagagacagcagatcgtcgatggattcaacagccagcactcctctttttttatcttcctgctgagctcaaaagctgggggtgtgggactgaaccttattggcggatcgcatttaatcctgtatgacatcgattggaatcctgctacagacattcaagccatgtccagggtttggcgcgatggacagaagtatcctgtgcatatttataggctgctgaccacaggcacgatcgaggagaaaatataccagagacaaatttccaaacagggcctgtgtggagccgtggtggatctcacaaaaacaagtgaacacatccagttcagcgtcgaagagctgaagaatctgttcacacttcacgagtcgagcgattgcgtcacgcacgaccttctggattgcgagtgtactggcgaggaggtgcataccggggattctctcgaaaagtttattgttagccgggattgtcagctgggcccccatcatcaaaaatctaacagccttaagcctctaagcatgtcgcagctgaaacagtggaagcatttctctggggatcatttgaacctgaccgacccctttctggaaaggattacggaaaacgtgtccttcatcttccaaaacatcacaactcaggccacaggcacatag

SEQ ID NO: 82082 - DNA, 1749 bp, Artificial Sequence
  derived and/or modified sequence
atgggcctgggcaagactctacagtgtatcagtcttatctggaccctgcagtgtcagggaccctacggcggaaagcctgtcatcaaaaagacattaatcgtgacaccgggtagcttagtgaataactggaaaaaggaattccaaaagtggctgggttccgagagaatcaagatcttcactgtggatcaggaccataaagtggaggagttcattaagtctatcttttacagcgtattaataatttcttatgagatgctgctgaggtccttggaccagatcaagaatatcaaattcgacctgctgatctgtgacgaaggccaccggttaaagaattctgcaatcaagactactactgcactcatcagtctgagctgtgaaaaaaggattatcctgactggtacacctattcaaaacgacctgcaagaattcttcgctctcattgattttgtcaatccgggaattttaggttcactctcttcatataggaaaatctatgaggagccaatcattctctcccgcgaaccaagcgcctccgaggaggagaaggagctgggagaacgggagcagctcaaccttctggcatccctcgacagcctccttagacgcacacaggagatcattaacaagtaccttcctccgaaaatcgaaaacgtcgttttctgccggcctggggcattacaaatcgagctgtaccgaaaactgcttaattcacaggtggtgagattctgcctgcaagggctgttggagaactctccccacctgatttgtatcggggctctgaaaaaactctgtaaccacccctgcttgctctttaactcaatcaaggaaaaagaatgttcttcaacctgcgacaagaacgaggagaagtctctctataaagggttgctgtctgtttttcctgccgactataaccccctgctatttaccgagaaagaaagcggaaagcttcaggtgctgagcaaactgctcgccgtgattcacgagttgcgacccacagagaaggtcgtgctggtttctaactacacacagaccctcaacattctgcaggaggtctgtaagcgtcatggttatgcctacacccgtctggatggccagacccccatttcccaaagacagcagatcgtggacggatttaactctcagcattcttccttttttattttcctgctgagctccaaagccggaggagtagggttgaacctcattggtggtagtcatttgattctctacgacattgactggaaccccgcaaccgacatacaggcaatgtctagagtgtggagggacggacagaaatacccagttcacatatatcggctgttgacaacagggaccatcgaagaaaaaatttatcagcgccagatctcaaaacaaggcctgtgcggggcagtcgttgacctgacaaagacatcagaacacatccagttttccgtagaggaactcaagaacctgtttacactgcacgaatcaagcgattgcgtgactcatgatctgcttgactgcgagtgtacgggggaggaggtacacaccggcgattctctcgagaagttcatcgtgagcagagactgtcagctgggacctcaccatcagaaatcaaacagcctgaaaccgctgtcaatgtcgcagctgaagcagtggaagcatttcagcggcgatcatctgaatcttacagaccccttccttgagagaatcacagaaaatgtttcttttatcttccagaatattactactcaggcaactggtacgtag

SEQ ID NO: 82083 - DNA, 1749 bp, Artificial Sequence
  derived and/or modified sequence
atgggcctgggcaagaccctgcagtgcatcagcctgatctggaccctgcagtgccagggcccctacggcggcaagcccgtgatcaagaagaccctgatcgtgacccccggcagcctggtgaacaactggaagaaggagttccagaagtggctgggcagcgagagaatcaagatcttcaccgtggaccaggaccacaaggtggaggagttcatcaagagcatcttctacagcgtgctgatcatcagctacgagatgctgctgagaagcctggaccagatcaagaacatcaagttcgacctgctgatctgcgacgagggccacagactgaagaacagcgccatcaagaccaccaccgccctgatcagcctgagctgcgagaagagaatcatcctgaccggcacccccatccagaacgacctgcaggagttcttcgccctgatcgacttcgtgaaccccggcatcctgggcagcctgagcagctacagaaagatctacgaggagcccatcatcctgagcagagagcccagcgccagcgaggaggagaaggagctgggcgagagagagcagctgaacctgctggccagcctggacagcctgctgagaagaacccaggagatcatcaacaagtacctgccccccaagatcgagaacgtggtgttctgcagacccggcgccctgcagatcgagctgtacagaaagctgctgaacagccaggtggtgagattctgcctgcagggcctgctggagaacagcccccacctgatctgcatcggcgccctgaagaagctgtgcaaccacccctgcctgctgttcaacagcatcaaggagaaggagtgcagcagcacctgcgacaagaacgaggagaagagcctgtacaagggcctgctgagcgtgttccccgccgactacaaccccctgctgttcaccgagaaggagagcggcaagctgcaggtgctgagcaagctgctggccgtgatccacgagctgagacccaccgagaaggtggtgctggtgagcaactacacccagaccctgaacatcctgcaggaggtgtgcaagagacacggctacgcctacaccagactggacggccagacccccatcagccagagacagcagatcgtggacggcttcaacagccagcacagcagcttcttcatcttcctgctgagcagcaaggccggcggcgtgggcctgaacctgatcggcggcagccacctgatcctgtacgacatcgactggaaccccgccaccgacatccaggccatgagcagagtgtggagagacggccagaagtaccccgtgcacatctacagactgctgaccaccggcaccatcgaggagaagatctaccagagacagatcagcaagcagggcctgtgcggcgccgtggtggacctgaccaagaccagcgagcacatccagttcagcgtggaggagctgaagaacctgttcaccctgcacgagagcagcgactgcgtgacccacgacctgctggactgcgagtgcaccggcgaggaggtgcacaccggcgacagcctggagaagttcatcgtgagcagagactgccagctgggcccccaccaccagaagagcaacagcctgaagcccctgagcatgagccagctgaagcagtggaagcacttcagcggcgaccacctgaacctgaccgaccccttcctggagagaatcaccgagaacgtgagcttcatcttccagaacatcaccacccaggccaccggcacctag

SEQ ID NO: 82084 - protein, 2264 aa, Artificial Sequence
  derived and/or modified sequence
MALYNPIPVRQNCFTVNRSLFIFGEDNIVRKYAKKLIDWPPFEYMILATIIANCIVLALEQHLPEDDKTPMSRRLEKTEPYFIGIFCFEAGIKIVALGFIFHKGSYLRNGWNVMDFIVVLSGILATAGTHFNTHVDLRTLRAVRVLRPLKLVSGIPSLQIVLKSIMKAMVPLLQIGLLLFFAILMFAIIGLEFYSGKLHRACFMNNSGILEGFDPPHPCGVQGCPAGYECKDWIGPNDGITQFDNILFAVLTVFQCITMEGWTTVLYNTNDALGATWNWLYFIPLIIIGSFFVLNLVLGVLSGEFAKERERVENRRAFMKLRRQQQIERELNGYRAWIDKAEEVMLAEENKNAGTSALEVLRRATIKRSRTEAMTRDSSDEHCVDISSVGTPLARASIKSAKVDGVSYFRHKERLLRISIRHMVKSQVFYWIVLSLVALNTACVAIVHHNQPQWLTHLLYYAEFLFLGLFLLEMSLKMYGMGPRLYFHSSFNCFDFGVTVGSIFEVVWAIFRPGTSFGISVLRALRLLRIFKITKYWASLRNLVVSLMSSMKSIISLLFLLFLFIVVFALLGMQLFGGRFNFNDGTPSANFDTFPAAIMTVFQILTGEDWNEVMYNGIRSQGGVSSGMWSAIYFIVLTLFGNYTLLNVFLAIAVDNLANAQELTKDEQEEEEAFNQKHALQKAKEVSPMSAPNMPSIERDRRRRHHMSMWEPRSSHLRERRRRHHMSVWEQRTSQLRKHMQMSSQEALNREEAPTMNPLNPLNPLSSLNPLNAHPSLYRRPRAIEGLALGLALEKFEEERISRGGSLKGDGGDRSSALDNQRTPLSLGQREPPWLARPCHGNCDPTQQEAGGGEAVVTFEDRARHRQSQRRSRHRRVRTEGKESSSASRSRSASQERSLDEAMPTEGEKDHELRGNHGAKEPTIQEERAQDLRRTNSLMVSRGSGLAGGLDEADTPLVLPHPELEVGKHVVLTEQEPEGSSEQALLGNVQLDMGRVISQSEPDLSCITANTDKATTESTSVTVAIPDVDPLVDSTVVHISNKTDGEASPLKEAEIREDEEEVEKKKQKKEKRETGKAMVPHSSMFIFSTTNPIRRACHYIVNLRYFEMCILLVIAASSIALAAEDPVLTNSERNKVLRYFDYVFTGVFTFEMVIKMIDQGLILQDGSYFRDLWNILDFVVVVGALVAFALANSMKTNKGRDIKTIKSLRVLRVLRPLKTIKRLPKLKAVFDCVVTSLKNVFNILIVYKLFMFIFAVIAVQLFKGKFFYCTDSSKDTEKECIGNYVDHEKNKMEVKGREWKRHEFHYDNIIWALLTLFTVSTGEGWPQVLQHSVDVTEEDRGPSRSNRMEMSIFYVVYFVVFPFFFVNIFVALIIITFQEQGDKMMEECSLEKNERACIDFAISAKPLTRYMPQNRHTFQYRVWHFVVSPSFEYTIMAMIALNTVVLMMKYYSAPCTYELALKYLNIAFTMVFSLECVLKVIAFGFLNYFRDTWNIFDFITVIGSITEIILTDSKLVNTSGFNMSFLKLFRAARLIKLLRQGYTIRILLWTFVQSFKALPYVCLLIAMLFFIYAIIGMQVFGNIKLDEESHINRHNNFRSFFGSLMLLFRSATGEAWQEIMLSCLGEKGCEPDTTAPSGQNENERCGTDLAYVYFVSFIFFCSFLMLNLFVAVIMDNFEYLTRDSSILGPHHLDEFVRVWAEYDRAACGRIHYTEMYEMLTLMSPPLGLGKRCPSKVAYKRLVLMNMPVAEDMTVHFTSTLMALIRTALDIKIAKGGADRQQLDSELQKETLAIWPHLSQKMLDLLVPMPKASDLTVGKIYAAMMIMDYYKQSKVKKQRQQLEEQKNAPMFQRMEPSSLPQEIIANAKALPYLQQDPVSGLSGRSGYPSMSPLSPQDIFQLACMDPADDGQFQERQSLEPEVSELKSVQPSNHGIYLPSDTQEHAGSGRASSMPRLTVDPQVVTDPSSMRRSFSTIRDKRSNSSWLEEFSMERSSENTYKSRRRSYHSSLRLSAHRLNSDSGHKSDTHRSGGRERGRSKERKHLLSPDVSRCNSEERGTQADWESPERRQSRSPSEGRSQTPNRQGTGSLSESSIPSVSDTSTPRRSRRQLPPVPPKPRPLLSYSSLIRHAGSISPPADGSEEGSPLTSQALESNNACLTESSNSPHPQQSQHASPQRYISEPYLALHEDSHASDCGEEETLTFEAAVATSLGRSNTIGSAPPLRHSWQMPNGHYRRRRRGGPGPGMMCGAVNNLLSDTEEDDKC

SEQ ID NO: 82085 - protein, 2313 aa, Artificial Sequence
  derived and/or modified sequence
MARFGEAVVARPGSGDGDSDQSRNRQGTPVPASGQAAAYKQTKAQRARTMALYNPIPVRQNCFTVNRSLFIFGEDNIVRKYAKKLIDWPPFEYMILATIIANCIVLALEQHLPEDDKTPMSRRLEKTEPYFIGIFCFEAGIKIVALGFIFHKGSYLRNGWNVMDFIVVLSGILATAGTHFNTHVDLRTLRAVRVLRPLKLVSGIPSLQIVLKSIMKAMVPLLQIGLLLFFAILMFAIIGLEFYSGKLHRACFMNNSGILEGFDPPHPCGVQGCPAGYECKDWIGPNDGITQFDNILFAVLTVFQCITMEGWTTVLYNTNDALGATWNWLYFIPLIIIGSFFVLNLVLGVLSGEFAKERERVENRRAFMKLRRQQQIERELNGYRAWIDKAEEVMLAEENKNAGTSALEVLRRATIKRSRTEAMTRDSSDEHCVDISSVGTPLARASIKSAKVDGVSYFRHKERLLRISIRHMVKSQVFYWIVLSLVALNTACVAIVHHNQPQWLTHLLYYAEFLFLGLFLLEMSLKMYGMGPRLYFHSSFNCFDFGVTVGSIFEVVWAIFRPGTSFGISVLRALRLLRIFKITKYWASLRNLVVSLMSSMKSIISLLFLLFLFIVVFALLGMQLFGGRFNFNDGTPSANFDTFPAAIMTVFQILTGEDWNEVMYNGIRSQGGVSSGMWSAIYFIVLTLFGNYTLLNVFLAIAVDNLANAQELTKDEQEEEEAFNQKHALQKAKEVSPMSAPNMPSIERDRRRRHHMSMWEPRSSHLRERRRRHHMSVWEQRTSQLRKHMQMSSQEALNREEAPTMNPLNPLNPLSSLNPLNAHPSLYRRPRAIEGLALGLALEKFEEERISRGGSLKGDGGDRSSALDNQRTPLSLGQREPPWLARPCHGNCDPTQQEAGGGEAVVTFEDRARHRQSQRRSRHRRVRTEGKESSSASRSRSASQERSLDEAMPTEGEKDHELRGNHGAKEPTIQEERAQDLRRTNSLMVSRGSGLAGGLDEADTPLVLPHPELEVGKHVVLTEQEPEGSSEQALLGNVQLDMGRVISQSEPDLSCITANTDKATTESTSVTVAIPDVDPLVDSTVVHISNKTDGEASPLKEAEIREDEEEVEKKKQKKEKRETGKAMVPHSSMFIFSTTNPIRRACHYIVNLRYFEMCILLVIAASSIALAAEDPVLTNSERNKVLRYFDYVFTGVFTFEMVIKMIDQGLILQDGSYFRDLWNILDFVVVVGALVAFALANALGTNKGRDIKTIKSLRVLRVLRPLKTIKRLPKLKAVFDCVVTSLKNVFNILIVYKLFMFIFAVIAVQLFKGKFFYCTDSSKDTEKECIGNYVDHEKNKMEVKGREWKRHEFHYDNIIWALLTLFTVSTGEGWPQVLQHSVDVTEEDRGPSRSNRMEMSIFYVVYFVVFPFFFVNIFVALIIITFQEQGDKMMEECSLEKNERACIDFAISAKPLTRYMPQNRHTFQYRVWHFVVSPSFEYTIMAMIALNTVVLMMKYYSAPCTYELALKYLNIAFTMVFSLECVLKVIAFGFLNYFRDTWNIFDFITVIGSITEIILTDSKLVNTSGFNMSFLKLFRAARLIKLLRQGYTIRILLWTFVQSFKALPYVCLLIAMLFFIYAIIGMQVFGNIKLDEESHINRHNNFRSFFGSLMLLFRSATGEAWQEIMLSCLGEKGCEPDTTAPSGQNENERCGTDLAYVYFVSFIFFCSFLMLNLFVAVIMDNFEYLTRDSSILGPHHLDEFVRVWAEYDRAACGRIHYTEMYEMLTLMSPPLGLGKRCPSKVAYKRLVLMNMPVAEDMTVHFTSTLMALIRTALDIKIAKGGADRQQLDSELQKETLAIWPHLSQKMLDLLVPMPKASDLTVGKIYAAMMIMDYYKQSKVKKQRQQLEEQKNAPMFQRMEPSSLPQEIIANAKALPYLQQDPVSGLSGRSGYPSMSPLSPQDIFQLACMDPADDGQFQERQSLEPEVSELKSVQPSNHGIYLPSDTQEHAGSGRASSMPRLTVDPQVVTDPSSMRRSFSTIRDKRSNSSWLEEFSMERSSENTYKSRRRSYHSSLRLSAHRLNSDSGHKSDTHRSGGRERGRSKERKHLLSPDVSRCNSEERGTQADWESPERRQSRSPSEGRSQTPNRQGTGSLSESSIPSVSDTSTPRRSRRQLPPVPPKPRPLLSYSSLIRHAGSISPPADGSEEGSPLTSQALESNNACLTESSNSPHPQQSQHASPQRYISEPYLALHEDSHASDCGEEETLTFEAAVATSLGRSNTIGSAPPLRHSWQMPNGHYRRRRRGGPGPGMMCGAVNNLLSDTEEDDKC

SEQ ID NO: 82086 - protein, 438 aa, Artificial Sequence
  derived and/or modified sequence
MARFGEAVVARPGSGDGDSDQSRNRQGTPVPASGQAAAYKQTKAQRARTMALYNPIPVRQNCFTVNRSLFIFGEDNIVRKYAKKLIDWPPFEYMILATIIANCIVLALEQHLPEDDKTPMSRRLEKTEPYFIGIFCFEAGIKIVALGFIFHKGSYLRNGWNVMDFIVVLSGILATAGTHFNTHVDLRTLRAVRVLRPLKLVSGIPSLQIVLKSIMKAMVPLLQIGLLLFFAILMFAIIGLEFYSGKLHRACFMNNSGILEGFDPPHPCGVQGCPAGYECKDWIGPNDGITQFDNILFAVLTVFQCITMEGWTTVLYNTNDALGATWNWLYFIPLIIIGSFFVLNLVLGVLSGEFAKERERVENRRAFMKLRRQQQIERELNGYRAWIDKAEEVMLAEENKNAGTSALEVLRRATIKRSRTEAMTRDSSDEHCVDISSV

SEQ ID NO: 82087 - DNA, 85 bp, Artificial Sequence
  derived and/or modified sequence
acaaatggaatcaacaacgaatggaatcgaatggaaacgccatcgaaaggaaacgaatggaattatcatgaaattgaaatggatg

SEQ ID NO: 82088 - DNA, 6795 bp, Artificial Sequence
  derived and/or modified sequence
atggctctgtataaccccatacctgtgcggcagaattgctttaccgtgaacaggtcactttttatctttggcgaagataatatcgtgcggaagtatgccaagaagcttattgattggcctcccttcgaatacatgatcttggctacaatcatcgcaaattgcatcgtgctggcacttgaacagcacttgcccgaggacgataagactccaatgagcaggcgactggagaaaacagagccctattttataggtattttttgctttgaggcaggcattaagattgtagctctggggtttatcttccataaggggagctaccttagaaacgggtggaatgtgatggattttatcgtcgtcctgtccggaatcctcgctaccgccggaacacacttcaacacccacgttgatctccgcactctgcgagccgtgagggtgcttcggccccttaaacttgtgagcggcatcccctctctgcaaatcgtgctgaagtcaatcatgaaagctatggtgccactgttacagatcgggctgctcctgttctttgccatacttatgtttgcgataataggtctagagttttattcaggcaaacttcacagagcctgttttatgaacaactcaggcatattggaaggttttgatccaccccacccttgtggggtgcagggttgcccagcaggctacgaatgtaaggattggataggccccaatgacggcattactcagttcgataatatattattcgctgtcctgaccgtatttcagtgtattactatggagggctggacgacggtgctgtataacacgaatgacgctctcggcgccacttggaactggctctacttcattccgcttattattattggcagctttttcgtgctcaacctcgtgctcggcgtcctgtcaggggagttcgccaaggaacgggaaagggtggaaaatagacgggcctttatgaagttaagacggcaacaacaaatcgagagggaactgaatgggtacagagcctggatcgataaagcggaggaggtgatgctcgccgaagagaataaaaatgcaggcacgtcggctctggaggttcttcggcgcgcaaccatcaagagatcaagaacagaggcaatgacccgggattcgagcgacgaacactgtgtggacatttcttcagtgggcactccactcgctcgggcttctattaaaagcgccaaagtcgatggcgtaagttactttaggcacaaagaacggctgctgcgtatttctataaggcatatggttaagtctcaagtcttttattggattgtgttgagcctggtcgccctgaacacagcctgtgtagctattgtgcatcataaccagccccagtggttaacccatcttttgtactatgctgaattcctatttctgggactgttcctgctcgaaatgtctctaaaaatgtacggcatgggtcccagattatacttccactccagttttaattgcttcgactttggggtcaccgtaggatcaatttttgaggtcgtgtgggcaatctttcgtcctgggacatcgttcggcatttcagtgttaagggcgttgagattgcttaggatcttcaagattaccaagtattgggcctcacttcgcaacctggttgtctcattgatgtccagtatgaagtctatcatttcccttctcttcctactgtttctgtttatcgtggtcttcgctctcctcggaatgcagctgttcgggggaagattcaacttcaatgatggaaccccctcagcaaactttgacacatttcccgccgctattatgaccgtgtttcaaatactgaccggcgaggactggaacgaggtgatgtacaacgggattcgtagccagggcggcgtgagctcaggtatgtggtcggcaatctatttcatcgttctgaccctgttcggaaactacaccttactgaacgtgttcctcgcgattgccgttgacaatcttgcaaacgcccaggagctgactaaggatgaacaggaggaggaagaagcgtttaaccagaaacacgcattgcagaaggcaaaagaggtatcccccatgtcagctccaaacatgccgtctatcgaacgcgacaggcgaaggcggcatcacatgtctatgtgggaaccaagatcttcccatctgcgcgaaagaagaagacgacaccacatgtctgtttgggaacagaggactagtcagctgagaaagcacatgcagatgagctctcaggaggctcttaacagggaggaagcgccaaccatgaacccactcaaccccctcaatccactctctagcctaaacccgttgaatgcgcacccttccctgtaccgccgtccaagggccattgagggcctggccctcggcctcgcactcgagaagttcgaagaggagaggatctcgaggggcgggagtttgaaaggcgacggtggagatcgatcctctgctctggacaaccaacgtacccctctctcactgggccagcgcgaacccccctggttggcccgaccctgtcatgggaactgcgaccccacacaacaagaagcgggggggggggaagccgtggtgaccttcgaagatcgcgctcggcatcgtcaatcacagagacgcagtagacatagaagggtgcgcaccgagggcaaagagtccagcagcgcctccagaagcagaagtgccagccaggagcgttccctggacgaagccatgccgactgagggtgagaaggatcatgaactgcgaggaaaccatggggctaaggagccgacaattcaggaggagagagcgcaggaccttaggcgcacgaacagcctgatggtgagcagaggctctggcctcgcaggagggctcgacgaggctgataccccactggtgcttccgcatccagaattggaggtcggcaaacatgtggtgctaaccgagcaggagccagagggatcgagtgaacaggccttgcttggaaatgtgcagcttgatatgggtagggtgatatctcagtcagagcccgatctgtcctgtattactgcgaacaccgataaagctaccactgaaagcaccagcgtaaccgtggccatccctgatgtcgatccgctggtcgactcaacagttgtccacatctcaaacaagactgacggagaagcctcccccctcaaggaggccgagatcagggaagatgaggaagaagtcgagaagaagaaacagaagaaggaaaagcgggaaactgggaaagccatggtgccacatagttccatgttcatatttagtaccactaacccgatcagacgtgcctgccattacatcgtcaatttgcgttatttcgagatgtgtatcctcctggtcattgctgcttcttcaatcgcgttggcggcagaggacccagtgctcacgaactctgagagaaacaaagtgcttcgatacttcgattacgtctttacaggggtgtttaccttcgagatggtaataaaaatgattgaccagggactgattctccaggatgggtcttactttcgggacctctggaatatcctggacttcgtcgtcgtggtcggcgctcttgttgccttcgcgctagccaacagcatgaagacaaacaaggggcgcgacataaaaacaatcaagtctctcagagtgctgagagtgttgcgacccttgaaaaccatcaaaagactgccaaaactgaaggccgtttttgattgtgtggtcacgagtctgaaaaatgtgttcaacattcttatcgtctataagttgtttatgtttatcttcgccgtgattgccgtccaactctttaagggtaaattcttttattgcaccgattcctccaaggacacagaaaaggagtgtatcgggaactatgtagatcatgagaagaataaaatggaggtcaaggggcgagaatggaagcgacacgagttccactacgataacatcatctgggcgcttctgactctatttaccgtctcaactggcgagggctggccccaagttctgcagcacagcgtggacgtgactgaggaggatagaggaccctcacgtagtaacaggatggagatgtctattttttacgtggtgtactttgtggtgtttccctttttctttgtgaacatatttgttgcgttgattatcattacctttcaggagcagggagacaagatgatggaggagtgtagtttagagaagaatgagcgcgcttgcattgacttcgccatctccgccaaacccttgacccgatatatgcctcagaaccggcatacctttcagtatagggtctggcactttgtggtgagcccttctttcgagtacactatcatggcaatgatcgccctgaatactgtggttttaatgatgaagtattatagcgcaccttgcacctatgagctggccctgaagtatctcaatatcgcctttactatggtgttttcccttgagtgcgtgctaaaggtgatcgcattcggcttcctgaattattttcgtgacacctggaacatttttgatttcattaccgtgattggctctataacagagatcattctgacggacagtaagctggtgaacacttctggcttcaatatgtccttcctgaaactctttagggcagcccggctcatcaagctgctgaggcagggatacacaattcggatccttctctggaccttcgtgcagagttttaaggctctcccctacgtgtgtttattgattgccatgttgttcttcatttacgccatcatcgggatgcaggttttcggtaacataaaactagatgaggaaagccacattaatcgacataacaatttccggtcatttttcggctctctgatgttactcttccgaagcgctacaggggaggcatggcaggaaatcatgctttcatgcctgggcgaaaaaggctgtgagcctgacaccaccgccccttctggccagaatgagaatgaaaggtgcggcacagacttggcttacgtttactttgtcagtttcatctttttttgttcatttcttatgctcaacttgtttgtggcagtgataatggacaacttcgagtatctgaccagggacagcagcattctcggtccacatcacctggatgagtttgtcagggtttgggcagaatacgacagagctgcttgtggacgaattcattataccgagatgtacgaaatgttgaccctaatgagtccacctctgggcctaggaaagcggtgtccgagtaaagtggcttataaacgcctcgtgctgatgaacatgccagtagccgaggatatgacagtacattttacttcaaccttgatggccttaattcggactgccctggatatcaagatagcaaaggggggcgccgaccgtcagcaactggatagtgagctacagaaagagactcttgctatttggccccacctcagccagaagatgttagacctactggtcccaatgccaaaagctagtgacctaaccgtcggaaaaatatacgccgccatgatgattatggattactataaacagagcaaagtcaaaaaacaacggcagcagctcgaagagcaaaaaaacgcccccatgttccagcgcatggaaccatcctctctcccacaggagataatcgctaacgccaaggccctaccgtatctccagcaagatcctgtgagcggtctgtctggcaggtccggctacccatctatgtcacccctgtcccctcaagacattttccagttggcctgtatggatcctgccgatgatggccaatttcaggaacgccagtctctagaacctgaagtgagcgagctgaaaagcgtgcagccctccaaccacggcatttacctgccaagcgatacacaggagcacgctggctcaggcagagcatcctccatgccaaggcttactgtcgatccccaagtcgtcacagacccctcatccatgcgcagaagcttctccaccatcagggataagcggagtaacagttcctggttggaagaattctcgatggaaagatcttctgaaaatacctacaaatcgagacgtagaagttaccactcctctctgcgcctgtccgctcatcggcttaactctgattctggtcacaagagcgatacacacaggagtggaggaagggaacggggccgtagcaaagagaggaagcatctgctctcccctgatgtgagcaggtgcaactctgaagaacgtgggacccaggctgactgggaatctcctgagcgtcgccagagcaggtcaccatccgagggccggtcccagacaccaaaccggcaaggcaccggcagcttaagcgagagctctattccctctgtaagtgacacatcaacgcccagacggtctcgccgccagttgccccctgtgcccccgaagccgcggcccctcctttcctatagcagtctgataagacacgccggctctatatctccccccgctgacggctctgaagagggatcacccctgacatcacaggccctggaatccaacaacgcctgtttgacagagagcagcaatagtccccaccctcagcagtcacagcacgcctctccccaaagatacatcagtgagccttacctcgcccttcacgaggactcgcacgcctcggactgcggggaggaagagacgttaacatttgaagcagccgttgcaacatccctcggaagatctaacactatcggttctgccccacccctgcgccatagctggcaaatgcccaacggacattaccggaggcggagaaggggcggaccaggcccaggaatgatgtgtggcgcagtcaataatttgctgtcagacaccgaagaggatgacaaatgctag

SEQ ID NO: 82089 - DNA, 6942 bp, Artificial Sequence
  derived and/or modified sequence
atggcaagattcggggaggctgttgtggcccggcccggcagcggggacggggattcagaccagagccgcaatcggcagggcacgccagtgcccgctagcgggcaggccgccgcgtacaagcaaacaaaggcgcaacgggcccgaaccatggctctgtataatcctattccggtgcggcagaactgcttcacagtgaataggagtctgtttatcttcggcgaagacaatatcgtgaggaaatacgccaagaagctcatcgactggccacctttcgagtatatgatattggctacgattattgccaactgcatcgttctagctctggaacagcacttgcccgaagacgataagactccaatgtctcggaggttggagaagactgaaccctatttcatcggaattttctgctttgaggccggaatcaaaatagtggcgcttggatttatatttcacaagggttcttatcttaggaatggctggaacgttatggattttattgtggtgttaagtggcattctggccaccgcgggtacccactttaacacccatgtcgacctgaggacgttaagggctgttcgtgtgttaaggccattaaagttggtctctgggatcccaagtctacaaatcgtgctgaagtcgataatgaaagcgatggtgccgctcctgcagataggtctactcctattcttcgcgattctgatgttcgccatcatagggcttgagttttattccggcaagttgcaccgagcctgcttcatgaacaattcaggtattttggaaggttttgatccgcctcacccctgtggggttcaaggttgccccgctggatacgagtgcaaggattggatcggacctaacgacgggattacacagttcgacaacatcctgttcgccgtgctgactgtatttcagtgcattaccatggagggttggaccactgttctgtataacaccaatgacgcactgggagccacgtggaactggctatacttcattccactgattatcattggcagcttctttgtcctgaatttggtcctgggagtcctatccggagaattcgcgaaagagagagagcgcgtcgagaacagacgggcattcatgaagctgagacgtcaacagcagatcgaaagggagctgaatgggtaccgcgcctggatagataaggcagaagaggtgatgctggctgaggagaataaaaatgcaggaactagcgctttggaggtgctcaggcgtgcaaccataaagcgcagtcgtacagaggcaatgacaagagatagttccgatgaacactgtgtggacatctcctccgtgggcacccctttagcacgggcgtctataaagtcagctaaggtcgacggggtgtcttactttcgccataaagagagactcttgcgcatcagcatccgacatatggtcaaatctcaggtgttctattggattgtgctgagtctggtcgcactgaataccgcctgcgttgctattgtgcaccacaatcaaccccagtggctgacccacctgctctattacgcagagttcctcttcctgggcctgttcctattggagatgagtctaaagatgtatggaatggggcctcgactctatttccattcctcctttaactgcttcgatttcggggttaccgtcgggtctatctttgaagtggtgtgggctatctttcgacccgggacctctttcggcatttccgtcctccgcgcactccgcttactgagaatctttaagataactaagtactgggcgtccctgaggaacctagtagtgtcccttatgagctcaatgaaaagcataatatcactgctgttccttttatttctgttcatcgtggtgttcgcgctgcttggcatgcagttattcggaggccggtttaacttcaacgatggcacaccctccgcgaatttcgatacctttccagctgctatcatgactgtgtttcagatccttacaggtgaagactggaacgaggtgatgtataacggcattagaagccaaggcggcgtcagtagcggaatgtggagcgctatctacttcatagttttgactttattcgggaattataccctgcttaatgtctttttggccattgccgtcgataaccttgcgaacgcccaggaactgacaaaggacgaacaggaagaggaagaggcttttaaccagaaacatgcactacagaaggccaaggaggtctccccaatgtcagcccccaacatgccttctatcgaaagggataggcgccggcgccatcacatgtccatgtgggagcctaggagctctcatctccgtgagcggaggcgcaggcatcacatgtcggtctgggagcagcggacatcccaacttcggaagcatatgcaaatgtctagccaagaggctctgaatcgggaggaggctccaacaatgaaccccctgaaccccctgaaccccctttctagtctgaacccactgaacgctcacccatccctgtatcggagacctagggcaatcgaagggcttgccctgggactggctcttgagaaatttgaggaagaacggatcagtcgcgggggtagcctcaaaggcgatggcggcgatagatcttccgcactggacaaccagagaactcctctgagcctcgggcagagggagcccccctggctggctcgtccttgccacggcaactgtgaccctacccaacaagaggctggcggaggcgaggcggtggtgacctttgaagacagagcccgtcatcgacagtcacagcgcaggtctcggcaccgccgcgtgcgcaccgaggggaaggaaagcagctccgctagcaggagtcgctctgctagtcaagaacggtccttggacgaggcaatgcccaccgagggagaaaaggatcatgagctgcgagggaatcatggcgctaaagaacccaccatccaggaggaaagggcccaagatttgaggcgcaccaactccctcatggttagccgaggcagtggattagcagggggcctagatgaagcagacacccctctggtgcttccgcacccagaattggaggtggggaagcatgtcgtgcttacagagcaagagcccgaaggctcctctgagcaggcactgctgggaaacgtacagctggatatgggcagggtgatttctcagagcgagccagatctaagctgtatcacagcaaacacggacaaggcaactacagaaagcactagcgtgactgtagccatcccagacgtggatccgctcgtagactcaaccgtcgtgcacatctccaacaagactgacggggaggcgtctccgctaaaggaagccgaaataagggaagatgaggaggaagtcgagaaaaagaagcagaagaaggaaaagagagaaaccggtaaagctatggtccctcatagctccatgttcatcttttcgactacgaaccccatccgccgagcctgccattatatcgttaacctgcgttacttcgagatgtgcatccttctggtaattgccgcttcatctatcgcactggccgctgaggaccccgtgctcaccaattctgaacggaacaaagtgctgagatactttgattatgtgtttaccggcgtgtttacctttgaaatggtgatcaagatgatagatcagggactgatattgcaggacggatcctatttccgcgacctgtggaatattcttgacttcgtggtggtcgtgggggcccttgttgcctttgcactcgctaacgcccttggcactaacaagggtagggacatcaagactatcaagtcccttcgagtgcttcgtgtattgcggccattaaagaccattaaacgcctcccaaagctgaaggcggtcttcgattgcgtcgtaacctcgctgaagaatgtgtttaacattctgattgtctacaagctctttatgttcatctttgctgttatagctgtacaattgtttaaaggaaaattcttttattgtacggacagttcgaaggacactgagaaggagtgcattggaaattacgtggatcacgagaaaaacaagatggaagtgaaaggcagagaatggaagagacatgaattccactacgataacatcatctgggcccttttgaccctgttcaccgtgtccactggagaggggtggcctcaggtgctccagcattccgtggacgtaacagaagaagatcgagggccctcgagatccaaccgaatggagatgagcattttctatgtcgtgtattttgtcgtcttcccgttttttttcgttaacatatttgtggcacttatcattatcacctttcaggagcaaggcgataaaatgatggaggaatgctccctggagaaaaatgaaagggcctgcatcgatttcgccatctctgccaagcctctgaccaggtatatgccccagaacagacacacctttcagtatagggtatggcattttgtggttagcccaagcttcgagtataccattatggccatgatagccctgaataccgtggtgctgatgatgaaatattatagcgcgccatgtacatatgagctggccttgaagtacctcaacatcgcatttacaatggtgttttcattggaatgtgtgctcaaggtaatcgcttttgggttcctaaactattttagagatacttggaatatcttcgattttatcaccgtgattggttccattacagaaatcattttgactgactcaaagttggtgaatacttctggattcaatatgagctttttgaaactgttccgagcagcgcgactcataaagctgttgcggcaggggtacacaatccggatcctcctgtggacattcgtgcagagcttcaaggcactgccttacgtgtgtctactgatcgccatgctgttctttatttacgctattattggcatgcaggtgttcggtaatataaagctggacgaagagtcacacatcaatcgacacaataacttcagaagtttcttcggatccctcatgcttctcttccgcagcgcaactggcgaagcctggcaggagattatgttgagctgcttgggtgagaagggttgtgagcccgacaccaccgccccgagtggccagaatgagaacgagcggtgcggtacagatcttgcatacgtttattttgtgagcttcatttttttctgcagtttcttgatgttgaacctgttcgtcgcagttatcatggataacttcgagtatctgaccagggattctagtatcctgggcccacaccacctggacgagttcgtgcgggtttgggccgaatacgaccgggccgcctgtgggcgcattcactacactgagatgtatgaaatgcttaccctaatgtcgccccccctagggctgggcaaacgctgtccaagtaaggtggcttacaaacggctcgtcctcatgaacatgccagtggccgaagatatgaccgtacactttacatccacgttaatggctctgatccgaactgcattggacatcaagattgcgaagggtggggcggatcgccagcagctggattcagagttgcagaaggagaccttggcaatatggccccatctgagtcagaagatgttggaccttctcgtgcccatgccgaaggccagcgatctcactgtggggaaaatctacgcagctatgatgatcatggattattataagcaaagcaaggttaaaaagcagaggcagcagctagaagagcagaaaaatgctccgatgtttcagcgcatggagcctagttctttgccgcaggaaattatagccaatgcaaaggccctgccctatctacagcaggatccggtgtctgggctgtccggcaggtcaggctacccaagcatgagtccactctctccccaggacatcttccagctagcttgtatggacccagctgacgatggacaatttcaggaaagacagagtctggagccagaggtctctgagctcaagtccgtccagcctagcaaccatggaatttacctgccgagtgatacacaggaacatgctgggagtggaagggccagttcaatgccgcggctgacagtagacccccaggtcgtcactgacccaagcagcatgcgccgcagtttctccactatcagagacaaaaggtcaaactctagttggctggaggaattcagtatggagcgctcttccgagaacacgtataaaagccgacggagaagctatcacagctcccttcgcctgtctgcccataggttgaactccgattcagggcacaaatccgacactcatcgcagtgggggaagagagagggggcgtagcaaggaacgcaaacacctgctgtcacccgatgtgagtcgttgtaacagcgaagaacgtggcacgcaggccgattgggaatcacctgaacggcgtcagtcgagaagtccaagcgaaggccgctcccaaactcccaataggcaaggaacaggatccttgtctgagtcttcgattccttccgttagcgacacctctactcccaggcgctctcggagacagttacctcccgtccctccaaagcctcggccgctgctatcctattcaagcctgattcgtcacgcagggagtatttcccccccagcagatggaagcgaggaggggagcccactcactagccaagcacttgaaagcaacaatgcatgtttgaccgagtcttcaaactccccacaccctcagcagagccagcacgcctccccacaacgctacatttctgagccatatctggcccttcatgaggactcgcatgccagtgattgcggagaagaggaaaccctgaccttcgaggcagctgtggccacctctctcggtcgctccaatactataggctctgctcctccactgagacacagctggcagatgcctaacggacactaccgccggagacgtcgcggcgggccaggccctggcatgatgtgtggcgcagttaacaacttgttaagcgataccgaggaagacgataagtgttag

SEQ ID NO: 82090 - DNA, 6795 bp, Artificial Sequence
  derived and/or modified sequence
atggccctgtacaaccccatccctgtgcggcagaactgcttcaccgtgaacagaagcctcttcatctttggagaggacaacatcgtgaggaaatatgccaagaagctgattgactggcccccatttgagtacatgatcctggccaccatcatcgccaactgcatcgtgctggccctggagcagcacctgcctgaagatgacaagacccccatgagccggcggctggagaagacagagccctacttcatcggcatcttctgctttgaggccggcatcaagatcgtggccctgggcttcatcttccacaagggcagctacctgagaaatggctggaatgtgatggacttcatcgtggtgctgagcggcatcctggccacagctggcacccacttcaacacccacgtggacctgcggaccctgcgggctgtgcgggtgctgcggcccctgaagctggtgtctggcatccccagcctgcagatcgtgctgaagagcatcatgaaggccatggtgcccctgctgcagatcggcctgctgctcttctttgccatcctgatgtttgccatcatcggcctggagttctacagcggcaagctgcaccgggcctgcttcatgaacaacagcggcatcctggagggctttgatcctccccacccctgtggggtgcagggctgcccagctggctatgagtgcaaggactggattggccccaatgatggcatcacccagtttgacaacatcctgtttgctgtgctgaccgtcttccagtgcatcaccatggagggctggaccaccgtgctgtacaacaccaatgatgccctgggcgccacctggaactggctgtacttcatccccctcatcatcatcggcagcttctttgtgctgaacctggtgctgggcgtgctgagcggggagtttgccaaggagcgggagcgggtggagaacagaagagccttcatgaagctgcggcggcagcagcagatcgagcgggagctgaatggctaccgggcctggattgacaaggccgaggaggtgatgctggccgaggagaacaagaatgccggcaccagcgccctggaggtgctgcggcgggccaccatcaagaggagcaggacagaggccatgacccgggacagcagtgatgagcactgtgtggacatcagctctgtgggcacccccctggcccgggccagcatcaagagcgccaaggtggatggagtgtcctacttccgccacaaggagcggctgctgcgcatcagcatccgccacatggtgaagagccaggtgttctactggatcgtgctgagcctggtggccctgaacacagcctgtgtggccatcgtgcaccacaaccagccccagtggctgacccacctgctgtactatgcagagttcctgttcctgggcctcttcctgctggagatgagcctgaagatgtatggcatgggcccccggctgtacttccacagcagcttcaactgctttgattttggagtgacagtgggcagcatctttgaggtggtgtgggccatcttccggcccggcaccagctttggcatctctgtgctgcgggccctgcggctgctgcgcatcttcaagatcaccaagtactgggccagcctgaggaacctggtggtgtccctgatgagctccatgaagagcatcatcagcctgctcttcctgctcttcctgttcatcgtggtgtttgccctgctgggcatgcagctgtttggaggccgcttcaacttcaatgatggcacccccagcgccaactttgacaccttccctgctgccatcatgaccgtcttccagatcctgaccggggaggactggaatgaggtgatgtacaacggcatccgcagccagggcggcgtgagcagcggcatgtggagcgccatctacttcatcgtgctgaccctgtttggaaactacaccctgctgaatgtgttcctggccatcgctgtggacaacctggccaatgcccaggagctgaccaaggatgagcaggaggaggaggaggccttcaaccagaagcacgccctgcagaaggccaaggaggtgagccccatgtctgcccccaacatgcccagcattgagcgggacagaagaagaagacaccacatgtccatgtgggagcccaggagcagccacctgcgggagaggagaagaagacaccacatgtctgtgtgggagcagaggaccagccagctgaggaagcacatgcagatgagcagccaggaggccctgaaccgggaggaggcccccaccatgaaccccctgaaccccctgaaccccctgagcagcctgaaccccctgaatgcccaccccagcctgtacagaagaccccgggccatcgagggcctggccctgggcctggccctggagaagtttgaggaggagcgcatcagccggggcggcagcctgaagggagatggaggagacaggagcagcgccctggacaaccagaggacccccctgagcctgggccagcgggagcccccctggctggcccggccctgccacggcaactgtgaccccacccagcaggaggccggcggcggggaggccgtggtgacctttgaggaccgggcccggcaccggcagagccagaggaggagccgccacagaagagtgaggacagagggcaaggagagcagcagcgccagccgcagccgcagcgccagccaggagaggagcctggatgaggccatgcccacagaaggagagaaggaccacgagctgcggggcaaccacggggccaaggagcccaccatccaggaggagcgggcccaggacctgcggaggaccaacagcctgatggtgtcccggggcagcggcctggccggcggcctggatgaagctgacacccccctggtgctgccccaccctgagctggaggtgggcaagcacgtggtgctgacagagcaggagcctgagggcagcagcgagcaggccctgctgggcaatgtgcagctggacatgggccgggtcatcagccagagcgagccagacctgagctgcatcacagccaacacagacaaggccaccacagagagcacctctgtgacagtggccatcccagatgtggaccccctggtggacagcacagtggtgcacatcagcaacaagacagatggagaggccagccccctgaaggaggccgagatcagagaagatgaggaggaggtggagaagaagaagcagaagaaggagaagcgggagaccgggaaggccatggtgccccacagctccatgttcatcttcagcaccaccaaccccatccggcgggcctgccactacatcgtgaacctgcgctactttgagatgtgcatcctgctggtgattgctgccagcagcatcgccctggccgctgaggaccctgtgctgaccaacagcgagaggaacaaggtgctgcgctactttgattatgtgttcaccggggtcttcacctttgagatggtgatcaagatgattgaccagggcctcatcctgcaggacggcagctacttccgggacctgtggaacatcctggactttgtggtggtggtgggcgccctggtggcctttgccctggccaacagcatgaagaccaacaagggccgggacatcaagaccatcaagagcctgcgggtgctgcgggtgctgcggcccctgaagaccatcaagaggctgcccaagctgaaggctgtgtttgactgtgtggtgaccagcctgaagaatgtgttcaacatcctgattgtgtacaagctgttcatgttcatctttgctgtgattgctgtgcagctgttcaagggcaagttcttctactgcacagacagcagcaaggacacagagaaggaatgtattggcaactacgtggaccacgagaagaacaagatggaggtgaagggccgggagtggaagagacatgagttccactatgacaacatcatctgggccctgctgaccctcttcaccgtgtccactggagagggctggccccaggtgctgcagcacagcgtggatgtgacagaggaggaccggggccccagccgcagcaacaggatggagatgagcatcttctacgtggtgtactttgtggtgttccccttcttctttgtgaacatctttgtggccctgatcatcatcaccttccaggagcagggcgacaagatgatggaggagtgcagcctggagaagaatgaaagagcctgcatcgactttgccatcagcgccaagcccctgacccgctacatgccccagaacagacacaccttccagtacagagtgtggcactttgtggtgagccccagctttgagtacaccatcatggccatgattgccctgaacacagtggtgctgatgatgaagtactacagcgccccctgcacctatgagctggccctgaagtacctgaacatcgccttcaccatggtgttcagcctggagtgtgtgctgaaggtgattgccttcggcttcctgaactacttccgggacacctggaacatctttgacttcatcaccgtcatcggcagcatcacagagatcatcctgacagacagcaagctggtgaacaccagcggcttcaacatgtccttcctgaagctgttccgggccgcccggctcatcaagctgctgcggcagggctacaccatccgcatcctgctgtggacctttgtgcagagcttcaaggccctgccctacgtgtgcctgctgattgccatgctgttcttcatctatgccatcatcggcatgcaggtgtttggaaacatcaagctggatgaggagagccacatcaacagacacaacaacttccgctccttcttcggcagcctgatgctgctcttccgcagcgccaccggggaggcctggcaggagatcatgctgagctgcctgggggagaagggctgtgagccagacaccacagcccccagcggccagaatgaaaatgaaagatgtggcacagacctggcctacgtgtactttgtgtccttcatcttcttctgcagcttcctgatgctgaacctgtttgtggccgtcatcatggacaactttgagtacctgacccgggacagcagcatcctgggcccccaccacctggatgaatttgtgcgggtgtgggccgagtatgacagagctgcctgtggccgcatccactacacagagatgtatgagatgctgaccctgatgagcccccccctgggcctgggcaagcgctgccccagcaaggtggcctacaagaggctggtgctgatgaacatgcctgtggccgaggacatgacagtgcacttcaccagcaccctgatggccctgatcagaacagccctggacatcaagatcgccaagggcggcgctgaccggcagcagctggacagcgagctgcagaaggagaccctggccatctggccccacctgagccagaagatgctggacctgctggtgcccatgcccaaggccagtgacctgactgtgggcaagatctatgctgccatgatgatcatggactactacaagcagagcaaggtgaagaagcagaggcagcagctggaggagcagaagaatgcccccatgttccagaggatggagcccagcagcctgccccaggagatcatcgccaatgccaaggccctgccctacctgcagcaggaccctgtgtctggcctgagcggccgcagcggctaccccagcatgagccccctgagcccccaggacatcttccagctggcctgcatggaccctgcagatgatggccagttccaggagcggcagagcctggagcctgaggtgtctgagctgaagtctgtgcagcccagcaaccacggcatctacctgcccagcgacacccaggagcacgccggcagcggccgggccagctccatgccccggctgactgtggacccccaggtggtgacagaccccagctccatgagaagaagcttcagcaccatccgggacaagaggagcaacagctcctggctggaggagttctccatggagaggagcagcgagaacacctacaagagcagaagaagaagctaccacagcagcctgcggctgagcgcccaccggctgaacagcgacagcggccacaagagtgacacccacaggtctgggggccgggagcggggccgcagcaaggagaggaagcacctgctgagcccagatgtgagccgctgcaacagcgaggagcggggcacccaggccgactgggagagccctgagcggcggcagagccgcagccccagcgagggccgcagccagacccccaaccggcagggcaccggcagcctgtctgagagcagcatccccagcgtgtctgacaccagcaccccccggcgcagccggcggcagctgccccctgtgccccccaagccccggcccctgctgagctacagcagcctcatcagacatgctggcagcatcagccccccagcagatggcagcgaggagggcagccccctgaccagccaggccctggagagcaacaatgcctgcctgacagagagcagcaacagcccccacccccagcagagccagcacgccagcccccagcgctacatcagcgagccctacctggccctgcacgaggacagccacgccagtgactgtggggaggaggagaccctgacctttgaagctgctgtggccaccagcctgggccgcagcaacaccatcggcagcgccccacccctgcggcacagctggcagatgcccaacggccactacagaagaagaagaagaggaggccctggccctggcatgatgtgtggggctgtgaacaacctgctgagtgacacagaggaggatgacaagtgctag

SEQ ID NO: 82091 - DNA, 6942 bp, Artificial Sequence
  derived and/or modified sequence
atggccaggtttggagaggccgtggtggcccggcccggcagcggagatggagacagcgaccagagcaggaaccggcagggcacccctgtgcctgccagcggccaggccgccgcctacaagcagaccaaggcccagagggcccggaccatggccctgtacaaccccatccctgtgcggcagaactgcttcaccgtgaacagaagcctcttcatctttggagaggacaacatcgtgaggaaatatgccaagaagctgattgactggcccccatttgagtacatgatcctggccaccatcatcgccaactgcatcgtgctggccctggagcagcacctgcctgaagatgacaagacccccatgagccggcggctggagaagacagagccctacttcatcggcatcttctgctttgaagctggcatcaagatcgtggccctgggcttcatcttccacaagggcagctacctgagaaatggctggaatgtgatggacttcatcgtggtgctgagcggcatcctggccacagctggcacccacttcaacacccacgtggacctgcggaccctgcgggctgtgcgggtgctgcggcccctgaagctggtgtctggcatccccagcctgcagatcgtgctgaagagcatcatgaaggccatggtgcccctgctgcagatcggcctgctgctcttctttgccatcctgatgtttgccatcatcggcctggagttctacagcggcaagctgcaccgggcctgcttcatgaacaacagcggcatcctggagggctttgaccccccccacccctgtggggtgcagggctgcccagctggctatgagtgcaaggactggattggccccaatgatggcatcacccagtttgacaacatcctgtttgctgtgctgactgtgttccagtgcatcaccatggagggctggaccaccgtgctgtacaacaccaatgatgccctgggcgccacctggaactggctgtacttcatccccctcatcatcatcggcagcttctttgtgctgaacctggtgctgggcgtgctgtctggagaatttgccaaggagcgggagcgggtggagaacagaagagccttcatgaagctgcggcggcagcagcagatcgagcgggagctgaatggctaccgggcctggattgacaaggccgaggaggtgatgctggccgaggagaacaagaatgccggcaccagcgccctggaggtgctgcggcgggccaccatcaagaggagcaggacagaggccatgacccgggacagcagtgatgagcactgtgtggacatcagctctgtgggcacccccctggcccgggccagcatcaagagcgccaaggtggatggagtgtcctacttccgccacaaggagcggctgctgcgcatcagcatccgccacatggtgaagagccaggtgttctactggatcgtgctgagcctggtggccctgaacacagcctgtgtggccatcgtgcaccacaaccagccccagtggctgacccacctgctgtactatgcagagttcctgttcctgggcctcttcctgctggagatgagcctgaagatgtatggcatgggcccccggctgtacttccacagcagcttcaactgctttgattttggagtgacagtgggcagcatctttgaggtggtgtgggccatcttccggcccggcaccagctttggcatctctgtgctgcgggccctgcggctgctgcgcatcttcaagatcaccaagtactgggccagcctgaggaacctggtggtgtccctgatgagctccatgaagagcatcatcagcctgctcttcctgctcttcctgttcatcgtggtgtttgccctgctgggcatgcagctgtttggaggccgcttcaacttcaatgatggcaccccatctgccaactttgacaccttccctgctgccatcatgacagtgttccagatcctgactggagaggactggaatgaggtgatgtacaacggcatccgcagccagggcggcgtgagcagcggcatgtggagcgccatctacttcatcgtgctgaccctgtttggaaactacaccctgctgaatgtgttcctggccatcgctgtggacaacctggccaatgcccaggagctgaccaaggatgagcaggaggaggaggaggccttcaaccagaagcacgccctgcagaaggccaaggaggtgagccccatgtctgcccccaacatgcccagcattgaaagagacagaagaagaagacaccacatgtccatgtgggagcccaggagcagccacctgcgggagaggagaagaagacaccacatgtctgtgtgggagcagaggaccagccagctgaggaagcacatgcagatgagcagccaggaggccctgaaccgggaggaggcccccaccatgaaccccctgaaccccctgaaccccctgagcagcctgaaccccctgaatgcccaccccagcctgtaccgccggccccgggccatcgagggcctggccctgggcctggccctggagaagtttgaggaggagcgcatcagcagaggaggcagcctgaagggagatggaggagacaggagcagcgccctggacaaccagaggacccccctgagcctgggccagcgggagcccccctggctggcccggccctgccacggcaactgtgaccccacccagcaggaggccggcggcggggaggccgtggtgacctttgaagatcgggcccggcaccggcagagccagaggaggagccgccaccggcgggtgaggacagagggcaaggagagcagcagcgccagccgcagccgcagcgccagccaggagaggagcctggatgaggccatgcccacagaaggagagaaggaccacgagctgcggggcaaccacggggccaaggagcccaccatccaggaggagcgggcccaggacctgcggaggaccaacagcctgatggtgtcccggggcagcggcctggccggcggcctggatgaggccgacacccccctggtgctgccccaccctgagctggaggtgggcaagcacgtggtgctgacagagcaggagcctgagggcagcagcgagcaggccctgctgggcaatgtgcagctggacatgggccgggtcatcagccagagcgagccagacctgagctgcatcacagccaacacagacaaggccaccacagagagcacctctgtgacagtggccatcccagatgtggaccccctggtggacagcacagtggtgcacatcagcaacaagacagatggagaggccagccccctgaaggaggccgagatccgggaggatgaggaggaggtggagaagaagaagcagaagaaggagaagcgggagaccgggaaggccatggtgccccacagctccatgttcatcttcagcaccaccaaccccatcagaagagcctgccactacatcgtgaacctgcgctactttgagatgtgcatcctgctggtgattgctgccagcagcatcgccctggccgcagaagatcctgtgctgaccaacagcgagaggaacaaggtgctgcgctactttgattatgtgttcaccggggtcttcacctttgagatggtgatcaagatgattgaccagggcctcatcctgcaggacggcagctacttccgggacctgtggaacatcctggactttgtggtggtggtgggcgccctggtggcctttgccctggccaatgccctgggcaccaacaagggccgggacatcaagaccatcaagagcctgcgggtgctgcgggtgctgcggcccctgaagaccatcaagaggctgcccaagctgaaggctgtgtttgactgtgtggtgaccagcctgaagaatgtgttcaacatcctgattgtgtacaagctgttcatgttcatctttgctgtgattgctgtgcagctgttcaagggcaagttcttctactgcacagacagcagcaaggacacagagaaggagtgcatcggcaactacgtggaccacgagaagaacaagatggaggtgaagggccgggagtggaagagacatgagttccactatgacaacatcatctgggccctgctgaccctcttcaccgtgtccactggagagggctggccccaggtgctgcagcacagcgtggatgtgacagaagaagatcggggccccagccgcagcaacaggatggagatgagcatcttctacgtggtgtactttgtggtgttccccttcttctttgtgaacatctttgtggccctgatcatcatcaccttccaggagcagggcgacaagatgatggaggagtgcagcctggagaagaatgaaagagcctgcatcgactttgccatcagcgccaagcccctgacccgctacatgccccagaacagacacaccttccagtacagagtgtggcactttgtggtgagccccagctttgagtacaccatcatggccatgattgccctgaacacagtggtgctgatgatgaagtactacagcgccccctgcacctatgagctggccctgaagtacctgaacatcgccttcaccatggtgttcagcctggagtgtgtgctgaaggtgattgccttcggcttcctgaactacttccgggacacctggaacatctttgacttcatcaccgtgattggcagcatcacagagatcatcctgacagacagcaagctggtgaacaccagcggcttcaacatgtccttcctgaagctgttccgggccgcccggctcatcaagctgctgcggcagggctacaccatccgcatcctgctgtggacctttgtgcagagcttcaaggccctgccctacgtgtgcctgctgattgccatgctgttcttcatctatgccatcatcggcatgcaggtgtttggaaacatcaagctggatgaggagagccacatcaacagacacaacaacttccgctccttcttcggcagcctgatgctgctcttccgcagcgccactggagaggcctggcaggagatcatgctgagctgcctgggggagaagggctgtgagccagacaccacagcccccagcggccagaatgaaaatgaaagatgtggcacagacctggcctacgtgtactttgtgtccttcatcttcttctgcagcttcctgatgctgaacctgtttgtggccgtcatcatggacaactttgagtacctgacccgggacagcagcatcctgggcccccaccacctggatgaatttgtgcgggtgtgggccgagtatgaccgggccgcctgtggccgcatccactacacagagatgtatgagatgctgaccctgatgagcccccccctgggcctgggcaagcgctgccccagcaaggtggcctacaagaggctggtgctgatgaacatgcctgtggccgaggacatgacagtgcacttcaccagcaccctgatggccctgatcagaacagccctggacatcaagatcgccaagggcggcgctgaccggcagcagctggacagcgagctgcagaaggagaccctggccatctggccccacctgagccagaagatgctggacctgctggtgcccatgcccaaggccagtgacctgactgtgggcaagatctatgctgccatgatgatcatggactactacaagcagagcaaggtgaagaagcagaggcagcagctggaggagcagaagaatgcccccatgttccagaggatggagcccagcagcctgccccaggagatcatcgccaatgccaaggccctgccctacctgcagcaggaccctgtgtctggcctgagcggccgcagcggctaccccagcatgagccccctgagcccccaggacatcttccagctggcctgcatggaccctgcagatgatggccagttccaggagcggcagagcctggagcctgaggtgtctgagctgaagtctgtgcagcccagcaaccacggcatctacctgcccagcgacacccaggagcacgccggcagcggccgggccagctccatgccccggctgactgtggacccccaggtggtgacagaccccagctccatgaggaggagcttcagcaccatccgggacaagaggagcaacagctcctggctggaggagttctccatggagaggagcagcgagaacacctacaagagcagaagaagaagctaccacagcagcctgcggctgagcgcccaccggctgaacagcgacagcggccacaagagtgacacccacaggtctgggggccgggagcggggccgcagcaaggagaggaagcacctgctgagcccagatgtgagccgctgcaacagcgaggagcggggcacccaggccgactgggagagccctgagcggcggcagagccgcagccccagcgagggccgcagccagacccccaaccggcagggcaccggcagcctgtctgagagcagcatccccagcgtgtctgacaccagcaccccaagaagaagccggcggcagctgccccctgtgccccccaagccccggcccctgctgagctacagcagcctcatcagacatgctggcagcatcagccccccagcagatggcagcgaggagggcagccccctgaccagccaggccctggagagcaacaatgcctgcctgacagagagcagcaacagcccccacccccagcagagccagcacgccagcccccagcgctacatcagcgagccctacctggccctgcacgaggacagccacgccagtgactgtggggaggaggagaccctgacctttgaggccgctgtggccaccagcctgggccgcagcaacaccatcggcagcgccccacccctgcggcacagctggcagatgcccaacggccactacagaagaagaagaagaggaggccctggccctggcatgatgtgtggggctgtgaacaacctgctgagtgacacagaagaagatgacaagtgctag

SEQ ID NO: 82092 - DNA, 6795 bp, Artificial Sequence
  derived and/or modified sequence
atggccctgtacaaccccatccccgtgcggcagaactgcttcaccgtcaaccggtcactgttcatctttggagaagataatatagtccgtaagtacgcaaagaaactaatcgactggccacccttcgaatacatgattctggcaacgatcattgcaaattgtatcgtcctggccctggaacagcatcttcctgaggatgacaaaacacccatgtcgaggaggcttgagaagaccgagccctacttcattggtatcttttgcttcgaggcaggcatcaagattgtcgccctcgggtttatctttcacaaggggtcatatctgcgcaatgggtggaacgtgatggatttcattgtcgtgttatctggaatcctggccacggccggaactcatttcaacacccacgtggatctccgcacacttcgggccgtgagggtcctgcgacccctgaagttggtgagtggtataccaagcctccaaatcgtattgaagtctattatgaaagccatggtgccgctgttgcagattggcttgctgctcttctttgctattcttatgttcgccattatagggctagaattttactcaggcaagctgcatagggcctgttttatgaacaacagcgggattctcgaggggttcgatccccctcatccctgcggggtccagggttgtcctgcaggttacgagtgcaaggattggatcggccccaatgatgggatcacacagtttgataacatcctgtttgccgtcttaacagtgtttcagtgtatcaccatggaaggctggacaaccgtgctctacaacacaaatgatgctctgggggcaacgtggaactggctgtactttatacccttaataatcatcgggagtttctttgttctgaatctggttttgggcgtactctccggagagttcgccaaggaacgggagcgcgtggaaaataggcgcgcttttatgaaattgagaagacagcagcagatcgagcgggagctcaatggataccgagcgtggatagataaggcggaagaagtcatgttagcggaagaaaataaaaacgccggcacttcagccctagaggttttgaggcgggcgaccatcaagcgatctaggacggaggctatgacacgtgatagcagcgacgaacactgcgtagacatttccagcgttggaacgccactggcccgggctagtatcaagtctgcaaaggtggacggggttagctacttcagacacaaggaacgcctgctgcgcatttcaatccgccatatggtgaagagccaggtattttactggatagtgctgagcctagttgcccttaatactgcttgcgtagcaattgttcaccataatcagccacagtggctcactcacctgctctattatgctgagttcttgttcctgggattgttcctgcttgagatgtccctgaaaatgtatggtatggggcctaggctctactttcacagctcatttaactgctttgacttcggagtgacagtgggctccatctttgaagtagtgtgggctatttttcgacctggcacatccttcgggatcagtgttctgagagccctgagactcctccgcattttcaaaatcactaaatattgggcctctctaaggaatctggttgtgtctctaatgtctagcatgaagtctattataagtctcctgttcctgctgttcttgttcatcgtggtatttgcattgctggggatgcagttgtttggcggccgattcaatttcaatgatggaacacccagcgcaaatttcgacacattccccgccgccataatgacggtctttcagattttaacaggggaagactggaatgaagtgatgtataacggaatcaggagccagggtggagtgtcctcgggcatgtggagtgctatttactttattgtgctcaccctgttcggcaattatacccttttgaatgtgtttttggcaatcgctgtggacaacctagccaacgcgcaagaactgactaaggacgagcaggaggaggaggaggcattcaaccaaaagcacgccttacagaaagctaaggaagttagccctatgagcgctcctaatatgccgtccatagaaagagaccggaggcgtcgacatcatatgtccatgtgggagccacgatctagtcacctaagagaacgcaggcgccggcaccacatgtccgtctgggaacagagaacctcccaactcaggaagcacatgcagatgagtagccaggaagccctgaaccgggaagaggctccaaccatgaaccctctcaacccgctgaaccccctgtcatcgctgaacccactgaacgcccaccccagtctgtataggcgccccagggccatcgaagggttggctctcgggctcgcactagagaagttcgaggaggagcgcatctcccgagggggatcactaaaaggggacggcggagaccggtcatccgcactagacaatcagagaacaccactctctttaggccagcgggagcccccttggctggctcgcccatgccatgggaactgcgaccccacacagcaggaagccggcggaggcgaagctgtcgtcacctttgaggatagagctagacacagacagtcccaacgacggtcccgccatcggcgagtgagaacagaagggaaggagagcagtagcgcttcccggtcaaggtcagcaagccaggaaagaagccttgatgaggcaatgcccactgaaggggagaaggatcacgaattacgggggaaccatggggcaaaagagcctaccattcaggaagagagagctcaagacctccgaaggactaactccctcatggtttcacgcggcagtggcctggctggcgggttggatgaagccgatactcccctagtgctgcctcatccagagctagaggttggaaagcatgttgttctgacagagcaggagcctgaggggtcgtcggaacaagctctgctaggaaacgtacaactggatatgggtcgggtgatctcacagtcggagccagacctgtcgtgcattacggcaaataccgacaaggcgacaactgagtccacaagtgtgacagtcgcaatccctgatgtggacccactggtggacagcactgtggttcacatttctaacaagaccgacggagaggcttctcccctgaaggaggctgagattagggaagatgaggaagaggtagagaaaaagaaacagaaaaaggaaaaaagggagaccggcaaagcaatggtcccacatagcagtatgtttatcttctcgaccaccaaccctatacgccgcgcctgtcactacatagtaaacctgcgctactttgagatgtgtatcctccttgttattgcagcttcatcaatcgcccttgccgctgaagacccggtgctgacgaactcagaaaggaacaaggtccttagatactttgactatgtgttcacaggagtgttcaccttcgaaatggtaattaaaatgatcgaccagggcctgatacttcaagacggttcttacttccgggacctctggaatattttagactttgtggtggtagtcggagctctggtcgccttcgccctggccaattctatgaaaacaaataaagggcgcgatataaagaccattaagagcctgagagtactgcgagtgctcagacctctcaaaacaatcaaacggctcccaaaactcaaggctgtgttcgactgtgtagtgacctccctgaagaatgtgttcaacattctgattgtctacaagcttttcatgttcattttcgccgttatcgcggtacagctttttaaaggcaagtttttttattgcacggatagcagtaaggacacggaaaaggagtgtattggaaattatgtcgaccacgagaagaacaaaatggaggtcaaagggcgggagtggaagagacatgagtttcattatgacaacattatatgggccctgctcaccctcttcactgtctccaccggggaagggtggcctcaggtgttacagcattcagtcgatgtgaccgaggaagacaggggaccaagtagatctaacagaatggaaatgtcaattttctacgtagtatactttgttgttttccctttctttttcgtcaacatttttgttgctctgattattataactttccaggaacagggagacaaaatgatggaggaatgcagtcttgaaaaaaacgagcgagcttgcatagacttcgctatatctgcaaagccactcacacggtatatgcctcagaatcgacacacctttcagtatcgtgtctggcactttgttgtgtcaccatcattcgagtatacgatcatggcaatgatagccttgaatacggtcgtgctgatgatgaaatattacagcgcaccatgcacctacgagcttgctcttaagtatttaaacattgcctttacgatggtttttagtctggagtgtgtactcaaggtgatcgcttttggttttctaaactacttccgggacacctggaacatcttcgattttattacagtgattggaagtatcaccgaaatcatcttgactgacagcaaactggttaacactagcggctttaatatgagtttccttaaactatttcgggccgcacgcctcattaagcttctccgccaggggtataccattagaatcctgctgtggacattcgtacagtcatttaaagctctaccctacgtgtgcttgttaattgctatgctgtttttcatttatgctatcattggcatgcaggtttttggaaatatcaagttagacgaagagagccacataaatagacataataactttcgttcctttttcgggtctttgatgctactcttccgaagcgcaaccggcgaggcctggcaggagatcatgttgtcctgcctaggggagaaggggtgcgaaccggacacaacggccccttcaggccagaatgagaacgagaggtgtgggacagacctcgcctatgtctatttcgtcagctttatctttttttgcagctttctaatgctcaacctgtttgtggccgtaattatggataacttcgagtatctgaccagagattcctctattttaggaccccatcatctagatgagtttgtgcgggtgtgggcggagtacgacagagcagcatgcggcaggatacactacactgagatgtacgaaatgctgacactgatgtccccccctttgggtctcggaaaacgttgtccctctaaagtggcttataagcggcttgtgctcatgaacatgcccgtcgctgaggatatgaccgtccacttcacctccacacttatggctttgattaggacagccctggacatcaagattgccaaggggggagctgaccgacaacagctggacagtgaattacagaaagaaacgctggcaatctggccgcatctctcccaaaaaatgctagatctgctggtgcctatgcccaaggcgtcagatctgaccgtaggtaagatatatgcagcaatgatgataatggattactacaagcagtcaaaagtgaagaagcaacgccaacagctggaggaacagaagaacgcccctatgtttcagagaatggagcctagtagtcttcctcaggagatcattgctaacgctaaggcactaccttaccttcaacaagaccctgtgagtggcctcagcggaagaagcggttatccctctatgtcacccctctcccctcaggacatattccaactggcctgcatggacccggccgatgatggtcagttccaggaacggcagagtctagaacccgaggtgagtgaactaaagagcgtccaacccagcaaccacggcatctacctcccttccgacactcaggaacacgcaggcagcggtcgcgcttccagcatgccgcggttgacagtcgatccgcaggtggtgaccgatccttcgtccatgcgtagaagcttctccacaattcgcgataagcggtccaattcatcctggctggaggagttcagcatggaaaggtcgagcgaaaacacctacaagtctcgaagacgcagctatcactcctctctgagactctctgcgcataggctgaacagcgattccgggcataagagcgatacacacaggagtggtggccgtgagagaggccgatctaaggagcggaagcatctgctgagcccagacgtttcacgctgcaattctgaggagaggggaacgcaggctgactgggagtcccccgagcgtcggcagagccgatccccatccgagggtcgatcccaaacccctaatagacagggtactggcagtttgtcagagagcagtatcccttcggtatcggatacctctacacctagaaggagtaggaggcagctccctcccgtgccacccaagccaaggccattgctctcttattctagcttaattcgacatgctggctccatttctcctccagccgacggctcagaggagggctcgcccctgactagccaggccttggaaagcaacaacgcatgtctcaccgaatcaagcaattccccacacccacagcaatcacagcacgcgagtcctcagaggtacatcagcgaaccctacctggccctgcacgaggattcccacgcctcagattgcggcgaggaggaaaccctcaccttcgaggcagcagtggctacatcccttgggcgcagcaatacaatcgggtctgctccacctctccgccattcttggcagatgcctaatgggcattaccgacggagaagacgaggtggccccggtcctggcatgatgtgtggtgctgtgaacaacctcctcagcgacacggaagaagacgacaaatgctag

SEQ ID NO: 82093 - DNA, 6942 bp, Artificial Sequence
  derived and/or modified sequence
atggcccggttcggcgaggccgtggtggcccggcccggcagcggcgacggcgattccgaccagagcagaaaccgacaggggactcccgtgccggcaagtggccaggcagctgcctataagcagacgaaagctcagagagcacgcacaatggcgctgtacaaccctatacccgtaaggcagaattgttttacagtaaaccgcagcctgtttattttcggggaggacaacattgtgcgcaagtatgccaagaagctcatcgattggcctcccttcgagtacatgattctggctactataatcgcaaactgcatcgtgttggcccttgagcagcacctgcctgaagacgacaagacgcccatgtccaggcgcctcgagaagacagaaccgtatttcattggcattttttgctttgaggctggcatcaagattgttgccctgggcttcatattccataaaggttcttacctccgaaacggctggaacgttatggactttatagtcgtgctttccggaatcttggccaccgccggaacccacttcaacacccacgtggatctccgtactctgagggccgtccgcgtgttacggccactgaagctggtctctggcattccttccttgcagattgtgcttaagtctatcatgaaagcgatggttcctctgttgcagatcggcttgctgctgtttttcgccatcctgatgttcgccataatcgggctagaattctactccgggaagcttcatagagcctgtttcatgaacaactccggcatattggagggcttcgatcctccccacccgtgtggcgtccagggctgtcctgctggctacgaatgtaaggactggataggtcccaacgatggcatcacccagttcgataacattctttttgccgttctgaccgtcttccagtgtatcaccatggagggctggaccaccgtgctgtacaatactaacgacgccctgggcgccacctggaattggctttattttattcccttgatcatcatcggttctttcttcgtcctgaacttggtgctgggcgtgctgagcggagaatttgccaaggagagagagcgtgtggaaaatagacgggcgttcatgaagctgcgcaggcagcagcagatcgaaagagagcttaacggttaccgggcctggattgacaaggcagaagaggtgatgctggcagaagaaaacaagaacgctgggacatccgccctggaggtgctcagaagagcgaccatcaaaagaagccgaaccgaggcaatgacccgtgatagctccgacgagcactgtgtggacatcagtagtgttggcaccccactcgcccgcgcttcaatcaagagtgctaaagtggatggcgtgagctattttcggcacaaagaacgtttactgcgtatcagcattaggcatatggtgaaaagtcaggtattctattggattgtgctatccctggttgcactgaacactgcctgcgtggcgatagtccaccacaatcaacctcagtggcttacacaccttttgtactatgccgagtttctgtttctggggctttttttattagagatgtccttgaagatgtatggaatgggacccagactgtacttccacagctcttttaattgctttgattttggagtcactgtcggctcgatcttcgaggtggtttgggcaatctttagaccgggaacctcttttggaatctcagtgctccgcgcccttcgattactgcgcatttttaagatcactaaatattgggcttcacttcgcaatttagttgtatccctgatgagcagcatgaaatccatcatctccttgcttttcctactttttctgttcatagtggtgtttgccctgttgggcatgcagctttttggcggcagattcaattttaacgacggcacaccatccgcaaatttcgacacattccctgcggcgattatgactgtgtttcaaatcctgaccggtgaagactggaacgaggtgatgtacaacggcattagatcccagggaggcgtctccagtggaatgtggtccgctatctacttcattgtattgactctatttgggaactatacgctcctaaacgtttttttggcaatcgccgtggacaacctcgcgaacgctcaggagcttactaaggatgagcaagaggaagaggaagcattcaaccaaaagcacgctctgcagaaggctaaggaggtgagcccaatgagtgccccgaatatgccatccattgaacgcgaccggcgacgaaggcatcatatgagtatgtgggaacctaggtcatcacacctgcgggaacgacgaagaaggcatcacatgtccgtgtgggaacagaggacatctcagctaagaaaacacatgcagatgtcaagccaggaggcactcaacagggaggaggcgcctaccatgaatccactcaatccactaaaccccttatccagtttaaatcctctaaatgcacatcctagcctttacaggaggcctcgagcgatcgagggactggccctcggcctggccctggagaagtttgaggaggagcggataagccggggcggaagcctaaagggggacggcggggaccggagttcagctctcgataaccagagaaccccattaagtctgggtcagagggagcccccttggctggctagaccatgccacggaaactgtgatcccacccagcaggaggccggaggcggcgaagctgtggtaacctttgaagatcgcgcaaggcatcgacagtctcaacgccgatctaggcacagaagagttagaaccgagggtaaggaaagctcctccgcctcaagaagccggagtgcctcacaggagcgctcactcgacgaagcaatgcctacagagggcgagaaggaccatgagctgagaggtaaccatggggccaaagagccaacgatccaagaggaacgagcccaggatctgcgccggactaatagcctgatggttagtcgggggtctggtctggctggagggctggatgaagcggacacacccctggttctgcctcatcccgaactggaggtcgggaagcatgttgtgctcaccgagcaggaacccgaaggtagcagcgaacaggctctattgggtaacgtccagcttgatatgggtagggtgatcagtcagtcagagccagatctcagctgtattacagctaatacagataaggcaacgacagaatctacttcagtcacagtggccatccccgacgttgacccccttgtggatagcacagttgttcatatttcaaacaagaccgatggggaggcctccccattgaaggaggctgaaatacgggaggatgaggaggaggtggaaaagaagaagcagaaaaaagagaaaagagagaccggcaaggccatggtcccgcactcttcaatgttcatattctctacaaccaatcctataaggcgggcttgccactacattgtgaatctaaggtattttgagatgtgcatcctgctcgtgatcgccgctagcagcatagccctcgcggcagaggatcctgttctcactaattcggagcggaacaaagtgctccgctatttcgattatgtcttcacaggcgtgtttacctttgagatggttattaagatgatcgaccaggggcttatactgcaggacgggtcttatttccgcgatctgtggaacatcctggactttgtggtcgtggtaggcgccctggtcgcgtttgcattagcaaatgccctggggactaacaagggaagggacattaagacaatcaaatcgctgagggtgctcagggtcttaaggcccttgaagaccatcaaacggctgccaaagctgaaagcagtcttcgactgtgtcgtgacgagtcttaaaaatgttttcaacattctgatcgtgtacaaactcttcatgttcatctttgcagtgatcgccgtccaactatttaagggcaagttcttttattgcacagacagctctaaggatacagaaaaggagtgcattggcaattacgtcgaccacgagaaaaataagatggaagttaagggccgagagtggaaacggcatgagtttcattatgacaacataatctgggccctccttaccctcttcaccgtttccaccggggaagggtggccacaggttctgcaacattcagtggacgtaacagaggaagacagaggcccaagccgctcgaatcgcatggagatgtcgattttttatgtcgtgtacttcgtagtcttccctttcttctttgttaacatcttcgtggcgctgattataatcacctttcaagagcagggagacaaaatgatggaagagtgttctcttgaaaagaatgaacgcgcttgcattgacttcgctatttcagcaaagccactgaccagatatatgcctcagaatcggcacaccttccagtaccgtgtctggcactttgtggtaagtccatccttcgaatataccataatggcgatgatcgctttaaatacggtcgtgcttatgatgaagtactactcagccccctgcacctatgaattagctctgaaatacctcaacattgcatttaccatggtcttctcactcgagtgtgttctgaaggtaattgctttcggtttcctaaactactttcgagatacctggaatatctttgactttatcacagtcatcggctctatcacagaaataatcctgacagattccaagctggtcaataccagcggcttcaatatgtctttcctgaaactgtttagggcggctcgtcttattaagctattgcggcagggttacacaataaggattctcctgtggacgttcgtgcagagtttcaaagctctcccatatgtgtgtttactgatagcaatgttattttttatttacgctattatagggatgcaggtctttggcaacataaaactggacgaggaaagccacatcaatcgacacaacaactttagaagtttcttcggcagcctgatgttactgttccggtccgctactggcgaggcctggcaggaaatcatgctgtcctgtcttggcgagaaaggctgcgagcccgacacaacggctccctcaggacagaacgaaaacgaacgatgcggtactgacctcgcttatgtgtacttcgtatcctttatcttcttttgctctttccttatgctgaatttatttgtcgctgtcattatggataattttgagtatctgactagggattcatcgatcctgggcccacatcacctcgatgaattcgtccgtgtatgggccgagtacgaccgcgcggcatgtggccgtatccactataccgagatgtatgagatgctgacactgatgtccccacctctcggcctggggaagagatgcccaagtaaggtcgcgtacaagaggttggtactgatgaacatgcctgtggccgaagatatgaccgtacactttaccagcactctgatggcattaatcaggacggctcttgatatcaagatcgccaagggtggtgcggaccggcagcagcttgattccgaactccagaaggagaccttggccatatggcctcatctgtcacagaagatgcttgatctgcttgtgcctatgcccaaagcgtccgatcttacggttggaaagatatacgccgcaatgatgattatggactattacaagcagtccaaagtgaagaagcaaaggcaacaactggaggaacagaagaatgccccaatgtttcaacgcatggagccaagctcactcccccaggagattattgcgaatgccaaggccctgccatacctccaacaagatcctgtatcgggattatcagggcggagcggctatccctccatgtcacccctcagcccccaggatatcttccagctcgcctgcatggatccagcggacgacggccagttccaggagcgtcaaagcctcgaacctgaagtgagcgagcttaaaagtgtacagccctctaatcacggcatatacctgccgtcggatacacaagaacatgccggcagtggtcgcgctagctcaatgcccaggctgacagtcgatccccaagtggtcaccgatccttcttcaatgcgaaggagcttctcaaccatcagagacaagaggtctaatagcagctggttagaggagttctcaatggagcgttcttccgagaatacttataaatctagacgccgctcctatcatagttcactccgcctgtctgctcaccggctgaacagcgactcaggtcacaagtccgatacacatcgttccggcggacgggagaggggcaggtccaaggagcggaagcatctgctctccccggacgtgtctcgctgtaatagtgaggagagaggcacgcaagctgactgggaatcacccgaacgccgccagtctcggtctccttccgaaggacggagtcagaccccgaataggcagggtacggggagcttatcagagtcttccatccccagtgtttcagatacctctacccccagacgcagtcgacggcagctgccccccgtcccccctaagcctcgccccctcctctcatattcctctctaattcgacatgctggcagcatttcaccgccggccgacgggagcgaggaaggcagccccctgacgtcacaggcccttgaatctaacaatgcctgtctgaccgagagctcaaattctcctcacccccaacagtcccagcacgcctcaccacagcgctatatctctgagccctacctggccctccatgaggatagccacgcgagcgattgcggtgaggaagaaacgctgaccttcgaggccgccgtggctacatcccttggaagatctaacacaatcggctcggctcctcctctgagacacagttggcagatgcctaacggccactatcggcgccgacggcgaggtggaccgggaccagggatgatgtgtggagccgttaataacctcctgtctgacacagaggaagatgacaagtgttag

SEQ ID NO: 82094 - DNA, 6794 bp, Artificial Sequence
  derived and/or modified sequence
atggcgctctacaatcccatccccgtgagacaaaactgtttcaccgtaaatcggagcctattcatctttggcgaagacaacattgtcaggaaatacgctaagaaactcattgattggccacccttcgagtacatgattcttgcaactataattgccaactgtattgtgctcgctctggagcagcacctgcccgaagatgataaaacacccatgtctcgtaggctcgaaaaaaccgaaccatattttatcggaatcttctgttttgaagctgggataaagatcgtagcgctgggcttcatttttcataagggctcctatctgcgaaatggatggaatgtcatggatttcattgtggtgctatctggtattcttgctaccgcaggtactcactttaacacgcacgtagatctgcgtactctcagagccgtacgggtgctgagacccctcaagctcgttagcggtattccgtctctgcagattgttctgaaaagtattatgaaggcaatggtgcctttgctccagataggtttgttgctgttcttcgcaatcctgatgtttgccattattgggctcgaattttattcgggtaaactgcaccgcgcttgtttcatgaacaacagcggaatccttgagggatttgatcccccacacccctgtggcgtgcaggggtgcccagctggatacgagtgtaaggactggataggaccaaacgacgggataacccagtttgacaatattctgttcgccgtgctcacagtcttccagtgtattaccatggaaggttggacgaccgtgttgtataacaccaacgatgcccttggagcaacctggaactggctctatttcatcccactgattattatagggtccttctttgtgctgaacctggttctgggcgtgctctctggtgagtttgcaaaagagagggagagggtcgagaatcgtagggccttcatgaagttaagacgtcaacagcaaattgagcgcgagctaaatggatacagagcatggatagataaggctgaggaagtgatgttggccgaggaaaataaaaacgctgggacttctgctctggaggtgctgcggagagcgaccattaaacggtcccgcacggaggcgatgacccgggactctagtgacgaacactgcgtggatatctcctccgttggaactcctctggcaagggccagtatcaaaagcgctaaggtcgacggggtttcatatttcaggcataaggagcgactgctgagaatttccataagacacatggtcaagagtcaggtcttttactggatcgtgctctcgcttgtggccttgaataccgcctgcgtggcgatagtgcatcacaaccagcctcagtggctgactcatctactatactacgccgagttccttttccttggcctgtttctcctggagatgagcctcaagatgtatggaatgggaccgagactttattttcactcctcctttaattgtttcgactttggggttaccgtgggttccatttttgaagtggtgtgggcaatcttcaggcccggaacctccttcggaatcagtgtgctgcgcgcactcaggctcctgaggattttcaaaatcaccaaatattgggctagtctcagaaacctggtcgtaagcctgatgtcctctatgaagtctattatctctctcctgtttctgctgttcctctttattgtcgtctttgccttgctcggaatgcagcttttcggaggccgtttcaacttcaacgacggtacacccagcgctaacttcgatacgttccccgcagccattatgaccgtcttccagatactgaccggcgaagactggaacgaggttatgtacaacggaatcaggtcacagggcggagtttctagtgggatgtggtcagccatatactttattgtactgaccctgtttggtaactatactctgctcaacgttttccttgcgatcgcagtggacaacttagctaacgctcaagagcttactaaagacgagcaggaggaagaggaggcctttaaccaaaaacacgctcttcagaaggcaaaggaggtcagtcccatgtctgcgccaaatatgccgagtatcgagcgtgaccgcaggcgtcgccaccatatgtctatgtgggagccaaggagtagtcatctgcgggagcggagacggagacaccacatgagtgtctgggagcaaaggacctcccagttacgaaaacacatgcaaatgtcaagccaagaggcactgaacagggaggaggcccctaccatgaaccccctgaatcccctcaatccgttgagttctctgaacccacttaatgctcatccctcgctatataggagaccgagggcaattgaaggcctggctctcggtttggctctggagaagttcgaggaggaacgaatatccagggggggaagcctgaagggcgatgggggtgataggtcttccgccctggacaaccagcgtacacccttgagcctcggccaaagggaaccaccctggttggcacgcccttgccacggcaactgcgaccctactcagcaggaagcaggtgggggtgaggcagtagtcaccttcgaggaccgcgctcgacacagacagagtcagcgcagaagtagacatcgccgagttagaacggagggtaaggagtcgagctccgccagtcggagtcgctccgccagccaggaacggagtctcgacgaagcgatgccgactgagggggagaaggaccatgagctgagggggaaccatggagccaaggagccgaccatccaggaagagagagctcaagatctccgaaggactaatagcctcatggttagcagaggctctgggctggctggcggattagatgaggctgatacacctttggtgctgccacacccagaactggaggtggggaaacacgtggtgttaactgagcaggaaccggaaggcagtagcgagcaagcgctcctcggcaacgtacagctggacatgggccgagtgatcagtcagagcgagcctgatctgtcatgcatcactgcaaacacagataaggcgacaaccgagtctacttctgtaacagtagcaatcccggacgtggaccccctggtagacagcacggtagtgcacataagtaataagaccgacggggaggccagtcccttgaaagaagcagagatccgggaagatgaagaggaagttgagaagaaaaagcaaaagaaagagaaacgcgagacgggaaaggctatggtaccccacagcagcatgttcatattttcaacgacgaaccctattcggagggcttgccactatatcgtcaaccttcggtatttcgagatgtgtatactgctggtgattgctgcttcttccatcgccctagctgccgaagaccccgtcttaaccaattccgagcggaacaaggtactgaggtattttgattatgtgtttactggagtgttcacattcgagatggtgataaaaatgattgaccaagggttaattctccaggatggttcctacttccgggacttatggaacatactggacttcgtggtggtggtgggggctctcgtagcgtttgccttagctaatagcatgaagactaacaagggacgagacatcaagactattaagagtctgagagtactgcgcgtattaaggccactcaagaccataaaaaggctcccgaagttgaaggctgtgttcgattgcgtggttaccagcctaaagaacgtgtttaatattttgattgtctacaagctgttcatgttcatatttgccgttatcgcggtacagctgttcaagggtaagtttttttattgcacagactcttcaaaggacaccgagaaggagtgtattggcaactacgtggaccatgaaaagaataaaatggaagtaaaaggcagagaatggaagagacatgagtttcattatgataacattatttgggccttactcacactctttacagtgtctaccggagaaggttggccacaggtcctccagcattccgtggacgtcaccgaggaggatcgcggtccatcgagatctaatagaatggagatgagcatcttctatgttgtgtacttcgtcgtctttcccttcttctttgttaatatttttgtcgctctgataattattaccttccaagagcaaggagacaagatgatggaagaatgctcgctggagaaaaatgagcgcgcatgtatcgatttcgctatctctgctaaacccttaactcggtatatgccccagaacaggcataccttccagtacagggtgtggcatttcgtcgtgtcgccaagctttgagtacacgatcatggctatgatcgccttgaatacggtggtccttatgatgaaatactatagcgccccatgcacttatgagcttgccttgaaatatctgaacattgcgttcacaatggtgttctcactggaatgcgtgctcaaggtgattgcgttcggttttctgaattattttagagacacctggaatatcttcgacttcatcacagtgatcggtagtattactgaaattatcctgactgactctaaactggtcaacaccagcggcttcaatatgtccttccttaagctgttcagggccgctcgcctaattaaattgctccggcagggctacacgatccgcatactactgtggaccttcgttcagtcctttaaagccctgccctatgtgtgcttgctcattgctatgctcttcttcatctacgcaataatcggtatgcaggtgttcgggaacattaagctcgacgaagagagccacatcaaccgacacaacaacttccgctcgttcttcggcagcctcatgctgctgtttcggagtgccactggcgaagcctggcaggaaattatgctctcgtgcctgggtgaaaaaggatgcgagcccgatacaaccgccccttcaggccagaatgaaaatgaacggtgcggaacagaccttgcatatgtgtactttgtcagctttatctttttttgcagtttcttaatgctcaacctgttcgtcgcagtgattatggataattttgaatacctgacacgagatagttccatcctaggtccccaccacctggatgagttcgtccgggtgtgggcagaatatgaccgcgctgcatgcggacgcatccattatactgagatgtacgagatgctaaccttgatgtctcccccactggggctcgggaagcggtgtccgagcaaagtggcctacaaaaggctggtactgatgaacatgcctgtcgcagaagacatgaccgtgcatttcacctctaccttaatggctctgattaggaccgccctggatatcaagatagccaaagggggtgcagatcgccagcagctcgactccgaacttcagaaagaaacgttggctatctggcctcatctgtcccaaaagatgctcgaccttctggtgcccatgccaaaggcgtccgatcttacagtgggaaagatatacgccgcaatgatgataatggattattataaacagtctaaagtgaagaagcagagacaacagttggaggaacagaagaatgcgccaatgttccagagaatggaaccaagctcactgcctcaggaaataatagccaatgctaaggcgctgccctatctgcagcaggatcctgtgagcggtctctccgggagatccgggtacccctcgatgtcacctctatccccccaggatattttccagctggcttgtatggatcccgctgatgatggacagttccaagaacgccagtctctcgaacccgaagtgtcagagctgaagagcgtacaaccctcaaatcatggcatctatctgccgtcagacacccaggagcatgccggtagcgggcgtgcttcgagtatgccccgtctgactgtcgatccacaggtggtcactgacccttcatcaatgaggcggtcattcagtacgatcagagataagcgtagcaattcctcctggctggaggagttcagtatggaacgatcttcagaaaatacatataaatcgagacggaggtcttaccattcctccctgcggcttagtgcacatcgactgaattcagactcaggacacaaaagcgacacacatcgatcaggtgggagagagcgagggagatctaaggaaaggaaacacctgctgagccctgacgtgtcccgctgtaactccgaagagagaggaacacaggcggattgggagagtccagagagacgacagagtaggtctcccagcgaaggcagaagccagacaccaaaccgccaagggacaggctcgctgagcgagagctccattcctagcgtatcagatacatccaccccaagaagatctcgcaggcagctgcccccagtgccacctaaacctcgtccacttctaagttatagctccctgatccggcacgcaggctccatttctccacccgcagacggaagcgaggagggcagccctttaacctctcaggcgttggagtccaataatgcctgtctgacagagtccagcaactcaccacatcctcagcagtctcagcacgcgtcccctcagcgatatatttctgaaccttacctcgccctgcacgaggactcgcatgcctctgattgtggggaagaagagactctcaccttcgaagccgctgtggctacctccttggggagaagcaatactattggctccgcccctccattgcgccattcatggcagatgccaaatggacactatcgacgccgtcgcagaggaggaccgggtcccggaatgatgtgcggcgctgtgaacaatctcctaagtgatactgaagaagacgataaatgcta

SEQ ID NO: 82095 - DNA, 6941 bp, Artificial Sequence
  derived and/or modified sequence
atggcccgtttcggggaagccgtggtggcaagacccggaagcggagacggcgactctgatcagtccagaaacagacagggaacgccagtccctgcaagcggccaggcggcagcttacaagcagactaaagcacagagagccagaacgatggccctgtataatcctatcccggtgcgacagaattgcttcacagtgaatcgtagtttgttcatcttcggagaagacaacattgtgagaaagtatgcaaagaagttaatagattggccccctttcgaatacatgatcctagctaccattatagccaactgtatcgtgctcgctctggagcagcacctgccagaggacgataaaacacctatgagcaggagacttgagaagacagagccttattttatcggcatcttttgctttgaggcaggcattaagatcgtggccctcggtttcatctttcacaagggatcatacttgagaaacggctggaacgttatggacttcatcgtcgtgctgagtggaattctggccactgccggaacccactttaatacccacgttgacctgcgcacccttcgggcagttcgtgttctgcgaccactcaagttggtgagcgggatcccgtcgcttcaaattgtactgaaaagtataatgaaagcaatggtgccactcctgcagatcggccttcttctgttctttgccatcctcatgtttgcaatcataggcctggagttctattctggcaagctacatcgcgcttgctttatgaataacagcggcatcctggagggattcgatcctccacacccttgcggcgttcaaggctgtcccgcaggctatgaatgcaaggattggattgggccaaatgacggaattacacagttcgacaatatcctcttcgccgttctcacagtgttccaatgtatcactatggagggctggacaactgtactgtataacacaaacgacgccctgggagctacttggaactggttgtacttcatccccctgatcatcataggctcatttttcgtcctcaatttagtcctgggggtgctctcaggcgagtttgccaaggaacgggagcgcgttgagaacagaagggcttttatgaaactaagaagacaacagcagattgagcgagagctcaatgggtacagagcgtggattgacaaggccgaggaggtgatgctggccgaagagaacaagaacgccggaacctctgccctggaggtgctcaggcgggcaacgataaagagatcaaggactgaggccatgacccgagactcatccgacgagcactgcgttgatatcagctccgtgggcacaccgttagcccgtgcttccatcaagagcgccaaagtggacggggtctcctatttccgccacaaagagaggttgctacgcatcagtattcgccatatggtgaaatcacaggtattctactggattgtgttatcactggtggctctgaatacggcctgtgtcgccattgtgcaccataatcaacctcagtggctgacccacctgctgtactatgccgagtttttgtttctcggactcttcttacttgagatgtccctaaagatgtatggcatgggtccacggttgtactttcacagtagcttcaactgttttgactttggtgtgaccgtgggctccatctttgaagtggtgtgggccatcttccgccctgggacgtcattcggaatttctgtgctccgcgcattgagactgctccgcattttcaagattactaagtattgggcgagcctcaggaatctagtcgtatccctgatgtcaagtatgaagagtataatctctctcctgtttctcctgttcctcttcattgtcgtgttcgcactgttgggcatgcaattatttggaggccgatttaatttcaacgacggcacgccttcggccaattttgatacgtttcctgccgcaattatgacggtattccagattctcacaggcgaggactggaacgaggtcatgtacaacggaattcggtctcagggcggagtctcgtcaggcatgtggagcgcgatctatttcatcgtcctaacgctgttcgggaactataccctgctgaacgtgtttctcgccatcgcagtggataacctggcaaacgctcaggagcttactaaagatgagcaggaggaagaagaagcgtttaaccagaaacatgccctacagaaggcaaaggaggtgtcccctatgtcagctcctaatatgccaagcatcgagagggaccggaggagacgccaccacatgtctatgtgggaacctaggagcagccatctgagagaacggagaaggcgccatcatatgtcagtttgggagcaacggactagtcagctacggaagcatatgcaaatgagcagccaggaggctctaaatagagaggaggcgccaactatgaaccccctgaatcccctgaatcccctgtcttccctcaaccccctcaatgcccatccgtccctctacaggcgccctagagccatcgaaggtctcgccctgggcctcgcactggagaagtttgaggaggagagaatttctcggggtggatccttaaagggcgatggcggagatagatcctcggcccttgacaaccagagaacaccccttagcttgggccagagagaaccgccttggctggcccgtccctgtcatggtaactgtgacccgacgcagcaagaagctgggggtggcgaggctgtcgtgaccttcgaagaccgcgctagacatagacagtcccagaggcgtagccgtcaccgtcgcgtccgaaccgaggggaaggaatcctccagcgcttccaggtcaaggtccgcttcacaggagcgaagtttagacgaagcaatgcccacagaaggcgaaaaggatcacgagttgcgagggaaccacggggcaaaagaacctaccattcaggaggaaagagcacaggatctgcgtagaaccaacagtttaatggtgtcaaggggtagcggcttagccggaggccttgacgaagccgacacaccgttggtgcttccacatcccgagcttgaggtaggcaagcacgtggtcctaactgagcaggagccggaaggatcatcagaacaagccctgctcggaaatgtgcagcttgatatgggcagggtgatctcgcagagtgaaccagatttatcttgtataactgctaacacggacaaggcaacaacagagagcaccagtgtgacagtcgccatcccggacgtggatcccttggtggactctactgtagtgcacataagcaacaagacagacggggaggcaagcccactgaaggaggccgaaatccgggaggatgaagaagaagtcgagaaaaagaagcaaaagaaagaaaaacgagaaacaggaaaagcaatggttcctcactcttctatgtttatattctctaccacgaaccccattcggagagcctgtcactatatcgtgaatctgcgctacttcgagatgtgtattctactcgtgatcgccgcatcctctatcgctttagctgcggaagatcccgtgcttaccaactctgaaagaaataaggttctgaggtactttgactacgtcttcaccggggttttcacgtttgagatggtgattaagatgattgatcaggggctgattcttcaggatggcagttactttagggatttgtggaatattctggattttgtggtggtggtgggagctcttgttgcgtttgcgctggccaacgcacttgggacaaataagggcagggacatcaaaacaatcaaatccctgagggtcctgagggtgctgcggcctctgaaaaccattaagcgtctgcccaagctgaaggccgtgttcgactgtgtggtaacaagtctaaagaatgtgtttaatattctgatcgtctacaagcttttcatgtttatattcgctgtcattgctgttcaattgttcaagggaaagttcttctattgtacagattccagcaaggacacagagaaagagtgcatcggaaattatgtggaccacgagaagaacaagatggaagtgaagggtcgcgagtggaaacgccacgaatttcattatgataatataatttgggccctgttgaccctattcaccgtctccactggagagggctggcctcaagtcctgcagcattccgttgacgtgaccgaggaggaccgcggaccatcccgctctaaccgcatggaaatgtctatcttttatgtcgtgtatttcgtagtgtttccattcttctttgtaaacatcttcgtggccctgatcatcatcacctttcaggagcagggtgataagatgatggaggagtgttcccttgagaaaaatgaaagggcctgcattgatttcgcaatcagcgcaaaaccgctgacccgctacatgcctcagaatcggcacacatttcagtatcgcgtctggcacttcgtcgtatcgcctagttttgaatacaccattatggcgatgattgccctgaatacggtcgtcctgatgatgaagtattattcagcaccctgtacgtatgagctagctttgaagtatctgaacatcgcttttacgatggtgttttcgctcgagtgcgtgctgaaggtgattgcattcggcttcttgaattattttagagatacgtggaacatcttcgatttcattacagtaatcggctcaattactgagatcatcctcaccgattcaaaactggtgaacaccagcggcttcaacatgagttttctaaaattgttccgggctgctagactgattaaacttctgcggcagggctacaccattagaattctgctatggacctttgtgcagtcattcaaagcccttccttatgtttgcttactgattgctatgctcttctttatttacgcaatcataggcatgcaggttttcggaaatatcaaactggacgaagagtcccatattaacaggcacaacaacttcaggagtttctttggatccctcatgttgctttttaggtccgccacgggcgaagcttggcaggagataatgctctcgtgcctcggagaaaaagggtgtgagcctgataccaccgccccaagcgggcagaatgagaatgaaagatgtggcaccgatctcgcatacgtgtacttcgtcagcttcatattcttctgttccttcctgatgctgaatctgtttgtcgctgtgatcatggacaattttgagtatctcacgagggactcttctattctcggtcctcaccatctggatgagtttgttcgcgtctgggctgaatacgatagagcggcttgtgggaggattcactacacagaaatgtacgaaatgctaactctcatgtcaccgcctctcggtttgggaaagaggtgcccgagcaaagtggcttataaaaggctggttttgatgaatatgcctgtggcggaagacatgaccgtccactttacaagcacattgatggccctaattcggaccgcattagatatcaaaattgcgaagggaggagccgatagacagcagctcgattccgagctccagaaagagacgttagctatttggccacacctgagccagaagatgctagacctgctggtgccaatgccaaaagcttccgacttgaccgtgggaaagatctatgctgccatgatgattatggattattataagcaaagtaaggtaaagaaacagcggcagcagctggaagagcaaaaaaacgcccctatgtttcagcggatggagccaagcagcctgccccaggagattattgccaacgctaaagctcttccgtaccttcagcaggatcccgtgtcaggattaagtgggaggtctggctatccgtctatgtctcctttatccccccaggatatttttcagctggcctgcatggatccggcagatgacgggcagttccaggagcgccagtccctcgagccggaggtgagcgaacttaagagtgtccagccatcaaatcacggaatctacctgccctcagacacccaggagcacgcaggatcaggcagagcttctagtatgccccgtctcacggtcgaccctcaggtggtcaccgacccctcttcgatgcgacgatccttcagtacgatccgcgacaaaagatctaacagttcttggctagaggagtttagtatggagcgatctagcgaaaatacctataaatctaggcgacggtcttatcacagctcgctccggctttcggctcaccgactaaattctgactccggtcataagagcgacacacacagatctggtggacgggagcggggtcgctccaaagagcggaaacatctgcttagccctgacgtatccaggtgtaactcagaggagagaggtacacaggcagattgggaaagccctgagcggaggcagagccggtccccctcagaaggaagatcacagaccccgaacagacaaggaacaggatccctgagcgaaagttctattccctctgtgagtgatactagtaccccaagacgatctcgcaggcagctgcctcctgtccccccaaaaccgaggcccctccttagctattcttcgctgattagacacgccggtagcatctcacctcccgctgatggctccgaagagggctctcccctgacttcacaggctctcgaaagcaacaacgcgtgtctgacagaaagtagcaactctcctcatccccagcagagccagcatgctagccctcagcgatacatctccgaaccatatctggctctgcatgaggattcacacgcttctgattgcggggaagaggagactttaaccttcgaagctgccgtcgcgacttcactcggacggtctaatacaatagggagtgccccaccccttcgacacagctggcagatgcctaacgggcattacagacggaggcgccgtgggggtcctggaccaggaatgatgtgcggagccgttaataacctattaagcgacacggaagaagatgacaagtgtta

SEQ ID NO: 82096 - DNA, 9848 bp, Artificial Sequence
  derived and/or modified sequence
gctgctgctgcctctccgaagagctcgcggagctccccagaggcggtggtccccgtgcttgtctggatgcggctctgagtctccgtgtgtctttctgcttgttgctgtgtgcgggtgttcggccgcgatcacctttgtgtgtcttctgtctgtttaaacctcaggatggctcgcttcggggaggcggtggtcgccaggccagggtccggcgatggagactcggaccagagcaggaaccggcaaggaacccccgtgccggcctcggggcaggcggccgcctacaagcagacgaaagcacagagggcgcggactatggctttgtacaaccccattcccgtccggcagaactgtttcaccgtcaacagatccctgttcatcttcggagaagataacattgtcaggaaatatgccaagaagctcatcgattggccgccatttgagtacatgatcctggccaccatcattgccaactgcatcgtcctggccctggagcagcatcttcctgaggatgacaagacccccatgtcccgaagactggagaagacagaaccttatttcattgggatcttttgctttgaagctgggatcaaaattgtggccctggggttcatcttccataagggctcttacctccgcaatggctggaatgtcatggacttcatcgtggtcctcagtggcatcctggccactgcaggaacccacttcaatactcacgtggacctgaggaccctccgggctgtgcgtgtcctgcggcctttgaagctcgtgtcagggatacctagcctgcagattgtgttgaagtccatcatgaaggccatggtacctcttctgcagattggccttctgctcttctttgccatcctgatgtttgctatcattggtttggagttctacagtggcaagttacatcgagcatgcttcatgaacaattcaggtattctagaaggatttgacccccctcacccatgtggtgtgcagggctgcccagctggttatgaatgcaaggactggatcggccccaatgatgggatcacccagtttgataacatcctttttgctgtgctgactgtcttccagtgcatcaccatggaagggtggaccactgtgctgtacaataccaatgatgccttaggagccacctggaattggctgtacttcatccccctcatcatcattggatccttctttgttctcaacctagtcctgggagtgctttccggggaatttgccaaagagagagagagagtggagaaccgaagggctttcatgaagctgcggcgccagcagcagattgagcgtgagctgaatggctaccgtgcctggatagacaaagcagaggaagtcatgctcgctgaagaaaataaaaatgctggaacatccgccttagaagtgcttcgaagggcaaccatcaagaggagccggacagaggccatgactcgagactccagtgatgagcactgtgttgatatctcctctgtgggcacacctctggcccgagccagtatcaaaagtgcaaaggtagacggggtctcttatttccggcacaaggaaaggcttctgcgcatctccattcgccacatggttaaatcccaggtgttttactggattgtgctgagccttgtggcactcaacactgcctgtgtggccattgtccatcacaaccagccccagtggctcacccacctcctctactatgcagaatttctgtttctgggactcttcctcttggagatgtccctgaagatgtatggcatggggcctcgcctttattttcactcttcattcaactgctttgattttggggtcacagtgggcagtatctttgaagtggtctgggcaatcttcagacctggtacgtcttttggaatcagtgtcttgcgagccctccggcttctaagaatatttaaaataaccaagtattgggcttccctacggaatttggtggtctccttgatgagctcaatgaagtctatcatcagtttgcttttcctcctcttcctcttcatcgttgtctttgctctcctaggaatgcagttatttggaggcaggtttaactttaatgatgggactccttcggcaaattttgataccttccctgcagccatcatgactgtgttccagatcctgacgggtgaggactggaatgaggtgatgtacaatgggatccgctcccagggtggggtcagctcaggcatgtggtctgccatctacttcattgtgctcaccttgtttggcaactacacgctactgaatgtgttcttggctatcgctgtggataatctcgccaacgcccaggaactgaccaaggatgaacaggaggaagaagaggccttcaaccagaaacatgcactgcagaaggccaaggaggtcagcccgatgtctgcacccaacatgccttcgatcgaaagagacagaaggagaagacaccacatgtcgatgtgggagccacgcagcagccacctgagggagcggaggcgccggcaccacatgtccgtgtgggagcagcgtaccagccagctgaggaagcacatgcagatgtccagccaggaggccctcaacagagaggaggcgccgaccatgaacccgctcaaccccctcaacccgctcagctccctcaacccgctcaatgcccaccccagcctttatcggcgacccagggccattgagggcctggccctgggcctggccctggagaagttcgaggaggagcgcatcagccgtggggggtccctcaagggggatggaggggaccgatccagtgccctggacaaccagaggacccctttgtccctgggccagcgggagccaccatggctggccaggccctgtcatggaaactgtgacccgactcagcaggaggcagggggaggagaggctgtggtgacctttgaggaccgggccaggcacaggcagagccaacggcgcagccggcatcgccgcgtcaggacagaaggcaaggagtcctcttcagcctcccggagcaggtctgccagccaggaacgcagtctggatgaagccatgcccactgaaggggagaaggaccatgagctcaggggcaaccatggtgccaaggagccaacgatccaagaagagagagcccaggatttaaggaggaccaacagtctgatggtgtccagaggctccgggctggcaggaggccttgatgaggctgacacccccctagtcctgccccatcctgagctggaagtggggaagcacgtggtgctgacggagcaggagccagaaggcagcagtgagcaggccctgctggggaatgtgcagctagacatgggccgggtcatcagccagagcgagcctgacctctcctgcatcacggccaacacggacaaggccaccaccgagagcaccagcgtcaccgtcgccatccccgacgtggaccccttggtggactcaaccgtggtgcacattagcaacaagacggatggggaagccagtcccttgaaggaggcagagatcagagaggatgaggaggaggtggagaagaagaagcagaagaaggagaagcgtgagacaggcaaagccatggtgccccacagctcaatgttcatcttcagcaccaccaacccgatccggagggcctgccactacatcgtgaacctgcgctactttgagatgtgcatcctcctggtgattgcagccagcagcatcgccctggcggcagaggaccccgtcctgaccaactcggagcgcaacaaagtcctgaggtattttgactatgtgttcacgggcgtgttcacctttgagatggttataaagatgatagaccaaggcttgatcctgcaggatgggtcctacttccgagacttgtggaacatcctggactttgtggtggtcgttggcgcattggtggcctttgctctggctaacagcatgaaaaccaacaaaggacgggacatcaagaccatcaagtctctgcgggtgctccgagttctaaggccactgaaaaccatcaagcgcttgcccaagctcaaggccgtcttcgactgcgtagtgacctccttgaagaatgtcttcaacatactcattgtgtacaagctcttcatgttcatctttgctgtcatcgcagttcagctcttcaagggaaagttcttttattgcacggacagttccaaggacacagagaaggagtgcataggcaactatgtagatcatgagaaaaacaagatggaggtgaagggccgggaatggaagcgccatgaattccactacgacaacattatctgggccctgctgaccctcttcaccgtctccacaggggaaggatggcctcaagttctgcagcactctgtagatgtgacagaggaagaccgaggcccaagccgcagcaaccgcatggagatgtctatcttttatgtagtctactttgtggtcttccccttcttctttgtcaatatctttgtggctctcatcatcatcaccttccaggagcaaggggataagatgatggaggagtgcagcctggagaagaatgagagggcgtgcatcgacttcgccatcagcgccaaacctctcacccgctacatgccgcagaacagacacaccttccagtaccgcgtgtggcactttgtggtgtctccgtcctttgagtacaccattatggccatgatcgccttgaatactgttgtgctgatgatgaagtattattctgctccctgtacctatgagctggccctgaagtacctgaatatcgccttcaccatggtgttttccctggaatgtgtcctgaaggtcatcgcttttggctttttgaactatttccgagacacctggaatatctttgacttcatcaccgtgattggcagtatcacagaaattatcctgacagacagcaagctggtgaacaccagtggcttcaatatgagctttctgaagctcttccgagctgcccgcctcataaagctcctgcgtcagggctataccatacgcattttgctgtggacctttgtgcagtcctttaaggccctcccttatgtctgccttttaattgccatgcttttcttcatttatgccatcattgggatgcaggtatttggaaacataaaattagacgaggagagtcacatcaaccggcacaacaacttccggagtttctttgggtccctaatgctactcttcaggagtgccacaggtgaggcctggcaggagattatgctgtcatgccttggggagaagggctgtgagcctgacaccaccgcaccatcagggcagaacgagaacgaacgctgcggcaccgatctggcctacgtgtactttgtctccttcatcttcttctgctccttcttgatgctcaacctgtttgtggccgtcatcatggacaactttgagtacctgactcgggactcctccatcctggggcctcaccacttggacgagtttgtccgcgtctgggcagaatatgaccgagcagcatgtggccgcatccattacactgagatgtatgaaatgctgactctcatgtcacctccgctaggcctcggcaagagatgtccctccaaagtggcatataagaggttggtcctgatgaacatgccagtagctgaggacatgacggtccacttcacctccacacttatggctctgatccggacagctctggacattaaaattgccaaaggtggtgcagacaggcagcagctagactcagagctacaaaaggagaccctagccatctggcctcacctatcccagaagatgctggatctgcttgtgcccatgcccaaagcctctgacctgactgtgggcaaaatctatgcagcaatgatgatcatggactactataagcagagtaaggtgaagaagcagaggcagcagctggaggaacagaaaaatgcccccatgttccagcgcatggagccttcatctctgcctcaggagatcattgctaatgccaaagccctgccttacctccagcaggaccccgtttcaggcctgagtggccggagtggatacccttcgatgagtccactctctccccaggatatattccagttggcttgtatggaccccgccgatgacggacagttccaagaacggcagtctctggagccagaggttagtgaattaaaaagcgtgcagccctctaaccatggcatctaccttccttcggacacccaggagcatgcgggatctgggagggcatcttctatgccacgtctgactgtggatccccaggtggtgacagaccctagctccatgagacgttcattttccactattcgggataagcgttcaaattcctcgtggttggaggaattctccatggagcgaagcagtgaaaatacctacaagtcccgtcgccggagttaccactcctccttgcggctgtcagcccaccgcctgaactctgattcaggccacaagtctgacactcaccgctcagggggcagggagcggggacgatcaaaagagcgaaagcatcttctctctcctgatgtctcccgctgcaattcagaagagcgagggacccaggctgactgggagtccccagagcgccgtcaatccaggtcacccagtgagggcaggtcacagacgcccaacagacagggcacaggttccctaagtgagagctccatcccctctgtctctgacaccagcaccccaagaagaagtcgtcggcagctcccacccgtcccgccaaagccccggcccctcctttcctacagctccctgattcgacacgcgggcagcatctctccacctgctgatggaagcgaggagggctccccgctgacctcccaagctctggagagcaacaatgcttgcctgaccgagtcttccaactctccgcacccccagcagagccaacatgcctccccacagcgctacatctccgagccctacttggccctgcacgaagactcccacgcctcagactgtggtgaggaggagacgctcactttcgaagcagccgtggctactagcctgggccgttccaacaccatcggctcagccccacccctgcggcatagctggcagatgcccaacgggcactatcggcggcggaggcgcggggggcctgggccaggcatgatgtgtggggctgtcaacaacctgctaagtgacacggaagaagatgacaaatgctagaggctgctcccccctccgatgcatgctcttctctcacatggagaaaaccaagacagaattgggaagccagtgcggcccgggggggaggaagagggaaaaggaagatggaaggacaccatgcattatcagagaagaggaagtaaaggacaatcagaacaccagtcaaacccaccaaattgctttattcccctttgcaagatgggcactgccatagttctgcctctttgctggggaaagaaaccaggaacgtggagggttattactgcgggagaagggacacgaggatggctttgcttccccttgccccttcccacttttctaaaagctgtggagggatctagctggcctatgtctacactcagtgccctgagaagcctggaagactttctggctcttaactggggagtagtggagaccataggagaggactctcctccctcaccagctcttacgcctcagccagcaccactgccaccagggcaactgcagcagcatctcatgcataaccctgtggcttgcttcccccagggcagcacaggctaagtcaggaacatcggatgccagggagggaggagaaagccgaagcgaaaggggtcagggtgctgaggcaacagcagcaagggctggtctggacaagaaaagccatagcccggcagcccctaccatgagggagacagagaaacagaactggtggtgctggggggtatagccccccatccttgaggcctgtcacccacacagtaggtgctgagagttaggacaggtcaggaagtcccccagggtccacaaaggtgcctgaggctctggtaagggtgaagataaaagtatttaacaaccgctatggcatcaatgtaagtggagtttggtcctagtgccggagcccatgctattccaggcattggctctttagatgccagtcatgggggaaccctgagggtgtgggtagagtagcaggggccacctaagagattaaaaacagtctgttttccaaccagtgtggaagcaattaaatatgcgtaacagtgctacggccacaccagcacctcctggctgaaggtcagcccacactctggtccatgaggcagcaaggccagtgctgtgccaagcccggtaaggccaagtgccgaggcccagccttccctgccactcctctgagagggcagaacacacatatccaagtaggctacccaccactgggtagggatttctgtaaagatgggaaaggctgatagattgaaataagcttctgtgaaagtctggatttactgaggacctcccctgaggagggaccgttgggaccgcagattctgcagctggtgtggggttcaggtcagtttgtcaggatgctttaaggtgattagtaaatatacctcagcttagacttgggctgctccttctagcaaagcaggctccagtggggcctcatcatacaggatgacaagactggggccctgttcaccttgaacatgcccctgggccaagatggggcttcacccctccccagagtaagagctggggctgacagtcccaccctgtcattcctaatagcccaaacgcagaagcactgagcaagagagccctttcttgccaagccagtgctcttttggtatatggcatacagctccattggaggggacacatcactggctttatctggtggaaatgtacctttcccttaagttcctccttagtgccatcacagcaggtgaatgggtgccctacggggccctccttcccccaccaggaacagatggaacctgccacccaggatcctgatctgccctgcactgagcactcagtggataaacactcctccagcccagacacactcctcctcttgggcaggagcaatccagagttgttatttttcttagaaggagcctcttttccctctattttttaaattgaaatataatagctgcatcagccctgaaaagccaaattcaaccacatggctggagaatcatttgtcatggccccgccttctcttctgatactaatggagcttcatgacccacggtcagcccccaaaccaaagttgtcccaacagaggaggccagtgaggcagagacagagctctcccactctcagaccctcttttgtcttcattttcctctcccacttagcacatgtgtgcttgagggtggctgggaatgtgatatacagcaccctgatcctaacaggtgtgattgttacgtaagacgctgatactgggccttgtattgcttttaaagtttcctctgctcagcatcatttcatgccaaagtgctgctatgggctgctttgtgtgcacaaaattgctttttccacctcggaaatgcagctttccctagggggaggcctacaacaggacgaccattctgagccagtgagtctattgcatggtgttttgagaaagggaattttagtgacaccttatgccatttcaagaggagaaatgcaggctggcagagcaatttccagaaatggaatttgcctgcaaatagtataaacaacactaaatttactgtgccaggaaatcttcctgaactccttgaactcatacacacaggtatttgagtcctgaataaagtgttggaaagcactgcagatgcggtcacctgactgaccacctgggttttctattaccagtgaatttcttttattcaccttcccttgaccaagaaattgggtttcttttccctcagcctgcacttactcttctattaagaccagaaaataaaataattttccgttgagtc

SEQ ID NO: 82097 - DNA, 7067 bp, Artificial Sequence
  derived and/or modified sequence
atggctcgcttcggggaggcggtggtcgccaggccagggtccggcgatggagactcggaccagagcaggaaccggcaaggaacccccgtgccggcctcggggcaggcggccgcctacaagcagacgaaagcacagagggcgcggactatggctttgtacaaccccattcccgtccggcagaactgtttcaccgtcaacagatccctgttcatcttcggagaagataacattgtcaggaaatatgccaagaagctcatcgattggccgccatttgagtacatgatcctggccaccatcattgccaactgcatcgtcctggccctggagcagcatcttcctgaggatgacaagacccccatgtcccgaagactggagaagacagaaccttatttcattgggatcttttgctttgaagctgggatcaaaattgtggccctggggttcatcttccataagggctcttacctccgcaatggctggaatgtcatggacttcatcgtggtcctcagtggcatcctggccactgcaggaacccacttcaatactcacgtggacctgaggaccctccgggctgtgcgtgtcctgcggcctttgaagctcgtgtcagggatacctagcctgcagattgtgttgaagtccatcatgaaggccatggtacctcttctgcagattggccttctgctcttctttgccatcctgatgtttgctatcattggtttggagttctacagtggcaagttacatcgagcatgcttcatgaacaattcaggtattctagaaggatttgacccccctcacccatgtggtgtgcagggctgcccagctggttatgaatgcaaggactggatcggccccaatgatgggatcacccagtttgataacatcctttttgctgtgctgactgtcttccagtgcatcaccatggaagggtggaccactgtgctgtacaataccaatgatgccttaggagccacctggaattggctgtacttcatccccctcatcatcattggatccttctttgttctcaacctagtcctgggagtgctttccggggaatttgccaaagagagagagagagtggagaaccgaagggctttcatgaagctgcggcgccagcagcagattgagcgtgagctgaatggctaccgtgcctggatagacaaagcagaggaagtcatgctcgctgaagaaaataaaaatgctggaacatccgccttagaagtgcttcgaagggcaaccatcaagaggagccggacagaggccatgactcgagactccagtgatgagcactgtgttgatatctcctctgtgggcacacctctggcccgagccagtatcaaaagtgcaaaggtagacggggtctcttatttccggcacaaggaaaggcttctgcgcatctccattcgccacatggttaaatcccaggtgttttactggattgtgctgagccttgtggcactcaacactgcctgtgtggccattgtccatcacaaccagccccagtggctcacccacctcctctactatgcagaatttctgtttctgggactcttcctcttggagatgtccctgaagatgtatggcatggggcctcgcctttattttcactcttcattcaactgctttgattttggggtcacagtgggcagtatctttgaagtggtctgggcaatcttcagacctggtacgtcttttggaatcagtgtcttgcgagccctccggcttctaagaatatttaaaataaccaagtattgggcttccctacggaatttggtggtctccttgatgagctcaatgaagtctatcatcagtttgcttttcctcctcttcctcttcatcgttgtctttgctctcctaggaatgcagttatttggaggcaggtttaactttaatgatgggactccttcggcaaattttgataccttccctgcagccatcatgactgtgttccagatcctgacgggtgaggactggaatgaggtgatgtacaatgggatccgctcccagggtggggtcagctcaggcatgtggtctgccatctacttcattgtgctcaccttgtttggcaactacacgctactgaatgtgttcttggctatcgctgtggataatctcgccaacgcccaggaactgaccaaggatgaacaggaggaagaagaggccttcaaccagaaacatgcactgcagaaggccaaggaggtcagcccgatgtctgcacccaacatgccttcgatcgaaagagacagaaggagaagacaccacatgtcgatgtgggagccacgcagcagccacctgagggagcggaggcgccggcaccacatgtccgtgtgggagcagcgtaccagccagctgaggaagcacatgcagatgtccagccaggaggccctcaacagagaggaggcgccgaccatgaacccgctcaaccccctcaacccgctcagctccctcaacccgctcaatgcccaccccagcctttatcggcgacccagggccattgagggcctggccctgggcctggccctggagaagttcgaggaggagcgcatcagccgtggggggtccctcaagggggatggaggggaccgatccagtgccctggacaaccagaggacccctttgtccctgggccagcgggagccaccatggctggccaggccctgtcatggaaactgtgacccgactcagcaggaggcagggggaggagaggctgtggtgacctttgaggaccgggccaggcacaggcagagccaacggcgcagccggcatcgccgcgtcaggacagaaggcaaggagtcctcttcagcctcccggagcaggtctgccagccaggaacgcagtctggatgaagccatgcccactgaaggggagaaggaccatgagctcaggggcaaccatggtgccaaggagccaacgatccaagaagagagagcccaggatttaaggaggaccaacagtctgatggtgtccagaggctccgggctggcaggaggccttgatgaggctgacacccccctagtcctgccccatcctgagctggaagtggggaagcacgtggtgctgacggagcaggagccagaaggcagcagtgagcaggccctgctggggaatgtgcagctagacatgggccgggtcatcagccagagcgagcctgacctctcctgcatcacggccaacacggacaaggccaccaccgagagcaccagcgtcaccgtcgccatccccgacgtggaccccttggtggactcaaccgtggtgcacattagcaacaagacggatggggaagccagtcccttgaaggaggcagagatcagagaggatgaggaggaggtggagaagaagaagcagaagaaggagaagcgtgagacaggcaaagccatggtgccccacagctcaatgttcatcttcagcaccaccaacccgatccggagggcctgccactacatcgtgaacctgcgctactttgagatgtgcatcctcctggtgattgcagccagcagcatcgccctggcggcagaggaccccgtcctgaccaactcggagcgcaacaaagtcctgaggtattttgactatgtgttcacgggcgtgttcacctttgagatggttataaagatgatagaccaaggcttgatcctgcaggatgggtcctacttccgagacttgtggaacatcctggactttgtggtggtcgttggcgcattggtggcctttgctctggcgaacgctttgggaaccaacaaaggacgggacatcaagaccatcaagtctctgcgggtgctccgagttctaaggccactgaaaaccatcaagcgcttgcccaagctcaaggccgtcttcgactgcgtagtgacctccttgaagaatgtcttcaacatactcattgtgtacaagctcttcatgttcatctttgctgtcatcgcagttcagctcttcaagggaaagttcttttattgcacggacagttccaaggacacagagaaggagtgcataggcaactatgtagatcatgagaaaaacaagatggaggtgaagggccgggaatggaagcgccatgaattccactacgacaacattatctgggccctgctgaccctcttcaccgtctccacaggggaaggatggcctcaagttctgcagcactctgtagatgtgacagaggaagaccgaggcccaagccgcagcaaccgcatggagatgtctatcttttatgtagtctactttgtggtcttccccttcttctttgtcaatatctttgtggctctcatcatcatcaccttccaggagcaaggggataagatgatggaggagtgcagcctggagaagaatgagagggcgtgcatcgacttcgccatcagcgccaaacctctcacccgctacatgccgcagaacagacacaccttccagtaccgcgtgtggcactttgtggtgtctccgtcctttgagtacaccattatggccatgatcgccttgaatactgttgtgctgatgatgaagtattattctgctccctgtacctatgagctggccctgaagtacctgaatatcgccttcaccatggtgttttccctggaatgtgtcctgaaggtcatcgcttttggctttttgaactatttccgagacacctggaatatctttgacttcatcaccgtgattggcagtatcacagaaattatcctgacagacagcaagctggtgaacaccagtggcttcaatatgagctttctgaagctcttccgagctgcccgcctcataaagctcctgcgtcagggctataccatacgcattttgctgtggacctttgtgcagtcctttaaggccctcccttatgtctgccttttaattgccatgcttttcttcatttatgccatcattgggatgcaggtatttggaaacataaaattagacgaggagagtcacatcaaccggcacaacaacttccggagtttctttgggtccctaatgctactcttcaggagtgccacaggtgaggcctggcaggagattatgctgtcatgccttggggagaagggctgtgagcctgacaccaccgcaccatcagggcagaacgagaacgaacgctgcggcaccgatctggcctacgtgtactttgtctccttcatcttcttctgctccttcttgatgctcaacctgtttgtggccgtcatcatggacaactttgagtacctgactcgggactcctccatcctggggcctcaccacttggacgagtttgtccgcgtctgggcagaatatgaccgagcagcatgtggccgcatccattacactgagatgtatgaaatgctgactctcatgtcacctccgctaggcctcggcaagagatgtccctccaaagtggcatataagaggttggtcctgatgaacatgccagtagctgaggacatgacggtccacttcacctccacacttatggctctgatccggacagctctggacattaaaattgccaaaggtggtgcagacaggcagcagctagactcagagctacaaaaggagaccctagccatctggcctcacctatcccagaagatgctggatctgcttgtgcccatgcccaaagcctctgacctgactgtgggcaaaatctatgcagcaatgatgatcatggactactataagcagagtaaggtgaagaagcagaggcagcagctggaggaacagaaaaatgcccccatgttccagcgcatggagccttcatctctgcctcaggagatcattgctaatgccaaagccctgccttacctccagcaggaccccgtttcaggcctgagtggccggagtggatacccttcgatgagtccactctctccccaggatatattccagttggcttgtatggaccccgccgatgacggacagttccaagaacggcagtctctggagccagaggttagtgaattaaaaagcgtgcagccctctaaccatggcatctaccttccttcggacacccaggagcatgcgggatctgggagggcatcttctatgccacgtctgactgtggatccccaggtggtgacagaccctagctccatgagacgttcattttccactattcgggataagcgttcaaattcctcgtggttggaggaattctccatggagcgaagcagtgaaaatacctacaagtcccgtcgccggagttaccactcctccttgcggctgtcagcccaccgcctgaactctgattcaggccacaagtctgacactcaccgctcagggggcagggagcggggacgatcaaaagagcgaaagcatcttctctctcctgatgtctcccgctgcaattcagaagagcgagggacccaggctgactgggagtccccagagcgccgtcaatccaggtcacccagtgagggcaggtcacagacgcccaacagacagggcacaggttccctaagtgagagctccatcccctctgtctctgacaccagcaccccaagaagaagtcgtcggcagctcccacccgtcccgccaaagccccggcccctcctttcctacagctccctgattcgacacgcgggcagcatctctccacctgctgatggaagcgaggagggctccccgctgacctcccaagctctggagagcaacaatgcttgcctgaccgagtcttccaactctccgcacccccagcagagccaacatgcctccccacagcgctacatctccgagccctacttggccctgcacgaagactcccacgcctcagactgtggtgaggaggagacgctcactttcgaagcagccgtggctactagcctgggccgttccaacaccatcggctcagccccacccctgcggcatagctggcagatgcccaacgggcactatcggcggcggaggcgcggggggcctgggccaggcatgatgtgtggggctgtcaacaacctgctaagtgacacggaagaagatgacaaatgctagaggctgctcccccctccgatgcatgctcttctctcacatggagaaaaccaagacagaattgggaagccagtgcggcccgggggggaggaagagggaaaaggaagatggaaggacaccatgcatta

SEQ ID NO: 82098 - DNA, 6795 bp, Artificial Sequence
  derived and/or modified sequence
atggccctgtacaaccccatccccgtgagacagaactgcttcaccgtgaacagaagcctgttcatcttcggcgaggacaacatcgtgagaaagtacgccaagaagctgatcgactggccccccttcgagtacatgatcctggccaccatcatcgccaactgcatcgtgctggccctggagcagcacctgcccgaggacgacaagacccccatgagcagaagactggagaagaccgagccctacttcatcggcatcttctgcttcgaggccggcatcaagatcgtggccctgggcttcatcttccacaagggcagctacctgagaaacggctggaacgtgatggacttcatcgtggtgctgagcggcatcctggccaccgccggcacccacttcaacacccacgtggacctgagaaccctgagagccgtgagagtgctgagacccctgaagctggtgagcggcatccccagcctgcagatcgtgctgaagagcatcatgaaggccatggtgcccctgctgcagatcggcctgctgctgttcttcgccatcctgatgttcgccatcatcggcctggagttctacagcggcaagctgcacagagcctgcttcatgaacaacagcggcatcctggagggcttcgaccccccccacccctgcggcgtgcagggctgccccgccggctacgagtgcaaggactggatcggccccaacgacggcatcacccagttcgacaacatcctgttcgccgtgctgaccgtgttccagtgcatcaccatggagggctggaccaccgtgctgtacaacaccaacgacgccctgggcgccacctggaactggctgtacttcatccccctgatcatcatcggcagcttcttcgtgctgaacctggtgctgggcgtgctgagcggcgagttcgccaaggagagagagagagtggagaacagaagagccttcatgaagctgagaagacagcagcagatcgagagagagctgaacggctacagagcctggatcgacaaggccgaggaggtgatgctggccgaggagaacaagaacgccggcaccagcgccctggaggtgctgagaagagccaccatcaagagaagcagaaccgaggccatgaccagagacagcagcgacgagcactgcgtggacatcagcagcgtgggcacccccctggccagagccagcatcaagagcgccaaggtggacggcgtgagctacttcagacacaaggagagactgctgagaatcagcatcagacacatggtgaagagccaggtgttctactggatcgtgctgagcctggtggccctgaacaccgcctgcgtggccatcgtgcaccacaaccagccccagtggctgacccacctgctgtactacgccgagttcctgttcctgggcctgttcctgctggagatgagcctgaagatgtacggcatgggccccagactgtacttccacagcagcttcaactgcttcgacttcggcgtgaccgtgggcagcatcttcgaggtggtgtgggccatcttcagacccggcaccagcttcggcatcagcgtgctgagagccctgagactgctgagaatcttcaagatcaccaagtactgggccagcctgagaaacctggtggtgagcctgatgagcagcatgaagagcatcatcagcctgctgttcctgctgttcctgttcatcgtggtgttcgccctgctgggcatgcagctgttcggcggcagattcaacttcaacgacggcacccccagcgccaacttcgacaccttccccgccgccatcatgaccgtgttccagatcctgaccggcgaggactggaacgaggtgatgtacaacggcatcagaagccagggcggcgtgagcagcggcatgtggagcgccatctacttcatcgtgctgaccctgttcggcaactacaccctgctgaacgtgttcctggccatcgccgtggacaacctggccaacgcccaggagctgaccaaggacgagcaggaggaggaggaggccttcaaccagaagcacgccctgcagaaggccaaggaggtgagccccatgagcgcccccaacatgcccagcatcgagagagacagaagaagaagacaccacatgagcatgtgggagcccagaagcagccacctgagagagagaagaagaagacaccacatgagcgtgtgggagcagagaaccagccagctgagaaagcacatgcagatgagcagccaggaggccctgaacagagaggaggcccccaccatgaaccccctgaaccccctgaaccccctgagcagcctgaaccccctgaacgcccaccccagcctgtacagaagacccagagccatcgagggcctggccctgggcctggccctggagaagttcgaggaggagagaatcagcagaggcggcagcctgaagggcgacggcggcgacagaagcagcgccctggacaaccagagaacccccctgagcctgggccagagagagcccccctggctggccagaccctgccacggcaactgcgaccccacccagcaggaggccggcggcggcgaggccgtggtgaccttcgaggacagagccagacacagacagagccagagaagaagcagacacagaagagtgagaaccgagggcaaggagagcagcagcgccagcagaagcagaagcgccagccaggagagaagcctggacgaggccatgcccaccgagggcgagaaggaccacgagctgagaggcaaccacggcgccaaggagcccaccatccaggaggagagagcccaggacctgagaagaaccaacagcctgatggtgagcagaggcagcggcctggccggcggcctggacgaggccgacacccccctggtgctgccccaccccgagctggaggtgggcaagcacgtggtgctgaccgagcaggagcccgagggcagcagcgagcaggccctgctgggcaacgtgcagctggacatgggcagagtgatcagccagagcgagcccgacctgagctgcatcaccgccaacaccgacaaggccaccaccgagagcaccagcgtgaccgtggccatccccgacgtggaccccctggtggacagcaccgtggtgcacatcagcaacaagaccgacggcgaggccagccccctgaaggaggccgagatcagagaggacgaggaggaggtggagaagaagaagcagaagaaggagaagagagagaccggcaaggccatggtgccccacagcagcatgttcatcttcagcaccaccaaccccatcagaagagcctgccactacatcgtgaacctgagatacttcgagatgtgcatcctgctggtgatcgccgccagcagcatcgccctggccgccgaggaccccgtgctgaccaacagcgagagaaacaaggtgctgagatacttcgactacgtgttcaccggcgtgttcaccttcgagatggtgatcaagatgatcgaccagggcctgatcctgcaggacggcagctacttcagagacctgtggaacatcctggacttcgtggtggtggtgggcgccctggtggccttcgccctggccaacagcatgaagaccaacaagggcagagacatcaagaccatcaagagcctgagagtgctgagagtgctgagacccctgaagaccatcaagagactgcccaagctgaaggccgtgttcgactgcgtggtgaccagcctgaagaacgtgttcaacatcctgatcgtgtacaagctgttcatgttcatcttcgccgtgatcgccgtgcagctgttcaagggcaagttcttctactgcaccgacagcagcaaggacaccgagaaggagtgcatcggcaactacgtggaccacgagaagaacaagatggaggtgaagggcagagagtggaagagacacgagttccactacgacaacatcatctgggccctgctgaccctgttcaccgtgagcaccggcgagggctggccccaggtgctgcagcacagcgtggacgtgaccgaggaggacagaggccccagcagaagcaacagaatggagatgagcatcttctacgtggtgtacttcgtggtgttccccttcttcttcgtgaacatcttcgtggccctgatcatcatcaccttccaggagcagggcgacaagatgatggaggagtgcagcctggagaagaacgagagagcctgcatcgacttcgccatcagcgccaagcccctgaccagatacatgccccagaacagacacaccttccagtacagagtgtggcacttcgtggtgagccccagcttcgagtacaccatcatggccatgatcgccctgaacaccgtggtgctgatgatgaagtactacagcgccccctgcacctacgagctggccctgaagtacctgaacatcgccttcaccatggtgttcagcctggagtgcgtgctgaaggtgatcgccttcggcttcctgaactacttcagagacacctggaacatcttcgacttcatcaccgtgatcggcagcatcaccgagatcatcctgaccgacagcaagctggtgaacaccagcggcttcaacatgagcttcctgaagctgttcagagccgccagactgatcaagctgctgagacagggctacaccatcagaatcctgctgtggaccttcgtgcagagcttcaaggccctgccctacgtgtgcctgctgatcgccatgctgttcttcatctacgccatcatcggcatgcaggtgttcggcaacatcaagctggacgaggagagccacatcaacagacacaacaacttcagaagcttcttcggcagcctgatgctgctgttcagaagcgccaccggcgaggcctggcaggagatcatgctgagctgcctgggcgagaagggctgcgagcccgacaccaccgcccccagcggccagaacgagaacgagagatgcggcaccgacctggcctacgtgtacttcgtgagcttcatcttcttctgcagcttcctgatgctgaacctgttcgtggccgtgatcatggacaacttcgagtacctgaccagagacagcagcatcctgggcccccaccacctggacgagttcgtgagagtgtgggccgagtacgacagagccgcctgcggcagaatccactacaccgagatgtacgagatgctgaccctgatgagcccccccctgggcctgggcaagagatgccccagcaaggtggcctacaagagactggtgctgatgaacatgcccgtggccgaggacatgaccgtgcacttcaccagcaccctgatggccctgatcagaaccgccctggacatcaagatcgccaagggcggcgccgacagacagcagctggacagcgagctgcagaaggagaccctggccatctggccccacctgagccagaagatgctggacctgctggtgcccatgcccaaggccagcgacctgaccgtgggcaagatctacgccgccatgatgatcatggactactacaagcagagcaaggtgaagaagcagagacagcagctggaggagcagaagaacgcccccatgttccagagaatggagcccagcagcctgccccaggagatcatcgccaacgccaaggccctgccctacctgcagcaggaccccgtgagcggcctgagcggcagaagcggctaccccagcatgagccccctgagcccccaggacatcttccagctggcctgcatggaccccgccgacgacggccagttccaggagagacagagcctggagcccgaggtgagcgagctgaagagcgtgcagcccagcaaccacggcatctacctgcccagcgacacccaggagcacgccggcagcggcagagccagcagcatgcccagactgaccgtggacccccaggtggtgaccgaccccagcagcatgagaagaagcttcagcaccatcagagacaagagaagcaacagcagctggctggaggagttcagcatggagagaagcagcgagaacacctacaagagcagaagaagaagctaccacagcagcctgagactgagcgcccacagactgaacagcgacagcggccacaagagcgacacccacagaagcggcggcagagagagaggcagaagcaaggagagaaagcacctgctgagccccgacgtgagcagatgcaacagcgaggagagaggcacccaggccgactgggagagccccgagagaagacagagcagaagccccagcgagggcagaagccagacccccaacagacagggcaccggcagcctgagcgagagcagcatccccagcgtgagcgacaccagcacccccagaagaagcagaagacagctgccccccgtgccccccaagcccagacccctgctgagctacagcagcctgatcagacacgccggcagcatcagcccccccgccgacggcagcgaggagggcagccccctgaccagccaggccctggagagcaacaacgcctgcctgaccgagagcagcaacagcccccacccccagcagagccagcacgccagcccccagagatacatcagcgagccctacctggccctgcacgaggacagccacgccagcgactgcggcgaggaggagaccctgaccttcgaggccgccgtggccaccagcctgggcagaagcaacaccatcggcagcgccccccccctgagacacagctggcagatgcccaacggccactacagaagaagaagaagaggcggccccggccccggcatgatgtgcggcgccgtgaacaacctgctgagcgacaccgaggaggacgacaagtgctag

SEQ ID NO: 82099 - DNA, 6942 bp, Artificial Sequence
  derived and/or modified sequence
atggccagattcggcgaggccgtggtggccagacccggcagcggcgacggcgacagcgaccagagcagaaacagacagggcacccccgtgcccgccagcggccaggccgccgcctacaagcagaccaaggcccagagagccagaaccatggccctgtacaaccccatccccgtgagacagaactgcttcaccgtgaacagaagcctgttcatcttcggcgaggacaacatcgtgagaaagtacgccaagaagctgatcgactggccccccttcgagtacatgatcctggccaccatcatcgccaactgcatcgtgctggccctggagcagcacctgcccgaggacgacaagacccccatgagcagaagactggagaagaccgagccctacttcatcggcatcttctgcttcgaggccggcatcaagatcgtggccctgggcttcatcttccacaagggcagctacctgagaaacggctggaacgtgatggacttcatcgtggtgctgagcggcatcctggccaccgccggcacccacttcaacacccacgtggacctgagaaccctgagagccgtgagagtgctgagacccctgaagctggtgagcggcatccccagcctgcagatcgtgctgaagagcatcatgaaggccatggtgcccctgctgcagatcggcctgctgctgttcttcgccatcctgatgttcgccatcatcggcctggagttctacagcggcaagctgcacagagcctgcttcatgaacaacagcggcatcctggagggcttcgaccccccccacccctgcggcgtgcagggctgccccgccggctacgagtgcaaggactggatcggccccaacgacggcatcacccagttcgacaacatcctgttcgccgtgctgaccgtgttccagtgcatcaccatggagggctggaccaccgtgctgtacaacaccaacgacgccctgggcgccacctggaactggctgtacttcatccccctgatcatcatcggcagcttcttcgtgctgaacctggtgctgggcgtgctgagcggcgagttcgccaaggagagagagagagtggagaacagaagagccttcatgaagctgagaagacagcagcagatcgagagagagctgaacggctacagagcctggatcgacaaggccgaggaggtgatgctggccgaggagaacaagaacgccggcaccagcgccctggaggtgctgagaagagccaccatcaagagaagcagaaccgaggccatgaccagagacagcagcgacgagcactgcgtggacatcagcagcgtgggcacccccctggccagagccagcatcaagagcgccaaggtggacggcgtgagctacttcagacacaaggagagactgctgagaatcagcatcagacacatggtgaagagccaggtgttctactggatcgtgctgagcctggtggccctgaacaccgcctgcgtggccatcgtgcaccacaaccagccccagtggctgacccacctgctgtactacgccgagttcctgttcctgggcctgttcctgctggagatgagcctgaagatgtacggcatgggccccagactgtacttccacagcagcttcaactgcttcgacttcggcgtgaccgtgggcagcatcttcgaggtggtgtgggccatcttcagacccggcaccagcttcggcatcagcgtgctgagagccctgagactgctgagaatcttcaagatcaccaagtactgggccagcctgagaaacctggtggtgagcctgatgagcagcatgaagagcatcatcagcctgctgttcctgctgttcctgttcatcgtggtgttcgccctgctgggcatgcagctgttcggcggcagattcaacttcaacgacggcacccccagcgccaacttcgacaccttccccgccgccatcatgaccgtgttccagatcctgaccggcgaggactggaacgaggtgatgtacaacggcatcagaagccagggcggcgtgagcagcggcatgtggagcgccatctacttcatcgtgctgaccctgttcggcaactacaccctgctgaacgtgttcctggccatcgccgtggacaacctggccaacgcccaggagctgaccaaggacgagcaggaggaggaggaggccttcaaccagaagcacgccctgcagaaggccaaggaggtgagccccatgagcgcccccaacatgcccagcatcgagagagacagaagaagaagacaccacatgagcatgtgggagcccagaagcagccacctgagagagagaagaagaagacaccacatgagcgtgtgggagcagagaaccagccagctgagaaagcacatgcagatgagcagccaggaggccctgaacagagaggaggcccccaccatgaaccccctgaaccccctgaaccccctgagcagcctgaaccccctgaacgcccaccccagcctgtacagaagacccagagccatcgagggcctggccctgggcctggccctggagaagttcgaggaggagagaatcagcagaggcggcagcctgaagggcgacggcggcgacagaagcagcgccctggacaaccagagaacccccctgagcctgggccagagagagcccccctggctggccagaccctgccacggcaactgcgaccccacccagcaggaggccggcggcggcgaggccgtggtgaccttcgaggacagagccagacacagacagagccagagaagaagcagacacagaagagtgagaaccgagggcaaggagagcagcagcgccagcagaagcagaagcgccagccaggagagaagcctggacgaggccatgcccaccgagggcgagaaggaccacgagctgagaggcaaccacggcgccaaggagcccaccatccaggaggagagagcccaggacctgagaagaaccaacagcctgatggtgagcagaggcagcggcctggccggcggcctggacgaggccgacacccccctggtgctgccccaccccgagctggaggtgggcaagcacgtggtgctgaccgagcaggagcccgagggcagcagcgagcaggccctgctgggcaacgtgcagctggacatgggcagagtgatcagccagagcgagcccgacctgagctgcatcaccgccaacaccgacaaggccaccaccgagagcaccagcgtgaccgtggccatccccgacgtggaccccctggtggacagcaccgtggtgcacatcagcaacaagaccgacggcgaggccagccccctgaaggaggccgagatcagagaggacgaggaggaggtggagaagaagaagcagaagaaggagaagagagagaccggcaaggccatggtgccccacagcagcatgttcatcttcagcaccaccaaccccatcagaagagcctgccactacatcgtgaacctgagatacttcgagatgtgcatcctgctggtgatcgccgccagcagcatcgccctggccgccgaggaccccgtgctgaccaacagcgagagaaacaaggtgctgagatacttcgactacgtgttcaccggcgtgttcaccttcgagatggtgatcaagatgatcgaccagggcctgatcctgcaggacggcagctacttcagagacctgtggaacatcctggacttcgtggtggtggtgggcgccctggtggccttcgccctggccaacgccctgggcaccaacaagggcagagacatcaagaccatcaagagcctgagagtgctgagagtgctgagacccctgaagaccatcaagagactgcccaagctgaaggccgtgttcgactgcgtggtgaccagcctgaagaacgtgttcaacatcctgatcgtgtacaagctgttcatgttcatcttcgccgtgatcgccgtgcagctgttcaagggcaagttcttctactgcaccgacagcagcaaggacaccgagaaggagtgcatcggcaactacgtggaccacgagaagaacaagatggaggtgaagggcagagagtggaagagacacgagttccactacgacaacatcatctgggccctgctgaccctgttcaccgtgagcaccggcgagggctggccccaggtgctgcagcacagcgtggacgtgaccgaggaggacagaggccccagcagaagcaacagaatggagatgagcatcttctacgtggtgtacttcgtggtgttccccttcttcttcgtgaacatcttcgtggccctgatcatcatcaccttccaggagcagggcgacaagatgatggaggagtgcagcctggagaagaacgagagagcctgcatcgacttcgccatcagcgccaagcccctgaccagatacatgccccagaacagacacaccttccagtacagagtgtggcacttcgtggtgagccccagcttcgagtacaccatcatggccatgatcgccctgaacaccgtggtgctgatgatgaagtactacagcgccccctgcacctacgagctggccctgaagtacctgaacatcgccttcaccatggtgttcagcctggagtgcgtgctgaaggtgatcgccttcggcttcctgaactacttcagagacacctggaacatcttcgacttcatcaccgtgatcggcagcatcaccgagatcatcctgaccgacagcaagctggtgaacaccagcggcttcaacatgagcttcctgaagctgttcagagccgccagactgatcaagctgctgagacagggctacaccatcagaatcctgctgtggaccttcgtgcagagcttcaaggccctgccctacgtgtgcctgctgatcgccatgctgttcttcatctacgccatcatcggcatgcaggtgttcggcaacatcaagctggacgaggagagccacatcaacagacacaacaacttcagaagcttcttcggcagcctgatgctgctgttcagaagcgccaccggcgaggcctggcaggagatcatgctgagctgcctgggcgagaagggctgcgagcccgacaccaccgcccccagcggccagaacgagaacgagagatgcggcaccgacctggcctacgtgtacttcgtgagcttcatcttcttctgcagcttcctgatgctgaacctgttcgtggccgtgatcatggacaacttcgagtacctgaccagagacagcagcatcctgggcccccaccacctggacgagttcgtgagagtgtgggccgagtacgacagagccgcctgcggcagaatccactacaccgagatgtacgagatgctgaccctgatgagcccccccctgggcctgggcaagagatgccccagcaaggtggcctacaagagactggtgctgatgaacatgcccgtggccgaggacatgaccgtgcacttcaccagcaccctgatggccctgatcagaaccgccctggacatcaagatcgccaagggcggcgccgacagacagcagctggacagcgagctgcagaaggagaccctggccatctggccccacctgagccagaagatgctggacctgctggtgcccatgcccaaggccagcgacctgaccgtgggcaagatctacgccgccatgatgatcatggactactacaagcagagcaaggtgaagaagcagagacagcagctggaggagcagaagaacgcccccatgttccagagaatggagcccagcagcctgccccaggagatcatcgccaacgccaaggccctgccctacctgcagcaggaccccgtgagcggcctgagcggcagaagcggctaccccagcatgagccccctgagcccccaggacatcttccagctggcctgcatggaccccgccgacgacggccagttccaggagagacagagcctggagcccgaggtgagcgagctgaagagcgtgcagcccagcaaccacggcatctacctgcccagcgacacccaggagcacgccggcagcggcagagccagcagcatgcccagactgaccgtggacccccaggtggtgaccgaccccagcagcatgagaagaagcttcagcaccatcagagacaagagaagcaacagcagctggctggaggagttcagcatggagagaagcagcgagaacacctacaagagcagaagaagaagctaccacagcagcctgagactgagcgcccacagactgaacagcgacagcggccacaagagcgacacccacagaagcggcggcagagagagaggcagaagcaaggagagaaagcacctgctgagccccgacgtgagcagatgcaacagcgaggagagaggcacccaggccgactgggagagccccgagagaagacagagcagaagccccagcgagggcagaagccagacccccaacagacagggcaccggcagcctgagcgagagcagcatccccagcgtgagcgacaccagcacccccagaagaagcagaagacagctgccccccgtgccccccaagcccagacccctgctgagctacagcagcctgatcagacacgccggcagcatcagcccccccgccgacggcagcgaggagggcagccccctgaccagccaggccctggagagcaacaacgcctgcctgaccgagagcagcaacagcccccacccccagcagagccagcacgccagcccccagagatacatcagcgagccctacctggccctgcacgaggacagccacgccagcgactgcggcgaggaggagaccctgaccttcgaggccgccgtggccaccagcctgggcagaagcaacaccatcggcagcgccccccccctgagacacagctggcagatgcccaacggccactacagaagaagaagaagaggcggccccggccccggcatgatgtgcggcgccgtgaacaacctgctgagcgacaccgaggaggacgacaagtgctag

SEQ ID NO: 82100 - protein, 2202 aa, Artificial Sequence
  derived and/or modified sequence
MALYNPIPVRQNCFTVNRSLFIFGEDNIVRKYAKKLIDWPPFEYMILATIIANCIVLALEQHLPEDDKTPMSRRLEKTEPYFIGIFCFEAGIKIVALGFIFHKGSYLRNGWNVMDFIVVLSGILATAGTHFNTHVDLRTLRAVRVLRPLKLVSGIPSLQIVLKSIMKAMVPLLQIGLLLFFAILMFAIIGLEFYSGKLHRACFMNNSGILEGFDPPHPCGVQGCPAGYECKDWIGPNDGITQFDNILFAVLTVFQCITMEGWTTVLYNTNDALGATWNWLYFIPLIIIGSFFVLNLVLGVLSGEFAKERERVENRRAFMKLRRQQQIERELNGYRAWIDKAEEVMLAEENKNAGTSALEVLRRATIKRSRTEAMTRDSSDEHCVDISSVGTPLARASIKSAKVDGVSYFRHKERLLRISIRHMVKSQVFYWIVLSLVALNTACVAIVHHNQPQWLTHLLYYAEFLFLGLFLLEMSLKMYGMGPRLYFHSSFNCFDFGVTVGSIFEVVWAIFRPGTSFGISVLRALRLLRIFKITKYWASLRNLVVSLMSSMKSIISLLFLLFLFIVVFALLGMQLFGGRFNFNDGTPSANFDTFPAAIMTVFQILTGEDWNEVMYNGIRSQGGVSSGMWSAIYFIVLTLFGNYTLLNVFLAIAVDNLANAQELTKDEQEEEEAFNQKHALQKAKEVSPMSAPNMPSIERERRRRHHMSVWEQRTSQLRKHMQMSSQEALNREEAPTMNPLNPLNPLSSLNPLNAHPSLYRRPRAIEGLALGLALEKFEEERISRGGSLKGDGGDRSSALDNQRTPLSLGQREPPWLARPCHGNCDPTQQEAGGGEAVVTFEDRARHRQSQRRSRHRRVRTEGKESSSASRSRSASQERSLDEAMPTEGEKDHELRGNHGAKEPTIQEERAQDLRRTNSLMVSRGSGLAGGLDEADTPLVLPHPELEVGKHVVLTEQEPEGSSEQALLGNVQLDMGRVISQSEPDLSCITANTDKATTESTSVTVAIPDVDPLVDSTVVHISNKTDGEASPLKEAEIREDEEEVEKKKQKKEKRETGKAMVPHSSMFIFSTTNPIRRACHYIVNLRYFEMCILLVIAASSIALAAEDPVLTNSERNKVLRYFDYVFTGVFTFEMVIKMIDQGLILQDGSYFRDLWNILDFVVVVGALVAFALANSMKTNKGRDIKTIKSLRVLRVLRPLKTIKRLPKLKAVFDCVVTSLKNVFNILIVYKLFMFIFAVIAVQLFKGKFFYCTDSSKDTEKECIGNYVDHEKNKMEVKGREWKRHEFHYDNIIWALLTLFTVSTGEGWPQVLQHSVDVTEEDRGPSRSNRMEMSIFYVVYFVVFPFFFVNIFVALIIITFQEQGDKMMEECSLEKNERACIDFAISAKPLTRYMPQNRHTFQYRVWHFVVSPSFEYTIMAMIALNTVVLMMKYYSAPCTYELALKYLNIAFTMVFSLECVLKVIAFGFLNYFRDTWNIFDFITVIGSITEIILTDSKLVNTSGFNMSFLKLFRAARLIKLLRQGYTIRILLWTFVQSFKALPYVCLLIAMLFFIYAIIGMQVFGNIKLDEESHINRHNNFRSFFGSLMLLFRSATGEAWQEIMLSCLGEKGCEPDTTAPSGQNENERCGTDLAYVYFVSFIFFCSFLMLNLFVAVIMDNFEYLTRDSSILGPHHLDEFVRVWAEYDRAACGRIPYKDMYKLVRVISPPLGLGENCPYRVACKRLVLMNMPVAEDMTVHFTSTLMALIRTALDIKIAKGGADRQQLDSELQKETLAIWPHLSQKMLDLLVPMPKASDLTVGKIYAAMMIMDYYKQSKVKKQRQQLEEQKNAPMFQRMEPSSLPQEIIANAKALPYLQQDPVSGLSGRSGYPSMSPLSPQDIFQLACMDPADDGQFQERQSLVVTDPSSMRRSFSTIRDKRSNSSWLEEFSMERSSENTYKSRRRSYHSSLRLSAHRLNSDSGHKSDTHRSGGRERGRSKERKHLLSPDVSRCNSEERGTQADWESPERRQSRSPSEGRSQTPNRQGTGSLSESSIPSVSDTSTPRRSRRQLPPVPPKPRPLLSYSSLIRHAGSISPPADGSEEGSPLTSQALESNNACLTESSNSPHPQQSQHASPQRYISEPYLALHEDSHASDCGEEETLTFEAAVATSLGRSNTIGSAPPLRHSWQMPNGHYRRRRRGGPGPGMMCGAVNNLLSDTEEDDKC

SEQ ID NO: 82101 - protein, 2251 aa, Artificial Sequence
  derived and/or modified sequence
MARFGEAVVARPGSGDGDSDQSRNRQGTPVPASGQAAAYKQTKAQRARTMALYNPIPVRQNCFTVNRSLFIFGEDNIVRKYAKKLIDWPPFEYMILATIIANCIVLALEQHLPEDDKTPMSRRLEKTEPYFIGIFCFEAGIKIVALGFIFHKGSYLRNGWNVMDFIVVLSGILATAGTHFNTHVDLRTLRAVRVLRPLKLVSGIPSLQIVLKSIMKAMVPLLQIGLLLFFAILMFAIIGLEFYSGKLHRACFMNNSGILEGFDPPHPCGVQGCPAGYECKDWIGPNDGITQFDNILFAVLTVFQCITMEGWTTVLYNTNDALGATWNWLYFIPLIIIGSFFVLNLVLGVLSGEFAKERERVENRRAFMKLRRQQQIERELNGYRAWIDKAEEVMLAEENKNAGTSALEVLRRATIKRSRTEAMTRDSSDEHCVDISSVGTPLARASIKSAKVDGVSYFRHKERLLRISIRHMVKSQVFYWIVLSLVALNTACVAIVHHNQPQWLTHLLYYAEFLFLGLFLLEMSLKMYGMGPRLYFHSSFNCFDFGVTVGSIFEVVWAIFRPGTSFGISVLRALRLLRIFKITKYWASLRNLVVSLMSSMKSIISLLFLLFLFIVVFALLGMQLFGGRFNFNDGTPSANFDTFPAAIMTVFQILTGEDWNEVMYNGIRSQGGVSSGMWSAIYFIVLTLFGNYTLLNVFLAIAVDNLANAQELTKDEQEEEEAFNQKHALQKAKEVSPMSAPNMPSIERERRRRHHMSVWEQRTSQLRKHMQMSSQEALNREEAPTMNPLNPLNPLSSLNPLNAHPSLYRRPRAIEGLALGLALEKFEEERISRGGSLKGDGGDRSSALDNQRTPLSLGQREPPWLARPCHGNCDPTQQEAGGGEAVVTFEDRARHRQSQRRSRHRRVRTEGKESSSASRSRSASQERSLDEAMPTEGEKDHELRGNHGAKEPTIQEERAQDLRRTNSLMVSRGSGLAGGLDEADTPLVLPHPELEVGKHVVLTEQEPEGSSEQALLGNVQLDMGRVISQSEPDLSCITANTDKATTESTSVTVAIPDVDPLVDSTVVHISNKTDGEASPLKEAEIREDEEEVEKKKQKKEKRETGKAMVPHSSMFIFSTTNPIRRACHYIVNLRYFEMCILLVIAASSIALAAEDPVLTNSERNKVLRYFDYVFTGVFTFEMVIKMIDQGLILQDGSYFRDLWNILDFVVVVGALVAFALANALGTNKGRDIKTIKSLRVLRVLRPLKTIKRLPKLKAVFDCVVTSLKNVFNILIVYKLFMFIFAVIAVQLFKGKFFYCTDSSKDTEKECIGNYVDHEKNKMEVKGREWKRHEFHYDNIIWALLTLFTVSTGEGWPQVLQHSVDVTEEDRGPSRSNRMEMSIFYVVYFVVFPFFFVNIFVALIIITFQEQGDKMMEECSLEKNERACIDFAISAKPLTRYMPQNRHTFQYRVWHFVVSPSFEYTIMAMIALNTVVLMMKYYSAPCTYELALKYLNIAFTMVFSLECVLKVIAFGFLNYFRDTWNIFDFITVIGSITEIILTDSKLVNTSGFNMSFLKLFRAARLIKLLRQGYTIRILLWTFVQSFKALPYVCLLIAMLFFIYAIIGMQVFGNIKLDEESHINRHNNFRSFFGSLMLLFRSATGEAWQEIMLSCLGEKGCEPDTTAPSGQNENERCGTDLAYVYFVSFIFFCSFLMLNLFVAVIMDNFEYLTRDSSILGPHHLDEFVRVWAEYDRAACGRIHYTEMYEMLTLMSPPLGLGKRCPSKVAYKRLVLMNMPVAEDMTVHFTSTLMALIRTALDIKIAKGGADRQQLDSELQKETLAIWPHLSQKMLDLLVPMPKASDLTVGKIYAAMMIMDYYKQSKVKKQRQQLEEQKNAPMFQRMEPSSLPQEIIANAKALPYLQQDPVSGLSGRSGYPSMSPLSPQDIFQLACMDPADDGQFQERQSLVVTDPSSMRRSFSTIRDKRSNSSWLEEFSMERSSENTYKSRRRSYHSSLRLSAHRLNSDSGHKSDTHRSGGRERGRSKERKHLLSPDVSRCNSEERGTQADWESPERRQSRSPSEGRSQTPNRQGTGSLSESSIPSVSDTSTPRRSRRQLPPVPPKPRPLLSYSSLIRHAGSISPPADGSEEGSPLTSQALESNNACLTESSNSPHPQQSQHASPQRYISEPYLALHEDSHASDCGEEETLTFEAAVATSLGRSNTIGSAPPLRHSWQMPNGHYRRRRRGGPGPGMMCGAVNNLLSDTEEDDKC

SEQ ID NO: 82102 - DNA, 237 bp, Artificial Sequence
  derived and/or modified sequence
atggcccccctggccgaggtgggcggcttcctgggcggcctggagggcctgggccagcaggtgggcagccacttcctgctgcccccagctggggagcggcccccagctgccctgctgccccaccggctgcccccagctgaccctgcccggcggcagagagctggccaccctgctggcccccagcccctgcgctacctgggcatccaccagtgtggcagcggcaccggccagtactag

SEQ ID NO: 82103 - DNA, 6609 bp, Artificial Sequence
  derived and/or modified sequence
atggcactgtacaatcctataccagttcgccagaattgtttcaccgtgaaccggtccctgtttatcttcggcgaggataatatagtaaggaaatacgcaaaaaagctcatcgattggcctcctttcgaatatatgattttggctactataatagctaattgtatcgtgctggcactcgaacagcatctacccgaggacgataagacacctatgagcagaaggctggaaaagaccgaaccttattttatcgggattttttgctttgaggccggcattaagatcgtggccctcgggtttattttccacaaggggtcctacctccggaacgggtggaacgtaatggactttatagtggtgctgagcgggatcctcgccaccgctggaactcactttaatacccacgttgacctgcggacactgagggccgtcagggttctaagacctctgaagctggtttccggcatcccaagcctccagatcgtgttaaaatccatcatgaaagcaatggtccctctgctgcagattggactgctgctgttcttcgccattttgatgttcgctattattggccttgagttctactccggcaagctgcaccgtgcgtgttttatgaataatagtgggatcttggaaggcttcgacccaccccacccatgcggagtccaaggttgccctgctggatatgagtgcaaggactggattggacctaacgacggcatcacacagttcgataacattctgttcgctgttttaactgtgtttcagtgcatcacaatggagggttggaccacagtgctctacaacactaacgatgcactgggcgctacatggaactggctttactttattcccctaattataattggttctttctttgttctcaacctggtattgggagtcctcagtggggaattcgccaaggagagggagagggtcgagaacagacgagctttcatgaagttgcgaagacagcaacagattgaacgcgagctgaacggctaccgggcatggatcgataaggcagaggaagttatgctggccgaggagaataaaaatgccggcacttcggcactggaagtactccgcagggccaccattaaacggagccgaacggaagccatgacccgcgattcctccgatgagcactgcgtggatatctcttccgttggtactccactcgctcgtgcctccatcaaatcagctaaagttgatggggtgtcatacttccggcataaagaacgcctcttgcgcatctccatacgtcatatggtgaaatctcaggtcttctattggatcgtcttgagtctagtggcactgaacaccgcttgtgtagctattgtgcaccacaatcagccgcagtggctcacacacctgttgtattacgcagagtttttgttcctgggactgtttctgcttgagatgtcacttaaaatgtatggtatgggacctaggctgtacttccatagctcatttaattgctttgactttggggtaaccgtcggatcaatatttgaggtggtgtgggctatatttcggccaggcacttcattcgggatcagcgtgctccgggccctccgcttattaaggattttcaaaatcaccaaatactgggcttctctcaggaacctggtagtctctctgatgtccagtatgaagtctattattagcttgctttttttgctgtttttgtttatcgtggtcttcgcccttctgggcatgcaattgtttgggggcaggttcaattttaacgatggaacaccctccgccaattttgacactttccccgccgctatcatgacagtgtttcagatactaacaggtgaagactggaatgaggtcatgtataatgggatccgctcacaggggggtgtgagctctggcatgtggtctgccatatatttcatcgtcttgaccctttttggcaactacacccttttaaacgtttttctcgctattgcggttgacaatctggccaacgcgcaagagctgacgaaggatgaacaggaggaggaggaagctttcaaccaaaaacacgcccttcagaaggccaaagaggtatcccctatgagtgcacccaatatgccatctatcgagagagaaaggaggagacggcaccatatgtctgtttgggagcagcgaacttcccagctgcgaaagcatatgcagatgagcagtcaggaggcactgaaccgagaggaggcgcccactatgaatcccctgaatcccctcaacccattgagctctctgaatcccctcaatgctcaccccagtctgtacaggagaccaagagctatcgaaggactggccctgggtctggccctggaaaagttcgaggaggagcggatcagcaggggaggatcacttaagggtgacggtggggatagatcttccgcgctcgacaatcaacgcacccccttgagcctcggtcagagggagcctccgtggctggcacgcccttgtcatggtaactgtgacccaacccagcaagaagctggcggcggcgaggcagtcgtcacattcgaggaccgcgcaagacatcgtcagtcacagcgtaggtctagacatcgcagagtgagaacagagggcaaggagtctagttcagcttcccggtccagatccgctagtcaggagcgctcccttgatgaagcgatgcctacagagggcgaaaaggaccacgagctcagaggcaaccacggagctaaagaacctaccattcaggaagagcgagcccaggacctgcgcagaaccaatagccttatggtgtcccgcggaagtggtcttgccggagggttggacgaagctgatacgccattggtcctaccgcacccagaattggaggtgggaaaacacgtggtgttaacagaacaggagcccgaagggtcctcagagcaagccttgctaggcaatgtccaactggacatgggccgtgttatatcccagtccgagccagatctgtcgtgcattacagcaaataccgacaaagccactacagaatcgacatccgtgaccgtcgctatccccgacgtggaccccttggtcgacagcacagtcgtgcacataagcaacaagactgatggagaagcaagtcccctgaaggaagcggagatccgcgaggacgaagaagaagtagagaagaagaaacagaagaaagaaaaacgcgaaactggaaaagccatggtcccccacagttccatgttcatcttctccactaccaatccaatccggcgggcgtgccactacatcgtgaatctgcgatatttcgaaatgtgcatcctgctcgtgattgctgccagtagcatcgcattggcggccgaggacccggtgctcactaattcggagcgcaacaaggtcctgcgctatttcgactacgtgttcacgggcgtgtttactttcgagatggttatcaagatgatcgatcagggcctgattctgcaggacggtagctacttcagggacctgtggaacatcctcgattttgtggtggttgtgggcgccctggtcgcctttgccctcgccaactctatgaagactaataaagggagagatatcaagaccataaaatcgctccgcgtcctgcgagttttgagacctttgaagaccatcaaaagactcccaaaactcaaagcagtattcgattgcgttgtaacctccctcaagaacgtctttaatatcctgatcgtctacaaactctttatgtttattttcgcagtgattgccgtccagctcttcaagggaaagtttttttattgtactgatagcagcaaggacacagaaaaagagtgcattggtaactatgttgatcatgagaaaaacaagatggaggtgaagggccgtgaatggaagcgccacgaattccactacgacaacattatatgggctttactgactctgtttactgtgtccactggggagggatggccccaggtacttcagcattccgttgatgtaaccgaagaggatcgtggtccaagtcgctccaatcgtatggagatgagcatcttttacgttgtatacttcgtggtctttccattcttcttcgtcaatatatttgtcgctctgattatcattacttttcaggaacagggagataagatgatggaggagtgctcactcgagaaaaacgaacgggcgtgcattgactttgcaatatccgctaagcccctgacgcgttatatgccccagaatagacacacgttccagtatcgggtgtggcacttcgtcgtttccccaagttttgagtatactataatggcaatgattgcactgaacactgttgtactcatgatgaaatactactcggccccatgcacctacgagctggcgctgaaatacttgaacattgcctttactatggtcttcagcttagaatgcgtgcttaaggtgatcgcctttggcttcttgaactactttagggatacatggaacatctttgacttcattacagtgattggctctatcaccgagattatcctgactgattctaagttggtaaatacctctggcttcaatatgtcgtttctaaagctgtttcgcgccgccaggctcatcaagctccttcgtcagggctataccataagaattctcctgtggacatttgtccaatcctttaaggcattgccgtacgtgtgcctgttgattgccatgctgttcttcatctacgcaatcatcggcatgcaggtatttggtaacattaagctggacgaggaatcccatataaacagacataacaacttccggtcattcttcggaagcctgatgcttttgttccgcagcgccaccggtgaggcctggcaggaaattatgctctcatgtttgggcgagaagggctgtgagcccgacacgacggccccttctggtcagaatgaaaacgagagatgcggtacggatcttgcttatgtgtattttgtttcctttatattcttttgctcatttcttatgctgaatctgttcgtggctgtcattatggacaactttgaatacctgaccagagatagctccatcctgggaccccaccacctcgacgagtttgtgcgagtgtgggccgagtacgatcgagctgcttgtgggcgaatcccatacaaggacatgtacaaactggtcagggtgatcagtcctcccctgggcctaggggaaaactgcccatatcgcgtcgcttgtaaaaggcttgtcttaatgaacatgcccgtggccgaagacatgacagtacactttacatctacactcatggctctgatccggacagcgctggacatcaaaattgccaaggggggagccgacaggcaacagcttgactccgagctgcagaaagaaacattggcgatttggcctcacttatctcagaaaatgcttgacctgttagtccctatgcctaaggccagcgatctgaccgtcggcaaaatatacgctgccatgatgatcatggactactacaagcagtcgaaggttaaaaagcagcggcaacagttggaagagcagaaaaatgcacccatgttccaacgaatggagcccagcagtctacctcaggaaataattgctaatgcaaaagcacttccgtacttgcaacaggaccccgtgtctggactgagtggccggtcgggctacccgagcatgtccccactatctccacaggacatctttcagttggcttgcatggaccctgccgacgatggtcaattccaggaaaggcaaagcttggtggtcacagatccctcctccatgcgccggagcttctccactatcagagacaagcgctcgaattcatcatggctagaagagttctctatggagcgaagtagcgaaaatacatacaaatcgcgtcgcagatcctaccactcctccctccgcctatcagcccacagactgaattctgactcaggccacaaatctgatacccaccgcagcgggggacgggaaagaggtaggtccaaggagaggaaacatctgctcagtccagacgtgtccaggtgtaacagcgaggagagagggacacaggctgactgggagtctccggagaggcggcagtctagaagtccgtctgaaggcagaagccagacgccgaaccgtcagggaactggaagcctgtccgaaagctctattcccagtgtcagtgacaccagcaccccacggcggagcagacggcagcttccccccgttccccccaaaccccgcccgctcctgtcttacagctctctgatccggcatgcgggctccatctcccctcccgcggatggctctgaggaaggtagtccactgacgtcacaggctctcgaatctaacaacgcgtgtctgactgaaagctcaaactccccacatccccagcagtcacagcatgcctctccgcagagatatatttcggaaccgtatcttgctctgcacgaggatagccacgcatctgattgtggggaagaagaaacccttacgtttgaggcagccgtggcgacctccctgggtcggagcaataccattggtagtgcccctccgttgaggcattcatggcaaatgccgaatgggcactacaggagaagaaggagaggcggcccaggacctgggatgatgtgcggggccgtgaataacctgctctccgacacagaagaggatgataaatgttag

SEQ ID NO: 82104 - DNA, 1317 bp, Artificial Sequence
  derived and/or modified sequence
atggcccggtttggggaagcagtagtggcccgtcccggcagtggggacggcgattcagatcagtcccgaaatagacagggcactccagtgcccgctagcgggcaggcagctgcatacaagcagaccaaagcccagagggccagaactatggctctctataatcctattccagtgagacagaattgctttactgttaacagatctctcttcattttcggcgaggataatatcgttcgtaaatatgctaaaaagctcatcgattggccaccttttgagtatatgattctcgctacaattattgctaactgcattgtgctagcactagagcagcacttgcctgaagacgataaaaccccgatgagccgacgacttgagaagactgagccctattttatcggaattttctgtttcgaggcaggaatcaaaattgtggcgctcggcttcatcttccacaaagggagttatttgaggaatggctggaacgtgatggacttcatcgttgttctgagcgggatcctagcgactgctggcacccacttcaatacacatgtagacttgcggacactgagagccgtgagagttctgcggcccctgaagctcgtgtcaggcattccgagtctgcagatagtgctgaaatcaattatgaaggccatggtccctctcctgcagattgggttactgttgttcttcgccattctcatgttcgcaataatcggtctggagttctactccgggaaattgcaccgggcctgctttatgaacaactctggtattcttgagggcttcgaccctccacatccctgcggagtgcaaggatgcccagctgggtacgaatgcaaggactggattggccccaatgatgggattacccagtttgacaacattctgttcgccgtgcttaccgtgttccaatgcattacaatggaaggatggaccacagtgctgtataatactaacgacgcgctgggtgccacttggaattggctgtacttcattccccttattataattggttccttttttgttctgaacctggtgctcggtgtgctaagcggcgaatttgccaaagaacgagagcgggtcgagaaccgtcgcgcctttatgaagctacgcagacaacaacagattgaacgagaactcaatggctatagggcttggatcgacaaggctgaagaggtcatgctcgccgaagaaaacaaaaacgctggtacgagtgccctcgaagtcctgcgcagggccactatcaaacgcagtaggacggaggccatgacccgtgacagttcagacgagcactgcgttgacatctcctccgtgtag

SEQ ID NO: 82105 - DNA, 6756 bp, Artificial Sequence
  derived and/or modified sequence
atggctaggttcggcgaggcggtggtggcacggccagggtccggagatggagactctgaccagtctaggaatcgacagggcaccccggtgcccgctagtggccaggctgctgcctacaagcagactaaggcccaacgcgctaggacaatggctctatataaccctattcccgtgagacagaactgtttcaccgtgaacagaagtcttttcatttttggagaagataacattgtgcgcaaatacgctaagaagttaattgactggcctccgtttgagtacatgatcctggccacaattatagccaactgtatagtgttagctcttgagcagcaccttccagaagacgacaaaaccccaatgtctagacggctggaaaagactgagccctattttatagggatattctgttttgaggcaggcatcaagattgttgcgcttggttttattttccataagggcagttatctgcgtaatggttggaatgtcatggacttcatagtggtgcttagcggcatcctggcaacagcgggtacacactttaacacccacgttgatcttaggacccttcgtgcagtacgggtccttagacctctgaaattggtaagcggtatcccaagcctccagattgtcctcaaaagcattatgaaggccatggttcctttgttacagatcggtctcctcctttttttcgccatcctgatgttcgctataatcggcctcgagttttatagcgggaaattacacagggcatgttttatgaataatagcggcatacttgaaggttttgatccacctcacccttgcggtgtgcagggatgtccggccgggtacgaatgcaaggactggatcggccctaatgacggtataacccagttcgacaatatactgttcgctgttctgactgtattccagtgtataactatggagggatggaccaccgtgttgtacaacactaatgatgccctgggcgctacctggaactggctctactttattccgcttattattattggatcattcttcgtgctcaaccttgtcctgggcgtcctctcaggggaatttgcaaaggagcgcgagagagtcgagaaccgcagggccttcatgaaacttagaaggcagcagcagattgaacgcgaactcaatggctatagagcatggatcgataaagcagaggaggtaatgctggctgaggagaataaaaacgccgggacctccgcgctggaggtgttgaggagagcgaccattaagcggtctcgcaccgaagcgatgaccagggattcgtctgatgaacattgcgtggacatctcctccgtgggaacacccctggctcgcgcatccatcaaatccgccaaggtggacggagtgtcttactttagacacaaggaacggctgcttcggataagcattaggcatatggtgaagtctcaggtgttttattggatcgttctgagcttggtggccctgaacaccgcttgcgtagctattgtacaccacaatcagccgcagtggttaacccacttattgtactatgccgagtttctttttctcgggctttttctgctggaaatgagcttaaagatgtatggcatggggccgagactgtacttccattcatcatttaattgcttcgatttcggcgtgacggttggctccatatttgaggtggtgtgggctatcttcagaccaggcaccagcttcggaatcagtgttctgcgggctcttcggctactcaggatttttaagatcactaagtactgggcatccctgaggaacctcgtggtgtccctgatgtcatcaatgaaatcgatcatcagcctgttgttcctgttgtttctcttcatcgttgtgttcgctctgctgggaatgcagctcttcggaggaaggtttaatttcaacgacggtacgccaagtgctaacttcgacacctttcccgcagcaataatgaccgtgtttcagatattaaccggcgaggactggaacgaggtgatgtacaacgggattaggtctcagggtggagtatcatccggaatgtggtctgccatatacttcattgtactgaccctcttcggaaactacacactgctgaacgtttttctcgccatcgctgtggacaatctggcaaatgcgcaggagcttactaaagacgagcaagaggaagaggaagcttttaaccagaaacatgcactccaaaaggcgaaggaagtttctcccatgtcagccccgaacatgccttccattgaacgcgagcgaagaagaaggcaccacatgagcgtgtgggaacaaaggacatctcagcttcggaaacacatgcaaatgtcttcccaggaagcactgaaccgggaggaagctcctacaatgaatccactcaaccctctcaaccccttatccagcctgaatccccttaacgcccatccatctctctaccgccggcctcgagccattgagggcctggccttgggattggcgctggaaaagttcgaagaagaacgaattagcaggggtgggagccttaaaggagacggtggcgaccggagcagcgctctagacaaccaacggacacctctgtcactcgggcagcgggagcccccctggctcgcccgaccctgccatggcaactgcgatccaactcagcaggaggctggcggcggcgaagccgtggtgacatttgaagaccgtgctcgccatcgccaatcacagcgtcgaagccggcacagaagagtgcggaccgagggcaaggaatcttcgtccgctagtaggtctcggagtgcaagccaagagcgctcattggacgaggccatgcctacagagggggagaaagatcacgagctgagaggcaaccacggcgctaaggaacccaccatccaggaggaacgcgcccaggacctgcggcggacgaattctttaatggtgtcccggggcagcgggctggccggaggcctagatgaagccgacacccccttggttttaccccatcctgagttggaggttggcaagcacgtcgtgttgaccgagcaggagcctgagggttcgagcgaacaggctcttcttggcaatgtgcagcttgacatgggacgggtgatcagtcaatccgagcctgacctatcttgtatcactgctaacaccgacaaagccaccactgaatcgacctctgtgactgtcgcaatccctgacgtggaccccctcgttgatagcaccgtggtgcatatatccaacaagacagatggggaagcaagtcccctgaaggaagccgagattcgggaagacgaagaggaagtggagaagaagaaacagaaaaaagaaaaaagagaaaccggcaaggctatggtgccgcactcgtccatgttcatcttctccacaactaaccccattcgaagggcgtgtcactatattgtcaatctccgatatttcgaaatgtgcattctactggtcatcgccgcctcctccattgcgcttgctgccgaagacccggtgctgaccaacagcgagaggaacaaagtattacgttatttcgattacgtgttcaccggcgtcttcacgtttgaaatggtaataaaaatgattgatcaaggccttattctgcaggacggaagctactttagggacctttggaacattctggattttgtggtggttgtgggcgccctggtggcattcgccctggctaacgccctcggtacaaataaaggccgggacatcaaaaccattaagagtctccgtgtcttgcgcgtgctccgccccctgaagactattaagcgactccctaagctcaaggccgtatttgactgcgtggtgacatccctgaaaaacgtgtttaacatactcatagtatataagctgttcatgttcatcttcgctgtaattgccgtgcagctgttcaagggcaaattcttttattgcactgattcatctaaagacacagaaaaggagtgcattgggaattatgtagaccatgagaagaataaaatggaggtcaagggtcgagaatggaaacggcacgagtttcactatgacaatattatatgggcactgttgacgcttttcactgtgagcacgggcgagggatggccacaggtgcttcagcactccgtagatgtgactgaagaggatagaggaccgagcaggtcaaatcgaatggaaatgtccattttttacgtggtgtacttcgtggtgtttccattctttttcgtgaatatttttgtcgccctcatcattattacttttcaggaacagggtgacaagatgatggaggaatgttctctggagaagaacgagcgagcctgtatcgactttgctatctccgctaaacccctgacacgctatatgccacagaacaggcacaccttccaataccgggtttggcactttgttgtctccccctcctttgagtatactatcatggcaatgattgctttgaacaccgtggtccttatgatgaaatactacagtgcaccttgtacttacgagctcgcactgaaatatctcaacatagctttcactatggtcttttctttagaatgtgttcttaaagtgattgcctttgggttcctgaactattttagagatacatggaatattttcgactttattacggtgatagggagtattactgagattatcctaacggattccaaactggtaaacacttcgggattcaatatgtcatttctgaaactctttcgcgcagcccggcttatcaaactgctgcgtcagggatacactattagaatcctgctatggaccttcgtccaatcatttaaagcactgccctatgtgtgcctgctcattgcgatgctgttctttatctatgcgatcatcggcatgcaggtcttcggcaatatcaagctcgacgaagaatcgcacatcaatcggcacaacaatttcagatcattcttcggatctctgatgcttttattccgctctgctaccggggaagcatggcaggagattatgctaagctgcctgggggagaaaggttgcgagcctgacacaactgcaccgagcggacaaaacgagaatgagaggtgcggaacagacctggcctatgtgtactttgtgtccttcattttcttctgctcgtttcttatgctcaatctattcgtagccgtaatcatggataatttcgaatacctgaccagagattcatcgattcttggtccacatcaccttgatgagtttgtccgagtgtgggccgaatacgatcgggctgcctgcggaagaattcattatacagagatgtacgaaatgctcacactgatgtcccccccactaggccttggaaaacgctgtcctagcaaagtggcatacaaacgcttggtactgatgaatatgcccgtggctgaggatatgactgtccactttacgtcaaccctgatggccctaatccgcactgctctggatattaagatagccaagggtggagctgatcgccagcagttggacagcgagctacaaaaggagaccctggccatttggccccacctgagtcagaagatgctggacctcttagtcccaatgcccaaggcttcggatctcaccgtgggcaaaatttacgccgccatgatgattatggattactataagcagtccaaagtgaagaaacagaggcagcagctggaggagcagaagaacgcccctatgtttcagaggatggagccttcctctcttccccaagagataattgcgaatgccaaggcgctgccatacctgcagcaagaccctgtcagcgggcttagtgggcgcagcggctatccgtccatgagccctctttcacctcaggatattttccaactggcctgcatggatccggcagatgatggtcaattccaggagaggcagtcattagttgtcaccgatcccagttccatgaggcgatctttcagtacgatcagagataaacgttctaattccagctggctggaggaattctctatggagcggagttctgaaaacacatataaaagccgaagacggtcctaccacagttcgcttaggctctccgcgcacaggctaaactctgacagcggccataagtccgacacacatcggtccggaggtcgtgaaagaggacggtctaaggagcggaaacatctgttatctccagacgtcagccgctgcaattccgaagagagggggacccaggctgattgggaatcccctgaaagacggcagtccagaagtccgtccgaagggaggtcacagacaccaaacagacaagggacgggctccctgtctgagtcttctattccaagcgtgtccgacactagtacaccacgccgaagcaggagacagcttccgcctgtgccaccaaagccacgcccattgctgagctacagcagcctgatacgccatgcaggctcaataagcccaccagctgacgggtccgaagaaggctctccattaacatctcaggcactggagtccaacaacgcttgtctgaccgagagtagcaacagcccccacccccagcagtcccagcacgctagtccccaacgttatatctctgaaccttatctggccttacatgaggactcacacgccagtgactgcggtgaggaggagaccctgacctttgaggccgctgttgccacctctctggggcgctccaacacaatcggctcagcacctccattgaggcacagttggcaaatgccgaacggccactacaggcggcgtcggcgagggggcccgggtcccggaatgatgtgtggtgcggttaacaacctcttatcagatactgaagaggatgacaaatgctag

SEQ ID NO: 82106 - DNA, 6609 bp, Artificial Sequence
  derived and/or modified sequence
atggccctgtacaaccccatccctgtgcggcagaactgcttcaccgtgaacagaagcctcttcatctttggagaggacaacatcgtgaggaaatatgccaagaagctgattgactggcccccatttgagtacatgatcctggccaccatcatcgccaactgcatcgtgctggccctggagcagcacctgcctgaagatgacaagacccccatgagccggcggctggagaagacagagccctacttcatcggcatcttctgctttgaggccggcatcaagatcgtggccctgggcttcatcttccacaagggcagctacctgagaaatggctggaatgtgatggacttcatcgtggtgctgagcggcatcctggccacagctggcacccacttcaacacccacgtggacctgcggaccctgcgggctgtgcgggtgctgcggcccctgaagctggtgtctggcatccccagcctgcagatcgtgctgaagagcatcatgaaggccatggtgcccctgctgcagatcggcctgctgctcttctttgccatcctgatgtttgccatcatcggcctggagttctacagcggcaagctgcaccgggcctgcttcatgaacaacagcggcatcctggagggctttgatcctccccacccctgtggggtgcagggctgcccagctggctatgagtgcaaggactggattggccccaatgatggcatcacccagtttgacaacatcctgtttgctgtgctgaccgtcttccagtgcatcaccatggagggctggaccaccgtgctgtacaacaccaatgatgccctgggcgccacctggaactggctgtacttcatccccctcatcatcatcggcagcttctttgtgctgaacctggtgctgggcgtgctgagcggggagtttgccaaggagcgggagcgggtggagaacagaagagccttcatgaagctgcggcggcagcagcagatcgagcgggagctgaatggctaccgggcctggattgacaaggccgaggaggtgatgctggccgaggagaacaagaatgccggcaccagcgccctggaggtgctgcggcgggccaccatcaagaggagcaggacagaggccatgacccgggacagcagtgatgagcactgtgtggacatcagctctgtgggcacccccctggcccgggccagcatcaagagcgccaaggtggatggagtgtcctacttccgccacaaggagcggctgctgcgcatcagcatccgccacatggtgaagagccaggtgttctactggatcgtgctgagcctggtggccctgaacacagcctgtgtggccatcgtgcaccacaaccagccccagtggctgacccacctgctgtactatgcagagttcctgttcctgggcctcttcctgctggagatgagcctgaagatgtatggcatgggcccccggctgtacttccacagcagcttcaactgctttgattttggagtgacagtgggcagcatctttgaggtggtgtgggccatcttccggcccggcaccagctttggcatctctgtgctgcgggccctgcggctgctgcgcatcttcaagatcaccaagtactgggccagcctgaggaacctggtggtgtccctgatgagctccatgaagagcatcatcagcctgctcttcctgctcttcctgttcatcgtggtgtttgccctgctgggcatgcagctgtttggaggccgcttcaacttcaatgatggcacccccagcgccaactttgacaccttccctgctgccatcatgaccgtcttccagatcctgaccggggaggactggaatgaggtgatgtacaacggcatccgcagccagggcggcgtgagcagcggcatgtggagcgccatctacttcatcgtgctgaccctgtttggaaactacaccctgctgaatgtgttcctggccatcgctgtggacaacctggccaatgcccaggagctgaccaaggatgagcaggaggaggaggaggccttcaaccagaagcacgccctgcagaaggccaaggaggtgagccccatgtctgcccccaacatgcccagcattgagcgggagaggagaagaagacaccacatgtctgtgtgggagcagaggaccagccagctgaggaagcacatgcagatgagcagccaggaggccctgaaccgggaggaggcccccaccatgaaccccctgaaccccctgaaccccctgagcagcctgaaccccctgaatgcccaccccagcctgtaccgccggccccgggccatcgagggcctggccctgggcctggccctggagaagtttgaggaggagcgcatcagcagaggaggcagcctgaagggagatggaggagacaggagcagcgccctggacaaccagaggacccccctgagcctgggccagcgggagcccccctggctggcccggccctgccacggcaactgtgaccccacccagcaggaggccggcggcggggaggccgtggtgacctttgaagatcgggcccggcaccggcagagccagaggaggagccgccaccggcgggtgaggacagagggcaaggagagcagcagcgccagccgcagccgcagcgccagccaggagaggagcctggatgaggccatgcccacagaaggagagaaggaccacgagctgcggggcaaccacggggccaaggagcccaccatccaggaggagcgggcccaggacctgcggaggaccaacagcctgatggtgtcccggggcagcggcctggccggcggcctggatgaggccgacacccccctggtgctgccccaccctgagctggaggtgggcaagcacgtggtgctgacagagcaggagcctgagggcagcagcgagcaggccctgctgggcaatgtgcagctggacatgggccgggtcatcagccagagcgagccagacctgagctgcatcacagccaacacagacaaggccaccacagagagcacctctgtgacagtggccatcccagatgtggaccccctggtggacagcacagtggtgcacatcagcaacaagacagatggagaggccagccccctgaaggaggccgagatccgggaggatgaggaggaggtggagaagaagaagcagaagaaggagaagcgggagaccgggaaggccatggtgccccacagctccatgttcatcttcagcaccaccaaccccatcagaagagcctgccactacatcgtgaacctgcgctactttgagatgtgcatcctgctggtgattgctgccagcagcatcgccctggccgcagaagatcctgtgctgaccaacagcgagaggaacaaggtgctgcgctactttgattatgtgttcaccggggtcttcacctttgagatggtgatcaagatgattgaccagggcctcatcctgcaggacggcagctacttccgggacctgtggaacatcctggactttgtggtggtggtgggcgccctggtggcctttgccctggccaacagcatgaagaccaacaagggccgggacatcaagaccatcaagagcctgcgggtgctgcgggtgctgcggcccctgaagaccatcaagaggctgcccaagctgaaggctgtgtttgactgtgtggtgaccagcctgaagaatgtgttcaacatcctgattgtgtacaagctgttcatgttcatctttgctgtgattgctgtgcagctgttcaagggcaagttcttctactgcacagacagcagcaaggacacagagaaggagtgcatcggcaactacgtggaccacgagaagaacaagatggaggtgaagggccgggagtggaagagacatgagttccactatgacaacatcatctgggccctgctgaccctcttcaccgtgtccactggagagggctggccccaggtgctgcagcacagcgtggatgtgacagaagaagatcggggccccagccgcagcaacaggatggagatgagcatcttctacgtggtgtactttgtggtgttccccttcttctttgtgaacatctttgtggccctgatcatcatcaccttccaggagcagggcgacaagatgatggaggagtgcagcctggagaagaatgaaagagcctgcatcgactttgccatcagcgccaagcccctgacccgctacatgccccagaacagacacaccttccagtacagagtgtggcactttgtggtgagccccagctttgagtacaccatcatggccatgattgccctgaacacagtggtgctgatgatgaagtactacagcgccccctgcacctatgagctggccctgaagtacctgaacatcgccttcaccatggtgttcagcctggagtgtgtgctgaaggtgattgccttcggcttcctgaactacttccgggacacctggaacatctttgacttcatcaccgtgattggcagcatcacagagatcatcctgacagacagcaagctggtgaacaccagcggcttcaacatgtccttcctgaagctgttccgggccgcccggctcatcaagctgctgcggcagggctacaccatccgcatcctgctgtggacctttgtgcagagcttcaaggccctgccctacgtgtgcctgctgattgccatgctgttcttcatctatgccatcatcggcatgcaggtgtttggaaacatcaagctggatgaggagagccacatcaacagacacaacaacttccgctccttcttcggcagcctgatgctgctcttccgcagcgccactggagaggcctggcaggagatcatgctgagctgcctgggggagaagggctgtgagccagacaccacagcccccagcggccagaatgaaaatgaaagatgtggcacagacctggcctacgtgtactttgtgtccttcatcttcttctgcagcttcctgatgctgaacctgtttgtggccgtcatcatggacaactttgagtacctgacccgggacagcagcatcctgggcccccaccacctggatgaatttgtgcgggtgtgggccgagtatgaccgggccgcctgtggccgcatcccctacaaggacatgtacaagctggtgcgggtcatcagcccccccctgggcctgggggagaactgcccctacagagtggcctgcaagaggctggtgctgatgaacatgcctgtggccgaggacatgacagtgcacttcaccagcaccctgatggccctgatcagaacagccctggacatcaagatcgccaagggcggcgctgaccggcagcagctggacagcgagctgcagaaggagaccctggccatctggccccacctgagccagaagatgctggacctgctggtgcccatgcccaaggccagtgacctgactgtgggcaagatctatgctgccatgatgatcatggactactacaagcagagcaaggtgaagaagcagaggcagcagctggaggagcagaagaatgcccccatgttccagaggatggagcccagcagcctgccccaggagatcatcgccaatgccaaggccctgccctacctgcagcaggaccctgtgtctggcctgagcggccgcagcggctaccccagcatgagccccctgagcccccaggacatcttccagctggcctgcatggaccctgcagatgatggccagttccaggagcggcagagcctggtggtgacagaccccagctccatgagaagaagcttcagcaccatccgggacaagaggagcaacagctcctggctggaggagttctccatggagaggagcagcgagaacacctacaagagcagaagaagaagctaccacagcagcctgcggctgagcgcccaccggctgaacagcgacagcggccacaagagtgacacccacaggtctgggggccgggagcggggccgcagcaaggagaggaagcacctgctgagcccagatgtgagccgctgcaacagcgaggagcggggcacccaggccgactgggagagccctgagcggcggcagagccgcagccccagcgagggccgcagccagacccccaaccggcagggcaccggcagcctgtctgagagcagcatccccagcgtgtctgacaccagcaccccccggcgcagccggcggcagctgccccctgtgccccccaagccccggcccctgctgagctacagcagcctcatcagacatgctggcagcatcagccccccagcagatggcagcgaggagggcagccccctgaccagccaggccctggagagcaacaatgcctgcctgacagagagcagcaacagcccccacccccagcagagccagcacgccagcccccagcgctacatcagcgagccctacctggccctgcacgaggacagccacgccagtgactgtggggaggaggagaccctgacctttgaagctgctgtggccaccagcctgggccgcagcaacaccatcggcagcgccccacccctgcggcacagctggcagatgcccaacggccactacagaagaagaagaagaggaggccctggccctggcatgatgtgtggggctgtgaacaacctgctgagtgacacagaggaggatgacaagtgctag

SEQ ID NO: 82107 - DNA, 1317 bp, Artificial Sequence
  derived and/or modified sequence
atggccaggtttggagaggccgtggtggcccggcccggcagcggagatggagacagcgaccagagcaggaaccggcagggcacccctgtgcctgccagcggccaggccgccgcctacaagcagaccaaggcccagagggcccggaccatggccctgtacaaccccatccctgtgcggcagaactgcttcaccgtgaacagaagcctcttcatctttggagaggacaacatcgtgaggaaatatgccaagaagctgattgactggcccccatttgagtacatgatcctggccaccatcatcgccaactgcatcgtgctggccctggagcagcacctgcctgaagatgacaagacccccatgagccggcggctggagaagacagagccctacttcatcggcatcttctgctttgaagctggcatcaagatcgtggccctgggcttcatcttccacaagggcagctacctgagaaatggctggaatgtgatggacttcatcgtggtgctgagcggcatcctggccacagctggcacccacttcaacacccacgtggacctgcggaccctgcgggctgtgcgggtgctgcggcccctgaagctggtgtctggcatccccagcctgcagatcgtgctgaagagcatcatgaaggccatggtgcccctgctgcagatcggcctgctgctcttctttgccatcctgatgtttgccatcatcggcctggagttctacagcggcaagctgcaccgggcctgcttcatgaacaacagcggcatcctggagggctttgaccccccccacccctgtggggtgcagggctgcccagctggctatgagtgcaaggactggattggccccaatgatggcatcacccagtttgacaacatcctgtttgctgtgctgactgtgttccagtgcatcaccatggagggctggaccaccgtgctgtacaacaccaatgatgccctgggcgccacctggaactggctgtacttcatccccctcatcatcatcggcagcttctttgtgctgaacctggtgctgggcgtgctgtctggagaatttgccaaggagcgggagcgggtggagaacagaagagccttcatgaagctgcggcggcagcagcagatcgagcgggagctgaatggctaccgggcctggattgacaaggccgaggaggtgatgctggccgaggagaacaagaatgccggcaccagcgccctggaggtgctgcggcgggccaccatcaagaggagcaggacagaggccatgacccgggacagcagtgatgagcactgtgtggacatcagctctgtgtag

SEQ ID NO: 82108 - DNA, 6756 bp, Artificial Sequence
  derived and/or modified sequence
atggccaggtttggagaggccgtggtggcccggcccggcagcggagatggagacagcgaccagagcaggaaccggcagggcacccctgtgcctgccagcggccaggccgccgcctacaagcagaccaaggcccagagggcccggaccatggccctgtacaaccccatccctgtgcggcagaactgcttcaccgtgaacagaagcctcttcatctttggagaggacaacatcgtgaggaaatatgccaagaagctgattgactggcccccatttgagtacatgatcctggccaccatcatcgccaactgcatcgtgctggccctggagcagcacctgcctgaagatgacaagacccccatgagccggcggctggagaagacagagccctacttcatcggcatcttctgctttgaagctggcatcaagatcgtggccctgggcttcatcttccacaagggcagctacctgagaaatggctggaatgtgatggacttcatcgtggtgctgagcggcatcctggccacagctggcacccacttcaacacccacgtggacctgcggaccctgcgggctgtgcgggtgctgcggcccctgaagctggtgtctggcatccccagcctgcagatcgtgctgaagagcatcatgaaggccatggtgcccctgctgcagatcggcctgctgctcttctttgccatcctgatgtttgccatcatcggcctggagttctacagcggcaagctgcaccgggcctgcttcatgaacaacagcggcatcctggagggctttgaccccccccacccctgtggggtgcagggctgcccagctggctatgagtgcaaggactggattggccccaatgatggcatcacccagtttgacaacatcctgtttgctgtgctgactgtgttccagtgcatcaccatggagggctggaccaccgtgctgtacaacaccaatgatgccctgggcgccacctggaactggctgtacttcatccccctcatcatcatcggcagcttctttgtgctgaacctggtgctgggcgtgctgtctggagaatttgccaaggagcgggagcgggtggagaacagaagagccttcatgaagctgcggcggcagcagcagatcgagcgggagctgaatggctaccgggcctggattgacaaggccgaggaggtgatgctggccgaggagaacaagaatgccggcaccagcgccctggaggtgctgcggcgggccaccatcaagaggagcaggacagaggccatgacccgggacagcagtgatgagcactgtgtggacatcagctctgtgggcacccccctggcccgggccagcatcaagagcgccaaggtggatggagtgtcctacttccgccacaaggagcggctgctgcgcatcagcatccgccacatggtgaagagccaggtgttctactggatcgtgctgagcctggtggccctgaacacagcctgtgtggccatcgtgcaccacaaccagccccagtggctgacccacctgctgtactatgcagagttcctgttcctgggcctcttcctgctggagatgagcctgaagatgtatggcatgggcccccggctgtacttccacagcagcttcaactgctttgattttggagtgacagtgggcagcatctttgaggtggtgtgggccatcttccggcccggcaccagctttggcatctctgtgctgcgggccctgcggctgctgcgcatcttcaagatcaccaagtactgggccagcctgaggaacctggtggtgtccctgatgagctccatgaagagcatcatcagcctgctcttcctgctcttcctgttcatcgtggtgtttgccctgctgggcatgcagctgtttggaggccgcttcaacttcaatgatggcaccccatctgccaactttgacaccttccctgctgccatcatgacagtgttccagatcctgactggagaggactggaatgaggtgatgtacaacggcatccgcagccagggcggcgtgagcagcggcatgtggagcgccatctacttcatcgtgctgaccctgtttggaaactacaccctgctgaatgtgttcctggccatcgctgtggacaacctggccaatgcccaggagctgaccaaggatgagcaggaggaggaggaggccttcaaccagaagcacgccctgcagaaggccaaggaggtgagccccatgtctgcccccaacatgcccagcattgaaagagagaggagaagaagacaccacatgtctgtgtgggagcagaggaccagccagctgaggaagcacatgcagatgagcagccaggaggccctgaaccgggaggaggcccccaccatgaaccccctgaaccccctgaaccccctgagcagcctgaaccccctgaatgcccaccccagcctgtacagaagaccccgggccatcgagggcctggccctgggcctggccctggagaagtttgaggaggagcgcatcagccggggcggcagcctgaagggagatggaggagacaggagcagcgccctggacaaccagaggacccccctgagcctgggccagcgggagcccccctggctggcccggccctgccacggcaactgtgaccccacccagcaggaggccggcggcggggaggccgtggtgacctttgaggaccgggcccggcaccggcagagccagaggaggagccgccacagaagagtgaggacagagggcaaggagagcagcagcgccagccgcagccgcagcgccagccaggagaggagcctggatgaggccatgcccacagaaggagagaaggaccacgagctgcggggcaaccacggggccaaggagcccaccatccaggaggagcgggcccaggacctgcggaggaccaacagcctgatggtgtcccggggcagcggcctggccggcggcctggatgaagctgacacccccctggtgctgccccaccctgagctggaggtgggcaagcacgtggtgctgacagagcaggagcctgagggcagcagcgagcaggccctgctgggcaatgtgcagctggacatgggccgggtcatcagccagagcgagccagacctgagctgcatcacagccaacacagacaaggccaccacagagagcacctctgtgacagtggccatcccagatgtggaccccctggtggacagcacagtggtgcacatcagcaacaagacagatggagaggccagccccctgaaggaggccgagatcagagaagatgaggaggaggtggagaagaagaagcagaagaaggagaagcgggagaccgggaaggccatggtgccccacagctccatgttcatcttcagcaccaccaaccccatccggcgggcctgccactacatcgtgaacctgcgctactttgagatgtgcatcctgctggtgattgctgccagcagcatcgccctggccgctgaggaccctgtgctgaccaacagcgagaggaacaaggtgctgcgctactttgattatgtgttcaccggggtcttcacctttgagatggtgatcaagatgattgaccagggcctcatcctgcaggacggcagctacttccgggacctgtggaacatcctggactttgtggtggtggtgggcgccctggtggcctttgccctggccaatgccctgggcaccaacaagggccgggacatcaagaccatcaagagcctgcgggtgctgcgggtgctgcggcccctgaagaccatcaagaggctgcccaagctgaaggctgtgtttgactgtgtggtgaccagcctgaagaatgtgttcaacatcctgattgtgtacaagctgttcatgttcatctttgctgtgattgctgtgcagctgttcaagggcaagttcttctactgcacagacagcagcaaggacacagagaaggaatgtattggcaactacgtggaccacgagaagaacaagatggaggtgaagggccgggagtggaagagacatgagttccactatgacaacatcatctgggccctgctgaccctcttcaccgtgtccactggagagggctggccccaggtgctgcagcacagcgtggatgtgacagaggaggaccggggccccagccgcagcaacaggatggagatgagcatcttctacgtggtgtactttgtggtgttccccttcttctttgtgaacatctttgtggccctgatcatcatcaccttccaggagcagggcgacaagatgatggaggagtgcagcctggagaagaatgaaagagcctgcatcgactttgccatcagcgccaagcccctgacccgctacatgccccagaacagacacaccttccagtacagagtgtggcactttgtggtgagccccagctttgagtacaccatcatggccatgattgccctgaacacagtggtgctgatgatgaagtactacagcgccccctgcacctatgagctggccctgaagtacctgaacatcgccttcaccatggtgttcagcctggagtgtgtgctgaaggtgattgccttcggcttcctgaactacttccgggacacctggaacatctttgacttcatcaccgtcatcggcagcatcacagagatcatcctgacagacagcaagctggtgaacaccagcggcttcaacatgtccttcctgaagctgttccgggccgcccggctcatcaagctgctgcggcagggctacaccatccgcatcctgctgtggacctttgtgcagagcttcaaggccctgccctacgtgtgcctgctgattgccatgctgttcttcatctatgccatcatcggcatgcaggtgtttggaaacatcaagctggatgaggagagccacatcaacagacacaacaacttccgctccttcttcggcagcctgatgctgctcttccgcagcgccaccggggaggcctggcaggagatcatgctgagctgcctgggggagaagggctgtgagccagacaccacagcccccagcggccagaatgaaaatgaaagatgtggcacagacctggcctacgtgtactttgtgtccttcatcttcttctgcagcttcctgatgctgaacctgtttgtggccgtcatcatggacaactttgagtacctgacccgggacagcagcatcctgggcccccaccacctggatgaatttgtgcgggtgtgggccgagtatgacagagctgcctgtggccgcatccactacacagagatgtatgagatgctgaccctgatgagcccccccctgggcctgggcaagcgctgccccagcaaggtggcctacaagaggctggtgctgatgaacatgcctgtggccgaggacatgacagtgcacttcaccagcaccctgatggccctgatcagaacagccctggacatcaagatcgccaagggcggcgctgaccggcagcagctggacagcgagctgcagaaggagaccctggccatctggccccacctgagccagaagatgctggacctgctggtgcccatgcccaaggccagtgacctgactgtgggcaagatctatgctgccatgatgatcatggactactacaagcagagcaaggtgaagaagcagaggcagcagctggaggagcagaagaatgcccccatgttccagaggatggagcccagcagcctgccccaggagatcatcgccaatgccaaggccctgccctacctgcagcaggaccctgtgtctggcctgagcggccgcagcggctaccccagcatgagccccctgagcccccaggacatcttccagctggcctgcatggaccctgcagatgatggccagttccaggagcggcagagcctggtggtgacagaccccagctccatgaggaggagcttcagcaccatccgggacaagaggagcaacagctcctggctggaggagttctccatggagaggagcagcgagaacacctacaagagcagaagaagaagctaccacagcagcctgcggctgagcgcccaccggctgaacagcgacagcggccacaagagtgacacccacaggtctgggggccgggagcggggccgcagcaaggagaggaagcacctgctgagcccagatgtgagccgctgcaacagcgaggagcggggcacccaggccgactgggagagccctgagcggcggcagagccgcagccccagcgagggccgcagccagacccccaaccggcagggcaccggcagcctgtctgagagcagcatccccagcgtgtctgacaccagcaccccaagaagaagccggcggcagctgccccctgtgccccccaagccccggcccctgctgagctacagcagcctcatcagacatgctggcagcatcagccccccagcagatggcagcgaggagggcagccccctgaccagccaggccctggagagcaacaatgcctgcctgacagagagcagcaacagcccccacccccagcagagccagcacgccagcccccagcgctacatcagcgagccctacctggccctgcacgaggacagccacgccagtgactgtggggaggaggagaccctgacctttgaggccgctgtggccaccagcctgggccgcagcaacaccatcggcagcgccccacccctgcggcacagctggcagatgcccaacggccactacagaagaagaagaagaggaggccctggccctggcatgatgtgtggggctgtgaacaacctgctgagtgacacagaagaagatgacaagtgctag

SEQ ID NO: 82109 - DNA, 6609 bp, Artificial Sequence
  derived and/or modified sequence
atggccctgtacaaccccatccccgtgcggcagaactgcttcaccgtcaacagaagcctattcatcttcggggaagacaacatcgtcaggaagtacgctaaaaagctgattgattggcctcccttcgagtatatgatcctggccaccatcatcgcaaactgcattgttctggctctggaacagcacctgccagaggatgataagacccccatgagtcggcgtcttgagaaaacagagccgtattttattggcatattttgcttcgaagccggtattaagattgtggccctcggcttcatcttccataaaggatcctatcttaggaacgggtggaatgtgatggacttcatcgtcgttttatcggggatcttggcaaccgcaggaacacactttaacactcacgttgacctgcggaccctccgggcagtaagggtcctgagaccccttaagctggtgtctggtatcccaagtctacagattgtgctcaaatccatcatgaaggctatggtgccgctcctccagattggtctgctcttgttctttgccatcttgatgttcgcaattatcggcctggagttctactcaggcaagctacatagggcgtgttttatgaacaacagcggaatactcgagggtttcgatcccccccatccatgtggggtacaagggtgccccgcagggtatgagtgcaaagattggattggccctaacgacggcatcacacaatttgacaacattctgtttgcagtgctcacagtttttcagtgcatcaccatggaagggtggactacagtattgtacaatactaacgacgccctgggcgccacatggaattggttgtactttatcccactgataataatcggttcattctttgtactcaacttggtgctgggagttctgagcggagaattcgcaaaggaacgggaacgggttgaaaaccggcgagcattcatgaaactgcggagacagcagcagattgaacgggagctcaacggttatcgggcgtggattgacaaagccgaagaagtaatgctagcagaggagaacaagaacgccggtacaagcgctttagaggtccttcggagagccactatcaagcggtctcgcacagaggccatgactcgggacagttctgacgaacactgtgtggatatttctagtgtgggcactcctttggcacgcgcttctattaagtccgctaaggtggatggagtcagctatttcaggcataaagagcgactcttgaggatttccatacggcacatggtgaagagccaagtgttctactggattgtactgagcctcgtcgcattgaataccgcatgcgtcgccatcgtccaccacaatcagccccagtggttaacccatctcttgtactatgctgagttcctgttcctcggactatttttgctggaaatgagcctcaagatgtatggaatggggccgcgcctttacttccactcctcttttaattgctttgattttggagtgaccgtaggatcgatctttgaggtcgtatgggctatttttcgcccaggtacatcctttgggattagcgtgttgcgggcgctgcgcttactcagaatatttaagattaccaagtactgggcctccctgagaaatcttgtggtctccttaatgtcttccatgaaatcaatcatctctttgctgttcttgctgttcttatttatagtcgtctttgccctcttggggatgcagctgtttggcggacgcttcaactttaacgatggaaccccatcagcgaacttcgatacctttcccgctgcaatcatgacggtgtttcagattctaactggcgaagattggaacgaggtgatgtacaatggaatccgatcccaggggggcgtgagttctggcatgtggtcagccatctattttatcgtgcttacactgttcggcaactatacactgcttaatgtattcctggccatagccgttgacaacttggctaacgcgcaggagttgacaaaagacgagcaggaggaagaagaagctttcaatcagaaacacgctctccagaaagcaaaggaagtgtccccaatgtccgctcccaacatgccttccattgaacgggaacgcaggaggcgtcatcatatgtcagtttgggagcagaggacatcccagctgcgcaaacatatgcagatgagctctcaggaggctctgaatcgtgaggaagccccaaccatgaatcctcttaacccactcaaccctctgtcgtcgctgaacccactaaatgcccacccttccctgtaccgaagacctcgggccatagagggccttgccctgggattagccctggagaagtttgaggaggagcggatctctagaggaggtagcctgaagggcgacggcggggatagatccagcgccctggataatcagaggacccctctgagcctagggcagagggaacctccgtggctagctcggccttgtcacggcaattgcgatcccacacagcaggaagccggcggaggtgaggccgttgtgacctttgaagatcgcgcccggcacaggcagtctcaacgacgtagccggcaccgtcgagtgagaacagagggcaaggaatcatctagcgcctctcgatcaaggagcgcatcccaggaaaggtcactggatgaggcgatgccaacagaaggagaaaaggatcatgagttaagagggaaccacggtgccaaggagccaaccatccaggaagaaagagcacaagacttgcgcaggactaattccctgatggtctccagaggatctggcctagccggaggactcgacgaggcagatacccccttggtgctgcctcacccggaactcgaggttgggaagcatgtggtcctcacagagcaggagcccgagggctcttccgagcaggcactgctaggaaatgtgcagctggatatggggagagtgatttcccagtctgagccagacctgtcttgtattaccgccaatacggataaggctaccacagaaagcacgagtgtgacagtggccattccagacgtcgatccactggttgacagcacggtggttcacatctccaataagaccgatggggaagcatcaccactgaaagaggccgagatccgggaggacgaggaagaagtcgagaaaaaaaagcaaaaaaaggagaaaagggagaccgggaaagctatggtgccccactcctctatgttcatcttttccactacaaatcctataaggcgggcctgtcattatattgttaacctgcgatacttcgagatgtgtatactactggtgattgccgcctccagcattgccctggccgcagaggaccccgtccttaccaatagcgagagaaacaaagtgttaagatacttcgattatgtgttcactggtgtgttcaccttcgagatggtgatcaagatgatcgatcagggcttgatcctgcaggacgggtcatattttagagacttatggaatatcctcgacttcgttgtggtggtgggtgctctggtggcattcgcattagcaaacagtatgaagactaacaaaggtcgtgatattaaaactatcaaaagcctgagagttctccgcgttctgaggcccctgaaaacaattaagagactacctaagttgaaggccgtttttgattgcgtcgtcacctccctcaaaaatgtgttcaacatactgatagtttacaaattgtttatgtttatatttgcagtcattgccgtccagctctttaaaggaaagtttttttattgcactgacagctccaaagacacggagaaggagtgtattgggaactatgtagaccacgaaaagaataagatggaagttaagggaagggagtggaagcggcacgaattccattacgataatattatctgggcgctgttaactctgttcaccgtctccaccggggagggttggcctcaagtgctgcagcacagcgttgatgttacagaggaggacagagggccgtcccgcagcaatcggatggaaatgtccattttttacgtcgtgtacttcgtggtgttcccattcttcttcgtgaacattttcgtggccctcattatcattacttttcaggaacagggagataagatgatggaggagtgcagcctggagaaaaatgaaagggcatgcattgatttcgccatcagcgccaaacccctgacacgatatatgccccagaaccggcacacttttcaataccgtgtgtggcactttgtggtttccccatcctttgaatacacaatcatggccatgatagctcttaatacagtggtcctcatgatgaaatactactcagcaccctgcacttacgaattggcccttaaatatctgaatatcgcgtttaccatggtgtttagtttggaatgcgttctcaaagtcattgcctttggatttttgaactatttccgagacacctggaacatctttgactttatcactgtgattggatctataacggagatcatcctgaccgacagtaaactggtcaacactagcggattcaatatgtcgttccttaaactgtttcgcgccgcgagattgatcaagttgctgcggcaaggttatacaattcgcattttactgtggacctttgtccagagcttcaaagctctgccctacgtatgcctgcttattgccatgctcttctttatatatgcaattattggaatgcaggtctttgggaacatcaagctggacgaggagagtcatatcaatagacacaataacttccgctctttttttggcagcctcatgctgctgttcagatccgcgaccggcgaagcttggcaggaaattatgctttcatgtctcggtgagaagggatgcgaacccgacaccacggcccccagcgggcagaacgaaaatgagagatgcgggacagatctggcatatgtgtatttcgtctcatttattttcttctgctcattcctgatgcttaatttatttgtcgccgttatcatggataatttcgagtatctgactcgggactcatccattctggggccccaccatttagatgagtttgtacgggtgtgggctgagtatgatcgcgcagcttgtgggcggattccctataaggacatgtacaagctagtcagggtgatatcccctccactgggcctgggtgaaaattgtccttaccgggtcgcatgcaagcgccttgtgctgatgaatatgccagtggccgaggacatgacagttcattttacctcaaccctgatggccctcatcagaacggctttagacatcaagatagcgaagggaggcgctgatcgtcagcagcttgacagcgaattacagaaggagaccctcgctatttggcctcacctgagccagaagatgctggatctattggtgcctatgccaaaggcctccgatctgacagtggggaaaatctatgcagcgatgatgatcatggattattataagcaatccaaagtgaaaaaacagcggcagcaattagaggagcagaagaatgctccaatgttccagcgcatggagccatcttccctgccccaggagattattgctaacgccaaagctttaccctatctgcagcaagacccagtgtcagggctatcagggcggtcggggtacccatccatgagtcccctctcgccgcaagatatctttcaactggcttgcatggatcccgccgacgacggccagttccaggagcgacagtccctagtggtgactgatccgtcgtccatgcgtcgctcattcagcacaattcgtgataaacgttctaacagtagctggttagaggaattctctatggagcgctcgtcagaaaacacatacaaatctcgaaggaggagttatcattcctcactgcgcctctcagcccaccgtcttaactccgactccggtcacaagagtgatacccatcggtccggaggccgcgagcggggtcgaagtaaggagagaaaacatctgttgagccctgacgtctccaggtgcaacagcgaagaaagaggcactcaggccgattgggaaagccccgagaggcgccagagcagaagtcccagtgaggggaggagccagactccaaacagacaagggaccggaagcttgagtgaatcctctatcccgtctgtcagcgatacctctacgccgcgccggagccgaaggcagcttccgcctgtcccccccaagccaaggccccttttgagctactcttctttgattagacatgctggtagcatctccccgcccgctgatggctccgaagaaggcagccccctgacctctcaggcacttgaatcgaacaatgcgtgtcttacggagagcagcaactctccccatccgcagcagagtcagcatgcgtctccgcaaaggtacatctccgaaccatacctggctttacatgaagactcccatgcttcagattgcggagaggaggagactctgacttttgaggcagccgtggccacctctctgggcaggtccaacacaatcggatctgcacctcctttaagacattcgtggcaaatgcctaacggtcactaccgccgcaggaggcggggtggtccagggcctggaatgatgtgcggagccgtgaacaacctcttaagcgacaccgaggaggatgacaaatgctag

SEQ ID NO: 82110 - DNA, 1317 bp, Artificial Sequence
  derived and/or modified sequence
atggcccggttcggcgaggccgtggtggcccggcccggcagcggcgatggcgactctgaccaatcccgaaatagacagggaactccagtgcccgcttctggacaagctgcagcctacaagcaaactaaagcacaaagagctcgtacgatggccctgtataatccaattcccgttcgtcaaaattgctttaccgttaaccgctcattattcatttttggggaagacaatatagtgcgcaagtacgctaagaaacttattgattggccgccctttgaatacatgatcctggccacaataatcgccaattgtattgtgctcgctttggaacagcacttacctgaggatgataaaactcctatgagtcgacggcttgagaaaactgagccttactttattggaattttctgtttcgaagccggaatcaagatagtcgcactgggatttatattccacaaaggcagttacctccggaatggctggaatgtaatggatttcattgtggtcctgagcggtatactggcaaccgccggcactcactttaatacacacgtggatctaagaaccctaagagcagttagagtgttacgccctctgaagttagtttcagggataccttccctgcagattgttctgaaatcaatcatgaaggccatggtccctttactgcaaatcggactgcttctctttttcgccatcctcatgttcgccatcattggactcgaattctacagcggtaagctgcacagagcttgcttcatgaataactccggcatcctggaaggctttgatccaccacacccttgtggcgtgcaaggatgtcctgcagggtacgagtgcaaggactggatcgggcccaacgacggcatcacgcagttcgataacatcctgtttgcggtactgaccgtctttcaatgtatcaccatggaggggtggaccaccgtgctgtataacacgaacgatgccctgggcgccacttggaactggctttatttcattcctctgatcatcattggttcttttttcgtgctcaatctggtcttaggggtcctgagcggcgagttcgctaaagagcgggaaagggtcgagaatagacgtgcctttatgaaacttagacgccagcagcaaattgagcgcgaactgaatggataccgggcctggatagacaaagcagaagaagtcatgttggccgaggaaaacaaaaacgctggaactagcgcattggaagttctgagacgggcaaccatcaaaagatcccggaccgaggccatgactcgcgactccagtgatgaacattgtgtcgacatctctagcgtatag

SEQ ID NO: 82111 - DNA, 6756 bp, Artificial Sequence
  derived and/or modified sequence
atggcccggttcggcgaggccgtggtggcccggcccggcagcggcgatggcgatagtgaccagtctagaaatcgacaggggacacctgttccggcctcaggtcaagccgccgcctataaacagaccaaagcccagcgggcccggaccatggccctctacaatcccataccggttagacaaaactgcttcaccgtgaatcgatccctgtttattttcggcgaagataacattgtgaggaagtatgccaaaaaattgattgactggcccccctttgagtacatgatccttgccacaataatcgcaaactgtattgtcctagcccttgagcagcacctaccagaagacgacaagacacccatgagccggaggctggagaaaaccgagccctacttcattggaatcttctgctttgaggcaggcatcaaaatcgtggcactgggcttcatattccacaaagggagctacctacggaatggatggaacgttatggacttcatcgtcgtcttgtccgggatccttgccacggctggcacccattttaacactcacgtggatctgaggactctgcgagccgtcagagtgcttagacctcttaaactggttagcggcataccatctttacagatcgtgcttaaatccatcatgaaggccatggttcctctgctgcagattggcctgctcctgttttttgcgattctaatgtttgccattatcggacttgagttctactcaggaaagctgcatcgcgcgtgttttatgaacaactccggaattctggagggcttcgacccaccacacccctgtggagtacaagggtgccctgccggatatgagtgcaaagattggatcggtccaaatgacggaatcacgcagtttgataatatcctctttgcagtacttactgtcttccaatgtattaccatggagggctggaccactgttttgtataacaccaatgacgccctgggcgcaacctggaactggctgtactttatccccctcatcatcatcggttctttctttgtactgaacctggtcttaggggtactctctggcgagttcgccaaggagcgggagagagtggagaaccggcgtgctttcatgaagctccgaaggcaacagcagatcgagcgggagctgaatggatatcgcgcctggatcgacaaggccgaagaggttatgctggcagaagagaacaagaatgcaggcacttcagcgctggaagtactgcgccgggcaactattaaaaggtcgagaactgaagccatgactcgtgatagttccgacgaacactgtgtggacatctccagcgtcggcactcccctggcaagagctagcatcaagtcagccaaggtggacggcgttagttacttccgccataaggaacgcctcttgaggatttccatccgccacatggtgaagtcccaagtgttctactggatcgtattatcactggtggcacttaatacagcttgcgtggccatcgtgcaccacaaccagccccagtggctgacccatttgttgtactatgccgagttcctttttctgggcctgtttctgctagaaatgagcctgaagatgtatggaatgggaccacggctgtattttcacagctcctttaactgcttcgatttcggagtgactgtgggttcaattttcgaggtggtgtgggcgatctttaggcctgggacctctttcggaatatccgtactccgggcattgcgattactcagaatctttaagatcaccaaatattgggccagcctgcggaatctcgtggtgtcgctaatgtcttcaatgaaatcaatcataagccttctttttcttttgtttctctttatagtggtcttcgctctgctgggaatgcagctttttgggggtcggttcaattttaacgatgggacaccttcagcaaacttcgacacatttcctgcagcgattatgaccgtgttccaaatactgaccggcgaggattggaacgaggtcatgtacaacggaatcaggagtcaaggaggagtttccagcggcatgtggtcagcaatttacttcatcgtgctcacattattcgggaattacacattattaaatgtgtttctggcaatcgcagtcgataatttggctaacgcgcaggagctcactaaggatgagcaagaagaagaggaggcctttaatcagaaacatgcactgcagaaagccaaggaagtgagccctatgtcagctcccaatatgccttctatcgaaagagaacgcagacgaagacaccatatgtcagtgtgggagcagcgcaccagtcagttaagaaaacacatgcaaatgagttcacaggaagcactgaacagggaggaggcacctactatgaatcccttgaacccacttaatccgctgagctccctgaatcccttaaatgcccacccaagcctgtacagacggccgagagcgattgaaggactggctcttggcttggcacttgagaagttcgaagaagaacgcatctctagaggggggtctcttaaaggagacggaggcgaccggagtagcgcactcgacaaccagcggacgccactatccctggggcagcgagagccaccctggctagctcggccatgccacggtaactgtgaccctacccagcaggaggctgggggcggggaggctgttgttacatttgaagatcgcgcgagacatcgtcagtcacagcgccgaagtaggcataggcgggtgcgcaccgagggcaaagaatcttccagcgcatcaagatcaagaagcgcttcacaggagagatcacttgacgaagcgatgcctactgaaggcgagaaggatcacgagctacggggaaatcacggtgcaaaggagcctacaatacaggaagagagagcccaggacttgaggcggaccaacagtcttatggtatctaggggctctgggttggcaggggggctagatgaagcagacacacccttagttttgcctcaccctgaactggaggtgggaaaacacgttgtattgaccgaacaagaaccagaagggtccagtgaacaggctctcctagggaatgtgcaactcgatatgggccgcgttatctctcagtcggaacctgacttgtcttgcattacagctaacacggataaggctaccacagagtccactagtgtgacagtggctattcctgatgtcgatccgctagtggacagcacagttgttcacatttcaaataaaacggacggcgaggcctccccactgaaggaggccgagatccgggaagacgaggaagaggtggagaaaaaaaaacagaagaaggaaaagagggagacaggcaaagcgatggtgccccactcttccatgtttattttttcaacaacgaatccgataagaagggcttgtcattacattgtgaacctgaggtacttcgagatgtgcattcttctcgttattgcagccagtagcatcgcccttgcagctgaggatcccgtgcttacaaatagtgaacgaaataaagtgctcagatacttcgactatgtgttcacaggggtgttcacatttgagatggtgattaaaatgatcgaccagggactcatattgcaagacggaagctatttcagggatctatggaacattttggactttgtggttgtagttggggcactcgttgctttcgccctggcaaatgctctgggaaccaataagggaagagatatcaagactatcaaatctcttcgcgtcctaagagttctaaggccattgaaaactattaagagattgccaaaactcaaggccgtgttcgattgtgtagtaacctctttgaaaaacgtgttcaatattcttatagtgtataagctctttatgtttattttcgcagtaatcgccgtccaactcttcaaaggaaagttcttttattgcacggacagcagcaaggacacagaaaaagaatgcatcggcaattatgtggatcatgagaaaaacaaaatggaggttaaaggtagggagtggaagcggcatgagttccattatgataacattatctgggcgctgctcaccctgttcaccgtcagtaccggtgaaggctggccccaggtactgcagcatagcgttgatgtcaccgaggaagatcgcggacctagccgcagcaaccgaatggagatgtccatattttatgtggtgtatttcgttgtgttccctttcttcttcgtgaatatattcgtcgctctaattataatcacgttccaggagcaaggcgacaaaatgatggaagagtgttcattggagaaaaatgagcgagcttgcattgatttcgcaatttccgccaagcccctcacacgttatatgccccaaaaccggcacacctttcagtacagggtgtggcacttcgtagtgtcaccttccttcgagtataccattatggcgatgatcgcattaaacacagttgtgctgatgatgaagtattattcagctccttgtacgtacgagctggcactcaagtaccttaatatagctttcacgatggttttttcccttgagtgcgtgctgaaagtgattgcgttcgggttcctgaactatttccgggatacatggaacatttttgacttcattaccgtgatagggtccattacagaaattattctgacagactctaaactggtcaatacgtcaggattcaatatgagcttcctcaagctttttagggctgcccgcctgattaaactgcttaggcagggctacaccatccgcatcctgttgtggaccttcgtacagagttttaaggccctgccttatgtatgcttgctgattgcaatgctcttctttatctacgccatcattggcatgcaggttttcggcaacattaaattggatgaagaatcacatatcaaccggcacaacaatttccggtcattttttggctctctgatgctcctctttagatccgcaaccggcgaagcctggcaggagatcatgctgtcatgtctcggcgagaaagggtgcgagcccgacacgacggcaccaagcggacaaaatgagaacgagaggtgtggtaccgatctcgcatatgtgtactttgtctcctttatattcttctgcagctttctcatgctgaatctgttcgtggcagtaataatggacaattttgaatacttgacccgggattccagcattctcgggccacatcacctggacgagttcgtaagagtttgggctgagtatgacagagctgcctgtggtcggatccattacaccgaaatgtacgaaatgcttactctcatgtctccgcctctaggcctcggaaagagatgtcctagcaaggtggcgtacaagaggctcgtgctgatgaacatgccagtggccgaagatatgacagtgcattttacctccactctcatggccctgattcgaaccgccctggacattaagatcgccaaggggggcgctgaccgtcaacaattggacagcgaattacaaaaggagactttggcaatctggccccatctatcccagaaaatgcttgatttgcttgtcccgatgcctaaggcatccgatctgaccgtcggtaagatctatgccgctatgatgatcatggactattacaagcagtccaaagtgaagaagcagcgacaacagctggaagaacagaagaatgcaccaatgttccagcgaatggagcccagctctctgccacaggagattatagcgaacgccaaagctctgccttacctccagcaggatccagtctccggcctctccggtaggtccggctacccctctatgagtcctctgagtccccaggacatcttccagctggcatgcatggaccctgcggacgacggtcagtttcaggaacgacagtccctcgtggtgaccgaccctagctcgatgaggagatccttttctaccatccgggacaagcggtcgaactcctcctggctcgaagagtttagcatggaacgtagctcagaaaatacctacaagtctagacgacgatcgtaccacagcagcctcaggctgtctgcccataggctcaattctgattctgggcataagtcagatacacaccgatccggggggagggaacgaggaagatctaaggaacggaagcacctgctctcaccagacgtatcccgctgcaactcagaagagcgcgggacccaggctgattgggagtctccagaaagacgccagtccagatccccctctgaaggacgctcacaaaccccaaataggcaaggtacgggatcccttagtgagagcagtatccctagcgtgagcgacacttcaacacctagacgatcacgccggcagctccctcccgtgccccccaagccgagacccctcctttcttactcatctctcatacggcacgcaggttcaatttctcctcccgctgacgggagtgaggagggttctccgctgacctcccaagctctggagagtaataacgcctgcctgaccgagtcctctaattctccccacccccagcagtcccaacacgcaagccctcagcggtatatcagcgagccataccttgcgctgcatgaggatagccacgctagtgactgcggtgaagaagaaaccttaaccttcgaggcagccgtggccacatccctgggaagaagcaatacaatcggatcagcccccccattgagacactcttggcagatgcctaacgggcattatcgtcgaaggagacgtggcgggccgggcccagggatgatgtgtggggccgtgaataacttactttccgataccgaggaggacgacaagtgctag

SEQ ID NO: 82112 - DNA, 6608 bp, Artificial Sequence
  derived and/or modified sequence
atggccctatataatccgattccagttcgccaaaactgttttactgtgaaccgtagcctgttcatctttggtgaggacaacatagtgaggaagtatgctaagaagcttatcgattggccaccattcgaatacatgattttagccacaattattgcgaactgtatcgtgttggccctggagcagcatttgcctgaggacgacaagacacccatgtctcgacgccttgagaagacggagccctatttcataggcatcttttgtttcgaggcagggattaagatagtcgccttgggttttattttccacaagggcagctacctccggaatggatggaacgtgatggactttattgtggtgttaagcggaatcctggccaccgccggaactcattttaatacacatgtagatctccgaaccctgcgagctgtccgggtgcttcggccactgaagttggtctcgggaatcccctccctgcagattgttcttaaatctattatgaaagcgatggtccctctgttgcagataggcctactcctgttcttcgccattctgatgtttgctattattggacttgaattttattcaggcaaacttcacagagcgtgcttcatgaataacagcgggatcctagaaggcttcgatcctccgcatccgtgcggagtgcaagggtgccccgcaggctatgaatgcaaggactggattggccctaacgatggcatcacgcagttcgacaatatactgttcgccgtactcacggtgtttcagtgcatcacaatggaggggtggactacggtcctatacaacacaaacgacgcactaggagcaacatggaactggttgtactttatacctctgatcatcataggtagcttcttcgtgttaaacttggtcttgggagtgctgagtggagagttcgcgaaggaacgtgaaagagtggaaaatagaagggcctttatgaagcttagaaggcagcaacagattgagcgggagctgaatggctacagggcctggattgataaggctgaggaggtcatgctcgcggaagaaaacaagaacgccggtacctctgcactcgaagttctgcggagagccacgattaagcggtctcgtacggaagcaatgaccagggacagctccgacgaacactgcgtggacatcagttccgtgggtacccctctggctagagcctctatcaagagcgcaaaagtggatggtgtgtcctatttcagacacaaagagcgcttgctccgcatctcaattcggcacatggtgaaatctcaggtattctactggatcgtgctcagtctggtggccctgaacaccgcgtgcgtcgcgattgtgcatcacaatcaacctcagtggctgactcatcttctctactacgccgagtttctattcctaggactgttcctgttagagatgagtttgaagatgtatggcatgggtccaagactgtattttcacagttcattcaactgctttgacttcggcgttactgtcggaagcatcttcgaagtagtctgggctatttttagacctggtacgtccttcggcatcagcgttcttcgcgctttgagattgctccggatctttaaaatcacaaaatactgggcaagtcttaggaatcttgtggtgagtttaatgtccagtatgaagtccatcataagcctgttgttcctgttgttcttattcattgtggtctttgcactgctaggtatgcagctctttggaggccgattcaactttaatgatgggactccctccgcaaactttgacacatttccggctgctattatgactgtgttccagatccttacaggagaggattggaatgaggtaatgtataacggaattaggagccaggggggagtgtcttccggtatgtggagcgccatctacttcatagtgctcactttgttcggcaactacactctgttaaatgttttccttgcaatagcagtagacaaccttgctaatgcccaggagttgactaaagacgagcaggaggaagaagaggcttttaaccagaaacacgcactgcagaaagcgaaagaagtgtcccctatgtctgcaccaaacatgccctcgatcgaacgagagcgtcggagacgtcatcatatgtccgtgtgggaacagcgtacatctcagctgcgcaagcatatgcaaatgtcatcacaggaggctctgaatcgcgaggaagctccgactatgaaccccctgaacccgctgaacccactcagttccctaaaccccctcaacgctcacccctccctctataggaggccacgtgcaatcgaaggcttagcacttgggcttgcgctagaaaaatttgaggaggagagaatctcccgaggtggttctcttaagggggatggcggtgatcgctcctccgccctcgataaccagcgaactcccttatccctgggacagcgagagccaccatggcttgccagaccctgccatggcaattgcgaccccacccagcaggaggccggtggcggagaagccgtggtgacctttgaggatcgcgcaagacatcgccagtcccagcggagaagccggcaccggagggtaagaaccgaagggaaggagtcctcaagtgccagccggagtcgtagcgcgtctcaggagaggagcttggacgaagccatgcctacagaaggagagaaggatcacgaactacgtggcaatcacggcgcaaaagaacccactattcaggaagaacgcgcacaagatttgcgccgtaccaattccctgatggtatcaagagggagcgggttggccggtggcctggatgaggccgataccccccttgttctgcctcacccagaattggaagtcgggaaacatgtcgttctgacagagcaagaaccggagggatcttccgagcaggccctgctgggaaacgtgcaactggacatgggcagggtcatctctcaaagtgagcccgacctttcgtgcataactgcaaacaccgacaaagccaccactgagtcaacttcggttacagtggcaatccccgacgtggacccgctggtggactctacagtagtgcacatatccaataaaactgacggcgaagcatcaccccttaaagaggccgagatccgcgaggacgaagaggaggtggaaaaaaaaaagcagaagaaagagaaaagggaaaccgggaaggctatggtcccacattcatctatgttcatcttttctaccactaaccctattcgacgcgcatgccattacattgtcaatctcaggtatttcgagatgtgtatcctgctggtgattgcggcttccagtattgccctcgccgcagaagatcccgtattaacaaatagtgagaggaacaaggtcctcagatacttcgattacgtgttcacaggtgtgttcacttttgagatggttatcaagatgattgaccagggactgattcttcaggacggctcttacttcagagatctgtggaatatcttagatttcgtcgtggtggtcggcgcactcgtagccttcgcattggccaatagcatgaagaccaacaaggggagggacatcaagaccatcaaatcccttagggtcctgagagtcctccgccctctgaagacgataaagagactccctaagctgaaagcggtgttcgattgcgtggtcacatctctaaagaatgtttttaacatcctcatcgtgtataagctgttcatgtttattttcgccgtgatagctgtgcagctcttcaagggcaagtttttttactgcactgattcatccaaggacaccgagaaggagtgtatcgggaactacgtggaccatgaaaagaataagatggaagtgaaaggcagggaatggaagagacatgagttccattatgataacattatatgggctctgctgacgttgttcaccgtctcaacaggtgagggctggccacaagtgcttcagcacagtgtggacgtgactgaggaggatcggggtccgagccgcagtaaccgcatggagatgagcatcttctacgtggtttattttgtggtctttcctttctttttcgtcaatattttcgtggcactgattataatcacatttcaggaacagggcgacaagatgatggaggaatgctctctggagaagaatgagcgcgcttgcatcgacttcgccatatctgctaaacctctaacacgctacatgccgcaaaatcggcatacttttcagtacagagtctggcacttcgtggtgtcacccagctttgagtacacaattatggcaatgatcgctctgaatactgttgtcctgatgatgaaatactattcggcaccctgtacctacgaactggctctgaaatatctgaacatcgcctttacaatggtcttttccctggagtgcgtgctgaaagtcatcgcatttggcttcctgaactacttcagggacacctggaatatattcgatttcatcacagtaattggctcgataactgagatcatcttgacggactcaaaactggtgaacaccagcggctttaacatgtcattcttgaaattgttccgggcagctcgtctgattaaacttttgcgccagggctataccattagaatcctgctctggactttcgtccagtcttttaaagccctcccatatgtatgtctgctgatcgctatgctattcttcatttacgccattatcggaatgcaggtgttcggcaacattaaattggacgaagagtctcatatcaatcgccataataacttccggagcttcttcgggtcactgatgctactcttccgttccgccactggtgaggcctggcaagagattatgctgtcgtgtctaggggagaagggctgcgaacctgacaccacagccccttcaggccaaaacgaaaacgaaaggtgtggtactgatctcgcttacgtgtactttgtctcatttatcttcttttgcagcttcctgatgctgaacctatttgtggcagtgattatggacaacttcgaatacctgacccgggactcctccattctgggtcctcatcacttggatgagttcgtgcgggtatgggcggagtatgacagggccgcttgcgggcgtatcccatacaaggacatgtataaactggtacgggtaattagcccccctctgggactgggggagaactgcccctacagagtggcatgtaagcgcttagtattgatgaatatgccagtggccgaagatatgaccgtgcacttcacctcaaccctgatggctctgattcgcacagccttggatatcaaaatcgccaaggggggagccgacaggcaacaattggactcagagctacagaaggaaactctcgccatttggcctcatctatcccagaaaatgcttgacctgcttgtgcccatgcctaaagcatccgatttgacagttgggaagatctacgccgctatgatgataatggactattataaacagtcaaaggtgaagaagcagcgtcagcagttggaagagcagaaaaatgccccaatgttccagcgaatggagccaagcagtctaccacaggaaatcatcgcaaacgcaaaagccctgccctacttgcagcaggacccggtctcggggctgtccggcagaagtggctacccctccatgtctccactctcacctcaagatattttccagctcgcatgcatggacccagccgacgatggacagttccaagagcgccagtcactggtcgtgacagacccttcctcaatgagacggtccttcagtacaatacgcgataagcggtccaactcttcttggctcgaagagtttagcatggaaaggtcctctgagaacacctacaaatctcgaaggaggtcatatcacagtagccttagactctctgctcacaggctgaacagtgattcagggcataagagtgacactcacaggtctgggggacgcgaacgcggaagatccaaagaacgcaaacatctcctaagcccagacgtgagtcgatgcaatagcgaggaacggggaacacaagccgattgggagagccccgagcgcagacagagtcgttcaccctcagagggcaggagccagactcctaaccgtcaggggaccggttcgcttagcgagtcatcaattccatccgtgtctgatacctccactcccaggaggtcccgtcggcagcttccgccagtccctccgaaacccagaccgctcctgtcctatagttctttgattcggcatgctggcagtatttctcctcctgcagatggcagtgaagagggatcaccacttacgagccaggcactggaaagtaataatgcctgcctgaccgagtcctccaattcaccacatccacagcagagccaacatgcctccccccagcgctatataagcgaaccgtacctagccctgcacgaggattcacatgcatcagactgcggagaagaggaaactctgacctttgaagctgctgttgcaacctccttgggcagatccaacacaattggcagcgccccacctctccgacattcctggcaaatgcctaatggacattatcggaggcgacgtcgcggagggcctggtccaggcatgatgtgcggagccgtgaataacttactgtctgacaccgaggaagatgataaatgcta

SEQ ID NO: 82113 - DNA, 1317 bp, Artificial Sequence
  derived and/or modified sequence
atggccaggttcggtgaagcagtggtcgccaggccaggctctggggatggagacagtgaccaaagtcggaacagacaaggtacccccgtgccggcatccggccaagctgccgcttataaacagactaaagctcagcgggctcggaccatggccctttataacccaataccagtgaggcagaactgcttcaccgttaataggtccctcttcattttcggagaggacaacattgtgagaaagtatgcgaaaaaattgatagactggccccctttcgagtacatgatcctcgccaccatcatcgccaactgtatagtgctcgcgcttgagcagcacttgcctgaggacgataaaaccccgatgtccagacgcctggaaaagacagagccgtacttcattggcattttctgttttgaggcaggcattaaaattgtggcactgggatttattttccataagggaagctatttgcggaacggttggaacgtgatggactttatcgtcgtactcagtggtatccttgcaactgccggtacccatttcaatacgcacgtggacttgagaactctgagggcagttagagttctgcggccactcaagttggtgtctgggatcccgtcgctgcagatcgtgcttaaatctatcatgaaggccatggttccgctgctgcagatcgggttgttgctatttttcgctatcctgatgtttgccatcatcggactggaattttactcaggaaagctccacagagcgtgcttcatgaacaattccggaatactggagggctttgatccacctcatccttgcggagtacaaggatgcccagcgggatacgaatgtaaggactggattggtcccaacgatggaattacccagtttgataacattctgttcgctgttctcacagttttccagtgcatcactatggaggggtggaccactgtcctgtacaatacaaatgatgccctcggagccacgtggaactggctgtattttattcccctgatcatcatcgggtcattttttgtgttaaaccttgtgctgggtgttctgtcaggcgagtttgccaaggagcgcgagcgggtggaaaacaggcgagctttcatgaaactgaggagacagcagcagatcgaacgagaactgaatggctatcgtgcatggatcgataaggccgaagaggtgatgctggctgaggaaaataaaaacgcagggaccagcgccctagaggtgctgaggagagccacaataaagcgcagccgcaccgaagctatgacacgcgacagtagcgacgaacattgtgttgacatatcatctgtctag

SEQ ID NO: 82114 - DNA, 6755 bp, Artificial Sequence
  derived and/or modified sequence
atggctcggttcggtgaagccgtcgtggccagacccggaagcggagatggcgattctgaccaatcacggaataggcaggggacgcctgtgccggcttctgggcaggctgcggcttacaaacagaccaaggcccagcgagcaagaaccatggctctgtacaaccctatcccggtgaggcaaaattgttttactgtaaaccgctcactctttatcttcggagaggacaacatcgtcagaaagtatgccaagaagctgatcgactggcccccattcgaatatatgatattggctaccattattgcaaattgcattgtcctagccctggaacagcatttgcccgaagacgacaagactccaatgtcccggcgtctggagaagactgaaccatactttatagggatattttgctttgaggcgggtattaagatagtagccctcggattcattttccacaaggggtcctacttacgaaacggatggaacgtcatggactttatcgtagtgctgtcgggcatcctggcaaccgccggaacacactttaacactcacgttgacctgaggacactgcgggctgtcagagttctgagaccactgaaattggttagcggcatacctagtctccagatcgtcctgaaaagcattatgaaggccatggtgcccctcctgcagattggccttctgttgttctttgcaattctgatgtttgctattattggcctcgaattctactctggaaaactgcaccgcgcatgctttatgaataacagcggtatactggagggttttgaccccccacatccttgtggcgtgcaggggtgtcctgctggatacgagtgcaaagattggatcggtcctaacgacgggatcacccagttcgacaatatcctgtttgctgtacttaccgtctttcagtgcattacgatggagggatggacgaccgtcctgtacaacaccaatgatgcgctgggggcaacatggaattggctctactttatcccccttatcatcatcggcagtttcttcgtactcaatcttgttctcggagtgctctcgggtgagttcgccaaagaacgggagagggtggagaaccgccgagcatttatgaagttgcgtcggcagcagcagatcgagagagagctcaatgggtatcgcgcatggattgacaaggccgaagaggtgatgttggcggaagaaaacaagaatgctgggacaagtgccctcgaggtgctacggcgagcaaccatcaagcgctcaagaactgaagcaatgacaagggactccagcgatgagcattgcgtggacatctcttccgtgggaactccccttgcgagggcaagcatcaaaagcgcgaaagtcgacggcgtgagttactttaggcacaaggaaagattattgcgcataagtatcagacacatggtgaaaagccaggtgttttattggatcgttctgagcctggttgcccttaataccgcctgcgtggctatcgtgcaccataaccagccccaatggctcacgcatctgttatattatgctgagtttctgtttctcggactgttcctgctcgagatgagtcttaaaatgtacggcatgggaccccgtctgtactttcactccagctttaactgcttcgatttcggagttactgttgggtccattttcgaggtggtttgggccatctttaggccaggcacttccttcggcatctctgttctgcgcgcattgcggctgctgaggatctttaagattacgaagtactgggcctctctgcggaacctggtggtatcactgatgtcttcaatgaagagtatcatttctttacttttcctgctcttcctctttatagttgtgtttgccttgttgggtatgcagctgttcggtgggaggtttaacttcaatgacgggaccccctcagccaatttcgacacctttcccgctgcaatcatgaccgtttttcagatcttgaccggagaggattggaatgaagtcatgtataacggtatccggtcacagggcggtgtgtccagcggaatgtggagcgccatatacttcatagtgctaacgctttttggcaactataccttgctaaacgtgtttctggcgattgccgtggacaacctggcgaacgcccaggaacttactaaggatgagcaggaggaagaagaggcgttcaaccaaaagcatgctctgcaaaaggccaaggaagtgagcccaatgtccgccccaaacatgccaagcatagaacgtgaaaggcgaagacggcaccacatgagcgtctgggagcagcggactagtcagctgaggaagcatatgcagatgtctagccaggaagcactgaaccgcgaagaggctccgacaatgaacccactcaatcctctcaaccccctgagtagcctgaaccctcttaacgcacatccttccctctatagacgccctagagctattgagggcctggccctgggcttagccttggagaaatttgaggaggaaaggatcagcaggggcggatctctgaaaggtgatgggggtgaccgatcctcagctctggataaccagcgaactcctttgagtctcggtcagagggagcctccctggctggctcggccatgccatgggaattgtgatcctacccagcaagaggcaggcggtggagaggccgtggtgacatttgaagacagagcaagacataggcagagtcagcggaggagcaggcataggagagtcaggacagaagggaaggaaagttcctcagcttcccgatctagaagcgcaagtcaggaacgttcactggacgaggccatgccaacggagggcgaaaaagaccatgagttgcggggaaaccacggggctaaagaaccaactatacaagaggaacgagcacaggatttgcgcagaaccaatagcctcatggtttccagggggagtggcctggccggaggactggacgaagcggatacacctctggttctgccacatcccgagctcgaagttggaaagcacgtagtgctgaccgagcaggaacctgagggcagctctgagcaagcacttcttggtaacgtgcagctggatatgggcagagtcataagccaaagtgaacctgatctgtcttgcatcaccgctaatactgacaaggcaacaaccgagagtactagcgtgaccgtggcaatacctgatgtggaccctctcgtcgatagtactgttgttcacatcagtaacaaaaccgatggtgaagcgtctccgctgaaagaagcagagatcagggaagatgaggaggaagtcgagaaaaagaagcaaaagaaagaaaaacgcgagacgggcaaagcaatggtaccgcactccagcatgtttatattctcaaccaccaaccccattcgcagagcctgtcactatatcgtgaatctacgatattttgaaatgtgcattctcctcgtgatcgcagcgtcctcaattgcactggctgctgaagatcctgtcctaaccaattccgaacgcaataaagtcttaaggtacttcgattacgtcttcactggagtctttacatttgagatggtaattaagatgattgatcaagggctgattctccaggatggatcctatttcagagacctgtggaatatcctggatttcgtggtggtagtcggagcgctagtagcattcgcgctcgccaatgcactaggaactaataaaggacgggacataaagacaatcaaatctctcagggtcttacgagtgttacggcctctgaaaacaatcaaacggcttccgaaattgaaagccgtctttgactgcgtcgtgacgtccctgaagaacgtatttaacatactgatagtctacaagctgttcatgttcatcttcgccgtgattgccgtccagctgtttaagggaaaattcttctattgcactgactcctctaaagatactgagaaggaatgcatcggcaattacgtggatcacgagaaaaacaaaatggaggtaaagggcagagaatggaagcggcacgaattccactatgacaatatcatatgggctttactcaccttgttcacagtcagcaccggcgaagggtggccccaggtgttgcagcactccgtggatgtcaccgaggaggaccgagggccatctcgtagtaatcggatggagatgtctatattctacgtcgtgtactttgtcgtgtttcccttttttttcgtgaatatctttgttgcactcatcatcatcacctttcaggagcaaggggacaagatgatggaggagtgcagcctggaaaaaaacgagagggcttgcatcgacttcgctatttctgcaaaacctctgacgaggtatatgccgcagaacaggcacacctttcaatatagggtgtggcattttgttgtgtctccatctttcgaatatacgattatggcaatgatcgctctgaacacagttgtgctgatgatgaagtattattctgcaccctgcacatacgaacttgccctgaagtacttgaacatcgcttttacaatggtgtttagcctcgaatgcgttctaaaggtaatcgcgttcgggttcctcaattacttccgagatacttggaacatctttgatttcataacagtgatcggatccattacagagatcatcctcactgactcaaaactggtcaacacatctgggtttaacatgtcattccttaaactgtttcgagccgcacggctcattaaactgctgaggcagggttataccatcaggatcctcctctggacatttgtccagagctttaaggcactgccatatgtctgtctgctgatcgctatgctatttttcatctacgccattatcggtatgcaggtttttggcaatattaaactggacgaagagagtcatatcaacaggcacaataacttccggtcatttttcggaagcctcatgctcctgttcaggagtgccactggagaagcctggcaagagatcatgcttagctgtttgggcgaaaaaggctgtgaacccgacacaactgccccatccgggcagaatgagaatgaacgctgtggcaccgatttggcttatgtgtattttgtgtccttcatattcttctgctctttcctgatgctcaacctttttgttgctgtgataatggacaattttgaatatctaacccgggattctagtatcctgggcccacaccacttagatgagtttgtacgtgtgtgggccgagtacgaccgtgcagcctgtgggagaattcattacactgaaatgtatgagatgttgacactaatgagccctcctttagggctgggaaagagatgcccaagtaaggtggcttataagcggcttgtcctaatgaatatgcctgtggcggaagacatgactgtacacttcacgagtaccttgatggctttgattcgcacagccctggatataaaaattgccaaaggtggtgccgacagacagcagttagactccgagcttcagaaggagactcttgccatctggccgcatctgtctcagaagatgctcgatttgctggtacccatgcctaaagcctcggatctgacggtcggcaagatctatgcagcaatgatgatcatggattactataagcaatctaaggtaaagaaacagcggcagcagctggaggaacaaaaaaacgccccaatgttccagaggatggaaccatcttccctgccacaggagataatagccaacgccaaggcactgccatatctgcagcaggaccctgtgagtggactgtccggacggtccggatatccaagtatgtcccccctcagtccgcaagacatcttccaactggcttgcatggatcctgcagacgacggtcaatttcaggaaaggcagagtttagtggttaccgaccctagctcaatgcgcagatcttttagcactatccgggacaagaggagcaattctagctggctcgaggaattcagcatggaacgcagcagtgagaacacttacaagagtcgtcggaggtcttatcacagtagcttgagactgtcggctcataggttaaattcagacagcgggcacaagtctgatacccatagatctggcggaagggagcgcggacgttcaaaagagcgaaaacacctgctttctcccgatgttagcagatgcaattccgaggaaagagggacccaagctgattgggaaagcccagaaagacgccaatctcgaagccctagcgagggcagatcacagaccccgaatcgtcagggaaccggatccctgtccgagagttctatccctagtgttagtgatacatccacacctcgcaggtccaggaggcagctgccccctgtgccccctaagcctcggccacttcttagctactcatcgctgatccggcacgccggtagcataagcccacctgcagacgggtccgaggagggttctcccctcacttcacaggccttagagagcaataatgcttgcttaactgaatcttcaaacagtcctcatcctcaacagtcccagcacgcctctccccaaagatatatttctgagccgtacctcgcactgcacgaagactcccacgcaagcgattgtggcgaagaggagactctcacatttgaagccgctgtcgcaacctccctggggcgatccaataccatcggaagcgctccacctctccggcacagctggcagatgccaaatggccactatcgacggagacggagaggtgggccagggccaggaatgatgtgcggcgctgtgaacaacctcttgtccgataccgaggaagatgacaagtgtta

SEQ ID NO: 82115 - DNA, 9662 bp, Artificial Sequence
  derived and/or modified sequence
gctgctgctgcctctccgaagagctcgcggagctccccagaggcggtggtccccgtgcttgtctggatgcggctctgagtctccgtgtgtctttctgcttgttgctgtgtgcgggtgttcggccgcgatcacctttgtgtgtcttctgtctgtttaaacctcaggatggctcgcttcggggaggcggtggtcgccaggccagggtccggcgatggagactcggaccagagcaggaaccggcaaggaacccccgtgccggcctcggggcaggcggccgcctacaagcagacgaaagcacagagggcgcggactatggctttgtacaaccccattcccgtccggcagaactgtttcaccgtcaacagatccctgttcatcttcggagaagataacattgtcaggaaatatgccaagaagctcatcgattggccgccatttgagtacatgatcctggccaccatcattgccaactgcatcgtcctggccctggagcagcatcttcctgaggatgacaagacccccatgtcccgaagactggagaagacagaaccttatttcattgggatcttttgctttgaagctgggatcaaaattgtggccctggggttcatcttccataagggctcttacctccgcaatggctggaatgtcatggacttcatcgtggtcctcagtggcatcctggccactgcaggaacccacttcaatactcacgtggacctgaggaccctccgggctgtgcgtgtcctgcggcctttgaagctcgtgtcagggatacctagcctgcagattgtgttgaagtccatcatgaaggccatggtacctcttctgcagattggccttctgctcttctttgccatcctgatgtttgctatcattggtttggagttctacagtggcaagttacatcgagcatgcttcatgaacaattcaggtattctagaaggatttgacccccctcacccatgtggtgtgcagggctgcccagctggttatgaatgcaaggactggatcggccccaatgatgggatcacccagtttgataacatcctttttgctgtgctgactgtcttccagtgcatcaccatggaagggtggaccactgtgctgtacaataccaatgatgccttaggagccacctggaattggctgtacttcatccccctcatcatcattggatccttctttgttctcaacctagtcctgggagtgctttccggggaatttgccaaagagagagagagagtggagaaccgaagggctttcatgaagctgcggcgccagcagcagattgagcgtgagctgaatggctaccgtgcctggatagacaaagcagaggaagtcatgctcgctgaagaaaataaaaatgctggaacatccgccttagaagtgcttcgaagggcaaccatcaagaggagccggacagaggccatgactcgagactccagtgatgagcactgtgttgatatctcctctgtgggcacacctctggcccgagccagtatcaaaagtgcaaaggtagacggggtctcttatttccggcacaaggaaaggcttctgcgcatctccattcgccacatggttaaatcccaggtgttttactggattgtgctgagccttgtggcactcaacactgcctgtgtggccattgtccatcacaaccagccccagtggctcacccacctcctctactatgcagaatttctgtttctgggactcttcctcttggagatgtccctgaagatgtatggcatggggcctcgcctttattttcactcttcattcaactgctttgattttggggtcacagtgggcagtatctttgaagtggtctgggcaatcttcagacctggtacgtcttttggaatcagtgtcttgcgagccctccggcttctaagaatatttaaaataaccaagtattgggcttccctacggaatttggtggtctccttgatgagctcaatgaagtctatcatcagtttgcttttcctcctcttcctcttcatcgttgtctttgctctcctaggaatgcagttatttggaggcaggtttaactttaatgatgggactccttcggcaaattttgataccttccctgcagccatcatgactgtgttccagatcctgacgggtgaggactggaatgaggtgatgtacaatgggatccgctcccagggtggggtcagctcaggcatgtggtctgccatctacttcattgtgctcaccttgtttggcaactacacgctactgaatgtgttcttggctatcgctgtggataatctcgccaacgcccaggaactgaccaaggatgaacaggaggaagaagaggccttcaaccagaaacatgcactgcagaaggccaaggaggtcagcccgatgtctgcacccaacatgccttcgatcgagagggagcggaggcgccggcaccacatgtccgtgtgggagcagcgtaccagccagctgaggaagcacatgcagatgtccagccaggaggccctcaacagagaggaggcgccgaccatgaacccgctcaaccccctcaacccgctcagctccctcaacccgctcaatgcccaccccagcctttatcggcgacccagggccattgagggcctggccctgggcctggccctggagaagttcgaggaggagcgcatcagccgtggggggtccctcaagggggatggaggggaccgatccagtgccctggacaaccagaggacccctttgtccctgggccagcgggagccaccatggctggccaggccctgtcatggaaactgtgacccgactcagcaggaggcagggggaggagaggctgtggtgacctttgaggaccgggccaggcacaggcagagccaacggcgcagccggcatcgccgcgtcaggacagaaggcaaggagtcctcttcagcctcccggagcaggtctgccagccaggaacgcagtctggatgaagccatgcccactgaaggggagaaggaccatgagctcaggggcaaccatggtgccaaggagccaacgatccaagaagagagagcccaggatttaaggaggaccaacagtctgatggtgtccagaggctccgggctggcaggaggccttgatgaggctgacacccccctagtcctgccccatcctgagctggaagtggggaagcacgtggtgctgacggagcaggagccagaaggcagcagtgagcaggccctgctggggaatgtgcagctagacatgggccgggtcatcagccagagcgagcctgacctctcctgcatcacggccaacacggacaaggccaccaccgagagcaccagcgtcaccgtcgccatccccgacgtggaccccttggtggactcaaccgtggtgcacattagcaacaagacggatggggaagccagtcccttgaaggaggcagagatcagagaggatgaggaggaggtggagaagaagaagcagaagaaggagaagcgtgagacaggcaaagccatggtgccccacagctcaatgttcatcttcagcaccaccaacccgatccggagggcctgccactacatcgtgaacctgcgctactttgagatgtgcatcctcctggtgattgcagccagcagcatcgccctggcggcagaggaccccgtcctgaccaactcggagcgcaacaaagtcctgaggtattttgactatgtgttcacgggcgtgttcacctttgagatggttataaagatgatagaccaaggcttgatcctgcaggatgggtcctacttccgagacttgtggaacatcctggactttgtggtggtcgttggcgcattggtggcctttgctctggctaacagcatgaaaaccaacaaaggacgggacatcaagaccatcaagtctctgcgggtgctccgagttctaaggccactgaaaaccatcaagcgcttgcccaagctcaaggccgtcttcgactgcgtagtgacctccttgaagaatgtcttcaacatactcattgtgtacaagctcttcatgttcatctttgctgtcatcgcagttcagctcttcaagggaaagttcttttattgcacggacagttccaaggacacagagaaggagtgcataggcaactatgtagatcatgagaaaaacaagatggaggtgaagggccgggaatggaagcgccatgaattccactacgacaacattatctgggccctgctgaccctcttcaccgtctccacaggggaaggatggcctcaagttctgcagcactctgtagatgtgacagaggaagaccgaggcccaagccgcagcaaccgcatggagatgtctatcttttatgtagtctactttgtggtcttccccttcttctttgtcaatatctttgtggctctcatcatcatcaccttccaggagcaaggggataagatgatggaggagtgcagcctggagaagaatgagagggcgtgcatcgacttcgccatcagcgccaaacctctcacccgctacatgccgcagaacagacacaccttccagtaccgcgtgtggcactttgtggtgtctccgtcctttgagtacaccattatggccatgatcgccttgaatactgttgtgctgatgatgaagtattattctgctccctgtacctatgagctggccctgaagtacctgaatatcgccttcaccatggtgttttccctggaatgtgtcctgaaggtcatcgcttttggctttttgaactatttccgagacacctggaatatctttgacttcatcaccgtgattggcagtatcacagaaattatcctgacagacagcaagctggtgaacaccagtggcttcaatatgagctttctgaagctcttccgagctgcccgcctcataaagctcctgcgtcagggctataccatacgcattttgctgtggacctttgtgcagtcctttaaggccctcccttatgtctgccttttaattgccatgcttttcttcatttatgccatcattgggatgcaggtatttggaaacataaaattagacgaggagagtcacatcaaccggcacaacaacttccggagtttctttgggtccctaatgctactcttcaggagtgccacaggtgaggcctggcaggagattatgctgtcatgccttggggagaagggctgtgagcctgacaccaccgcaccatcagggcagaacgagaacgaacgctgcggcaccgatctggcctacgtgtactttgtctccttcatcttcttctgctccttcttgatgctcaacctgtttgtggccgtcatcatggacaactttgagtacctgactcgggactcctccatcctggggcctcaccacttggacgagtttgtccgcgtctgggcagaatatgaccgagcagcatgcggcaggatcccgtataaggatatgtacaaattagtgcgggtgatctcgcctcctctgggcctgggagagaactgcccctacagggtggcttgcaagaggttggtcctgatgaacatgccagtagctgaggacatgacggtccacttcacctccacacttatggctctgatccggacagctctggacattaaaattgccaaaggtggtgcagacaggcagcagctagactcagagctacaaaaggagaccctagccatctggcctcacctatcccagaagatgctggatctgcttgtgcccatgcccaaagcctctgacctgactgtgggcaaaatctatgcagcaatgatgatcatggactactataagcagagtaaggtgaagaagcagaggcagcagctggaggaacagaaaaatgcccccatgttccagcgcatggagccttcatctctgcctcaggagatcattgctaatgccaaagccctgccttacctccagcaggaccccgtttcaggcctgagtggccggagtggatacccttcgatgagtccactctctccccaggatatattccagttggcttgtatggaccccgccgatgacggacagttccaagaacggcagtctctggtggtgacagaccctagctccatgagacgttcattttccactattcgggataagcgttcaaattcctcgtggttggaggaattctccatggagcgaagcagtgaaaatacctacaagtcccgtcgccggagttaccactcctccttgcggctgtcagcccaccgcctgaactctgattcaggccacaagtctgacactcaccgctcagggggcagggagcggggacgatcaaaagagcgaaagcatcttctctctcctgatgtctcccgctgcaattcagaagagcgagggacccaggctgactgggagtccccagagcgccgtcaatccaggtcacccagtgagggcaggtcacagacgcccaacagacagggcacaggttccctaagtgagagctccatcccctctgtctctgacaccagcaccccaagaagaagtcgtcggcagctcccacccgtcccgccaaagccccggcccctcctttcctacagctccctgattcgacacgcgggcagcatctctccacctgctgatggaagcgaggagggctccccgctgacctcccaagctctggagagcaacaatgcttgcctgaccgagtcttccaactctccgcacccccagcagagccaacatgcctccccacagcgctacatctccgagccctacttggccctgcacgaagactcccacgcctcagactgtggtgaggaggagacgctcactttcgaagcagccgtggctactagcctgggccgttccaacaccatcggctcagccccacccctgcggcatagctggcagatgcccaacgggcactatcggcggcggaggcgcggggggcctgggccaggcatgatgtgtggggctgtcaacaacctgctaagtgacacggaagaagatgacaaatgctagaggctgctcccccctccgatgcatgctcttctctcacatggagaaaaccaagacagaattgggaagccagtgcggcccgggggggaggaagagggaaaaggaagatggaaggacaccatgcattatcagagaagaggaagtaaaggacaatcagaacaccagtcaaacccaccaaattgctttattcccctttgcaagatgggcactgccatagttctgcctctttgctggggaaagaaaccaggaacgtggagggttattactgcgggagaagggacacgaggatggctttgcttccccttgccccttcccacttttctaaaagctgtggagggatctagctggcctatgtctacactcagtgccctgagaagcctggaagactttctggctcttaactggggagtagtggagaccataggagaggactctcctccctcaccagctcttacgcctcagccagcaccactgccaccagggcaactgcagcagcatctcatgcataaccctgtggcttgcttcccccagggcagcacaggctaagtcaggaacatcggatgccagggagggaggagaaagccgaagcgaaaggggtcagggtgctgaggcaacagcagcaagggctggtctggacaagaaaagccatagcccggcagcccctaccatgagggagacagagaaacagaactggtggtgctggggggtatagccccccatccttgaggcctgtcacccacacagtaggtgctgagagttaggacaggtcaggaagtcccccagggtccacaaaggtgcctgaggctctggtaagggtgaagataaaagtatttaacaaccgctatggcatcaatgtaagtggagtttggtcctagtgccggagcccatgctattccaggcattggctctttagatgccagtcatgggggaaccctgagggtgtgggtagagtagcaggggccacctaagagattaaaaacagtctgttttccaaccagtgtggaagcaattaaatatgcgtaacagtgctacggccacaccagcacctcctggctgaaggtcagcccacactctggtccatgaggcagcaaggccagtgctgtgccaagcccggtaaggccaagtgccgaggcccagccttccctgccactcctctgagagggcagaacacacatatccaagtaggctacccaccactgggtagggatttctgtaaagatgggaaaggctgatagattgaaataagcttctgtgaaagtctggatttactgaggacctcccctgaggagggaccgttgggaccgcagattctgcagctggtgtggggttcaggtcagtttgtcaggatgctttaaggtgattagtaaatatacctcagcttagacttgggctgctccttctagcaaagcaggctccagtggggcctcatcatacaggatgacaagactggggccctgttcaccttgaacatgcccctgggccaagatggggcttcacccctccccagagtaagagctggggctgacagtcccaccctgtcattcctaatagcccaaacgcagaagcactgagcaagagagccctttcttgccaagccagtgctcttttggtatatggcatacagctccattggaggggacacatcactggctttatctggtggaaatgtacctttcccttaagttcctccttagtgccatcacagcaggtgaatgggtgccctacggggccctccttcccccaccaggaacagatggaacctgccacccaggatcctgatctgccctgcactgagcactcagtggataaacactcctccagcccagacacactcctcctcttgggcaggagcaatccagagttgttatttttcttagaaggagcctcttttccctctattttttaaattgaaatataatagctgcatcagccctgaaaagccaaattcaaccacatggctggagaatcatttgtcatggccccgccttctcttctgatactaatggagcttcatgacccacggtcagcccccaaaccaaagttgtcccaacagaggaggccagtgaggcagagacagagctctcccactctcagaccctcttttgtcttcattttcctctcccacttagcacatgtgtgcttgagggtggctgggaatgtgatatacagcaccctgatcctaacaggtgtgattgttacgtaagacgctgatactgggccttgtattgcttttaaagtttcctctgctcagcatcatttcatgccaaagtgctgctatgggctgctttgtgtgcacaaaattgctttttccacctcggaaatgcagctttccctagggggaggcctacaacaggacgaccattctgagccagtgagtctattgcatggtgttttgagaaagggaattttagtgacaccttatgccatttcaagaggagaaatgcaggctggcagagcaatttccagaaatggaatttgcctgcaaatagtataaacaacactaaatttactgtgccaggaaatcttcctgaactccttgaactcatacacacaggtatttgagtcctgaataaagtgttggaaagcactgcagatgcggtcacctgactgaccacctgggttttctattaccagtgaatttcttttattcaccttcccttgaccaagaaattgggtttcttttccctcagcctgcacttactcttctattaagaccagaaaataaaataattttccgttgagtc

SEQ ID NO: 82116 - DNA, 1795 bp, Artificial Sequence
  derived and/or modified sequence
actccttgtctctgccctctccctcccacagagcaatgttctgtgatggtgcccgagatgcgtggactgagcccagaccgcaggctgcccgagcccgccccctgcccggctgcggggagccctgagcccaggtccgcgggccgccgccaacgccacgtcctggccctgccggaagaagaggcatggcggccccagcagtgcgctctgctcgaggccgacgcctcggacgaggtgggcatgctgccggcttccccgcgcgccgcctctggcttcgacaacttcttccaggtgcaggagggcgagggccagggctgggagggcgccatggcactggaggcgggctccagccctttcctgccggtgagccccgaggtcatgaagcggcggcgcgggggcctcatcgagcagcgcgacatcatcaaggcccacgaggcgcacaagatgcagagcaccccgcaggcccggcgcaaggaatgggagatggctcgcttcggggaggcggtggtcgccaggccagggtccggcgatggagactcggaccagagcaggaaccggcaaggaacccccgtgccggcctcggggcaggcggccgcctacaagcagacgaaagcacagagggcgcggactatggctttgtacaaccccattcccgtccggcagaactgtttcaccgtcaacagatccctgttcatcttcggagaagataacattgtcaggaaatatgccaagaagctcatcgattggccgccatttgagtacatgatcctggccaccatcattgccaactgcatcgtcctggccctggagcagcatcttcctgaggatgacaagacccccatgtcccgaagactggagaagacagaaccttatttcattgggatcttttgctttgaagctgggatcaaaattgtggccctggggttcatcttccataagggctcttacctccgcaatggctggaatgtcatggacttcatcgtggtcctcagtggcatcctggccactgcaggaacccacttcaatactcacgtggacctgaggaccctccgggctgtgcgtgtcctgcggcctttgaagctcgtgtcagggatacctagcctgcagattgtgttgaagtccatcatgaaggccatggtacctcttctgcagattggccttctgctcttctttgccatcctgatgtttgctatcattggtttggagttctacagtggcaagttacatcgagcatgcttcatgaacaattcaggtattctagaaggatttgacccccctcacccatgtggtgtgcagggctgcccagctggttatgaatgcaaggactggatcggccccaatgatgggatcacccagtttgataacatcctttttgctgtgctgactgtcttccagtgcatcaccatggaagggtggaccactgtgctgtacaataccaatgatgccttaggagccacctggaattggctgtacttcatccccctcatcatcattggatccttctttgttctcaacctagtcctgggagtgctttccggggaatttgccaaagagagagagagagtggagaaccgaagggctttcatgaagctgcggcgccagcagcagattgagcgtgagctgaatggctaccgtgcctggatagacaaagcagaggaagtcatgctcgctgaagaaaataaaaatgctggaacatccgccttagaagtgcttcgaagggcaaccatcaagaggagccggacagaggccatgactcgagactccagtgatgagcactgtgttgatatctcctctgtgg

SEQ ID NO: 82117 - DNA, 16170 bp, Artificial Sequence
  derived and/or modified sequence
gctgctgctgcctctccgaagagctcgcggagctccccagaggcggtggtccccgtgcttgtctggatgcggctctgagtctccgtgtgtctttctgcttgttgctgtgtgcgggtgttcggccgcgatcacctttgtgtgtcttctgtctgtttaaacctcaggatggctcgcttcggggaggcggtggtcgccaggccagggtccggcgatggagactcggaccagagcaggaaccggcaaggaacccccgtgccggcctcggggcaggcggccgcctacaagcagacgaaagcacagagggcgcggactatggctttgtacaaccccattcccgtccggcagaactgtttcaccgtcaacagatccctgttcatcttcggagaagataacattgtcaggaaatatgccaagaagctcatcgattggccgccatttgagtacatgatcctggccaccatcattgccaactgcatcgtcctggccctggagcagcatcttcctgaggatgacaagacccccatgtcccgaagactggagaagacagaaccttatttcattgggatcttttgctttgaagctgggatcaaaattgtggccctggggttcatcttccataagggctcttacctccgcaatggctggaatgtcatggacttcatcgtggtcctcagtggcatcctggccactgcaggaacccacttcaatactcacgtggacctgaggaccctccgggctgtgcgtgtcctgcggcctttgaagctcgtgtcagggatacctagcctgcagattgtgttgaagtccatcatgaaggccatggtacctcttctgcagattggccttctgctcttctttgccatcctgatgtttgctatcattggtttggagttctacagtggcaagttacatcgagcatgcttcatgaacaattcaggtattctagaaggatttgacccccctcacccatgtggtgtgcagggctgcccagctggttatgaatgcaaggactggatcggccccaatgatgggatcacccagtttgataacatcctttttgctgtgctgactgtcttccagtgcatcaccatggaagggtggaccactgtgctgtacaataccaatgatgccttaggagccacctggaattggctgtacttcatccccctcatcatcattggatccttctttgttctcaacctagtcctgggagtgctttccggggaatttgccaaagagagagagagagtggagaaccgaagggctttcatgaagctgcggcgccagcagcagattgagcgtgagctgaatggctaccgtgcctggatagacaaagcagaggaagtcatgctcgctgaagaaaataaaaatgctggaacatccgccttagaagtgcttcgaagggcaaccatcaagaggagccggacagaggccatgactcgagactccagtgatgagcactgtgttgatatctcctctgtgggcacacctctggcccgagccagtatcaaaagtgcaaaggtagacggggtctcttatttccggcacaaggaaaggcttctgcgcatctccattcgccacatggttaaatcccaggtgttttactggattgtgctgagccttgtggcactcaacactgcctgtgtggccattgtccatcacaaccagccccagtggctcacccacctcctctactatgcagaatttctgtttctgggactcttcctcttggagatgtccctgaagatgtatggcatggggcctcgcctttattttcactcttcattcaactgctttgattttggggtcacagtgggcagtatctttgaagtggtctgggcaatcttcagacctggtacgtcttttggaatcagtgtcttgcgagccctccggcttctaagaatatttaaaataaccaagtattgggcttccctacggaatttggtggtctccttgatgagctcaatgaagtctatcatcagtttgcttttcctcctcttcctcttcatcgttgtctttgctctcctaggaatgcagttatttggaggcaggtttaactttaatgatgggactccttcggcaaattttgataccttccctgcagccatcatgactgtgttccagatcctgacgggtgaggactggaatgaggtgatgtacaatgggatccgctcccagggtggggtcagctcaggcatgtggtctgccatctacttcattgtgctcaccttgtttggcaactacacgctactgaatgtgttcttggctatcgctgtggataatctcgccaacgcccaggaactgaccaaggatgaacaggaggaagaagaggccttcaaccagaaacatgcactgcagaaggccaaggaggtcagcccgatgtctgcacccaacatgccttcgatcgagagggagcggaggcgccggcaccacatgtccgtgtgggagcagcgtaccagccagctgaggaagcacatgcagatgtccagccaggaggccctcaacagagaggaggcgccgaccatgaacccgctcaaccccctcaacccgctcagctccctcaacccgctcaatgcccaccccagcctttatcggcgacccagggccattgagggcctggccctgggcctggccctggagaagttcgaggaggagcgcatcagccgtggggggtccctcaagggggatggaggggaccgatccagtgccctggacaaccagaggacccctttgtccctgggccagcgggagccaccatggctggccaggccctgtcatggaaactgtgacccgactcagcaggaggcagggggaggagaggctgtggtgacctttgaggaccgggccaggcacaggcagagccaacggcgcagccggcatcgccgcgtcaggacagaaggcaaggagtcctcttcagcctcccggagcaggtctgccagccaggaacgcagtctggatgaagccatgcccactgaaggggagaaggaccatgagctcaggggcaaccatggtgccaaggagccaacgatccaagaagagagagcccaggatttaaggaggaccaacagtctgatggtgtccagaggctccgggctggcaggaggccttgatgaggctgacacccccctagtcctgccccatcctgagctggaagtggggaagcacgtggtgctgacggagcaggagccagaaggcagcagtgagcaggccctgctggggaatgtgcagctagacatgggccgggtcatcagccagagcgagcctgacctctcctgcatcacggccaacacggacaaggccaccaccgagagcaccagcgtcaccgtcgccatccccgacgtggaccccttggtggactcaaccgtggtgcacattagcaacaagacggatggggaagccagtcccttgaaggaggcagagatcagagaggatgaggaggaggtggagaagaagaagcagaagaaggagaagcgtgagacaggcaaagccatggtgccccacagctcaatgttcatcttcagcaccaccaacccgatccggagggcctgccactacatcgtgaacctgcgctactttgagatgtgcatcctcctggtgattgcagccagcagcatcgccctggcggcagaggaccccgtcctgaccaactcggagcgcaacaaagtcctgaggtattttgactatgtgttcacgggcgtgttcacctttgagatggttataaagatgatagaccaaggcttgatcctgcaggatgggtcctacttccgagacttgtggaacatcctggactttgtggtggtcgttggcgcattggtggcctttgctctggcgaacgctttgggaaccaacaaaggacgggacatcaagaccatcaagtctctgcgggtgctccgagttctaaggccactgaaaaccatcaagcgcttgcccaagctcaaggccgtcttcgactgcgtagtgacctccttgaagaatgtcttcaacatactcattgtgtacaagctcttcatgttcatctttgctgtcatcgcagttcagctcttcaagggaaagttcttttattgcacggacagttccaaggacacagagaaggagtgcataggcaactatgtagatcatgagaaaaacaagatggaggtgaagggccgggaatggaagcgccatgaattccactacgacaacattatctgggccctgctgaccctcttcaccgtctccacaggggaaggatggcctcaagttctgcagcactctgtagatgtgacagaggaagaccgaggcccaagccgcagcaaccgcatggagatgtctatcttttatgtagtctactttgtggtcttccccttcttctttgtcaatatctttgtggctctcatcatcatcaccttccaggagcaaggggataagatgatggaggagtgcagcctggagaagaatgagagggcgtgcatcgacttcgccatcagcgccaaacctctcacccgctacatgccgcagaacagacacaccttccagtaccgcgtgtggcactttgtggtgtctccgtcctttgagtacaccattatggccatgatcgccttgaatactgttgtgctgatgatgaagtattattctgctccctgtacctatgagctggccctgaagtacctgaatatcgccttcaccatggtgttttccctggaatgtgtcctgaaggtcatcgcttttggctttttgaactatttccgagacacctggaatatctttgacttcatcaccgtgattggcagtatcacagaaattatcctgacagacagcaagctggtgaacaccagtggcttcaatatgagctttctgaagctcttccgagctgcccgcctcataaagctcctgcgtcagggctataccatacgcattttgctgtggacctttgtgcagtcctttaaggccctcccttatgtctgccttttaattgccatgcttttcttcatttatgccatcattgggatgcaggtatttggaaacataaaattagacgaggagagtcacatcaaccggcacaacaacttccggagtttctttgggtccctaatgctactcttcaggagtgccacaggtgaggcctggcaggagattatgctgtcatgccttggggagaagggctgtgagcctgacaccaccgcaccatcagggcagaacgagaacgaacgctgcggcaccgatctggcctacgtgtactttgtctccttcatcttcttctgctccttcttgatgctcaacctgtttgtggccgtcatcatggacaactttgagtacctgactcgggactcctccatcctggggcctcaccacttggacgagtttgtccgcgtctgggcagaatatgaccgagcagcatgtggccgcatccattacactgagatgtatgaaatgctgactctcatgtcacctccgctaggcctcggcaagagatgtccctccaaagtggcatataagaggttggtcctgatgaacatgccagtagctgaggacatgacggtccacttcacctccacacttatggctctgatccggacagctctggacattaaaattgccaaaggtggtgcagacaggcagcagctagactcagagctacaaaaggagaccctagccatctggcctcacctatcccagaagatgctggatctgcttgtgcccatgcccaaagcctctgacctgactgtgggcaaaatctatgcagcaatgatgatcatggactactataagcagagtaaggtgaagaagcagaggcagcagctggaggaacagaaaaatgcccccatgttccagcgcatggagccttcatctctgcctcaggagatcattgctaatgccaaagccctgccttacctccagcaggaccccgtttcaggcctgagtggccggagtggatacccttcgatgagtccactctctccccaggatatattccagttggcttgtatggaccccgccgatgacggacagttccaagaacggcagtctctggtggtgacagaccctagctccatgagacgttcattttccactattcgggataagcgttcaaattcctcgtggttggaggaattctccatggagcgaagcagtgaaaatacctacaagtcccgtcgccggagttaccactcctccttgcggctgtcagcccaccgcctgaactctgattcaggccacaagtctgacactcaccgctcagggggcagggagcggggacgatcaaaagagcgaaagcatcttctctctcctgatgtctcccgctgcaattcagaagagcgagggacccaggctgactgggagtccccagagcgccgtcaatccaggtcacccagtgagggcaggtcacagacgcccaacagacagggcacaggttccctaagtgagagctccatcccctctgtctctgacaccagcaccccaagaagaagtcgtcggcagctcccacccgtcccgccaaagccccggcccctcctttcctacagctccctgattcgacacgcgggcagcatctctccacctgctgatggaagcgaggagggctccccgctgacctcccaagctctggagagcaacaatgcttgcctgaccgagtcttccaactctccgcacccccagcagagccaacatgcctccccacagcgctacatctccgagccctacttggccctgcacgaagactcccacgcctcagactgtggtgaggaggagacgctcactttcgaagcagccgtggctactagcctgggccgttccaacaccatcggctcagccccacccctgcggcatagctggcagatgcccaacgggcactatcggcggcggaggcgcggggggcctgggccaggcatgatgtgtggggctgtcaacaacctgctaagtgacacggaagaagatgacaaatgctagaggctgctcccccctccgatgcatgctcttctctcacatggagaaaaccaagacagaattgggaagccagtgcggcccgggggggaggaagagggaaaaggaagatggaaggacaccatgcattatcagagaagaggaagtaaaggacaatcagaacaccagtcaaacccaccaaattgctttattcccctttgcaagatgggcactgccatagttctgcctctttgctggggaaagaaaccaggaacgtggagggttattactgcgggagaagggacacgaggatggctttgcttccccttgccccttcccacttttctaaaagctgtggagggatctagctggcctatgtctacactcagtgccctgagaagcctggaagactttctggctcttaactggggagtagtggagaccataggagaggactctcctccctcaccagctcttacgcctcagccagcaccactgccaccagggcaactgcagcagcatctcatgcataaccctgtggcttgcttcccccagggcagcacaggctaagtcaggaacatcggatgccagggagggaggagaaagccgaagcgaaaggggtcagggtgctgaggcaacagcagcaagggctggtctggacaagaaaagccatagcccggcagcccctaccatgagggagacagagaaacagaactggtggtgctggggggtatagccccccatccttgaggcctgtcacccacacagtaggtgctgagagttaggacaggtcaggaagtcccccagggtccacaaaggtgcctgaggctctggtaagggtgaagataaaagtatttaacaaccgctatggcatcaatgtaagtggagtttggtcctagtgccggagcccatgctattccaggcattggctctttagatgccagtcatgggggaaccctgagggtgtgggtagagtagcaggggccacctaagagattaaaaacagtctgttttccaaccagtgtggaagcaattaaatatgcgtaacagtgctacggccacaccagcacctcctggctgaaggtcagcccacactctggtccatgaggcagcaaggccagtgctgtgccaagcccggtaaggccaagtgccgaggcccagccttccctgccactcctctgagagggcagaacacacatatccaagtaggctacccaccactgggtagggatttctgtaaagatgggaaaggctgatagattgaaataagcttctgtgaaagtctggatttactgaggacctcccctgaggagggaccgttgggaccgcagattctgcagctggtgtggggttcaggtcagtttgtcaggatgctttaaggtgattagtaaatatacctcagcttagacttgggctgctccttctagcaaagcaggctccagtggggcctcatcatacaggatgacaagactggggccctgttcaccttgaacatgcccctgggccaagatggggcttcacccctccccagagtaagagctggggctgacagtcccaccctgtcattcctaatagcccaaacgcagaagcactgagcaagagagccctttcttgccaagccagtgctcttttggtatatggcatacagctccattggaggggacacatcactggctttatctggtggaaatgtacctttcccttaagttcctccttagtgccatcacagcaggtgaatgggtgccctacggggccctccttcccccaccaggaacagatggaacctgccacccaggatcctgatctgccctgcactgagcactcagtggataaacactcctccagcccagacacactcctcctcttgggcaggagcaatccagagttgttatttttcttagaaggagcctcttttccctctattttttaaattgaaatataatagctgcatcagccctgaaaagccaaattcaaccacatggctggagaatcatttgtcatggccccgccttctcttctgatactaatggagcttcatgacccacggtcagcccccaaaccaaagttgtcccaacagaggaggccagtgaggcagagacagagctctcccactctcagaccctcttttgtcttcattttcctctcccacttagcacatgtgtgcttgagggtggctgggaatgtgatatacagcaccctgatcctaacaggtgtgattgttacgtaagacgctgatactgggccttgtattgcttttaaagtttcctctgctcagcatcatttcatgccaaagtgctgctatgggctgctttgtgtgcacaaaattgctttttccacctcggaaatgcagctttccctagggggaggcctacaacaggacgaccattctgagccagtgagtctattgcatggtgttttgagaaagggaattttagtgacaccttatgccatttcaagaggagaaatgcaggctggcagagcaatttccagaaatggaatttgcctgcaaatagtataaacaacactaaatttactgtgccaggaaatcttcctgaactccttgaactcatacacacaggtatttgagtcctgaataaagtgttggaaagcactgcagatgcggtcacctgactgaccacctgggttttctattaccagtgaatttcttttattcaccttcccttgaccaagaaattgggtttcttttccctcagcctgcacttactcttctattaagaccagaaaataaaataattttccgttgagtcacaaactcatcatcttgtttggtgttctgctgcctctgaacaaaagtgaatgccagccttcccttgctgggtgtcagagtctgcctcccttgaaaagaggcccctgtagaccccaacacctattcttttctctggttaattacagcagcatctgagaaattccatgcaaaagaagactacaaccagtgtttcagatataccacaagatcaaatttgggcactggtggtccacctcagaagactcttgagtcatatattcagtttctcttgctaatatatgactcgtcttcaccatctcctcaaaacaagagcaaagccaagatagaggaaggtaaaaggaggaggaaaggaaaccaaggcagggagatgttctaagtaggtttgcatttagttacccctcatttcacttaaggctccagacagactccaggtagggaatgcatgctgtctctttctctgtgtctgtctccccatctcctagaggacagagtgccagcgacctctggacaggggcagggctccagccaaggtgcccctgagccagggtcaacatagaatttcctgccccgtgaagggctggcaccagctagcatccccttggctccacatgagtcatgaacacaattgtcagtgggggtctctgctgctcttctggctgaagaatctgtttttcttctgggcttcacttgtagttcctattcaatgtctccatagggcactgagatcaccaagaacattacccagaagctgaagtccaaatgttctagattttgacctctcttgactctggggccacaaagagaaggccccataatccacctctcagccagtatctcccttctttgcacagattcctcccaaccccatagagcctatgtggtgagcatgagggtcgtcttccctctgttctcccatcccagcctctgttttgctgcatgttagcgctgatccagctcctgagatggttaattccacccaatccaagcttatttgcttgcctgactgactccaccactctctcagctatgggggaatattgcattctaatgaaatagggtttggaactcacctggtgctcctcgcaagacaactgacacaaggtgtagggtgtgggggtggacaaaatgcccacctactggataaaagctcactgcaggaaaatgaggtctcctggcataatgcaacaaaaatctcatataattttgatttttaaaaagttgttctcaatttttcattacatcctacttctcagccctctggatgtttcatttttttggacaaagtgtttctttagtggttggggccagggacaggttgagggatatttctcggctcatttataagatataaatattatgaggttgtatgtaaagaaagggcaaacgtacagcagaaggggagcaaatagctacctttcaaggattttgagatttgaaggttaaggaatttttactgctatttttgttcatcagtttcatgtctgttatgttttgagatcctcagaggcctagggttagcgtataccaagaatcctggtgagaggcgttgccatgccttggggtgaattcttccccactagctctctcacccagcctacaagtccttctctcatagatcccagagcaatgggcaccgtccaggaggtacaggagaggactttatgatgcaggaaagaaggaagaagtgggtcccttgcaagtggccagacagggaatgatggtttgactccagaaatcaggaatcaggttcaggtttggataacttctctttaaaatatctccacattgagactcttattttaacaaaatccaaacaaaattaactcagggcttgtgacctaacctttgtaagaaggtgatcaaagagatcctacattaataagcactgcctgtagcaccagctttgtctttttgtcttttgttgtttctttcctgaaccaccctgtacatcatagccaggtctaccccaaatagagcagcagctgatggcttctctgctgtctgtggagggagggctcggctgcagacctatggtgttttgtcagctgttaggtgctacagcccacccagtcagagtacatagacatagcgctttaagggacaaaggacaaacagaactatctttgctttccggaggccatctttttctttccttgaatcctttctgctttaaacttctgaggtttatgcatcccagagaggtcacaccaagccaaagagaaaaaattcatagattgtcccagcctacccaaagggcctgaaaagcctctctaaacaaaactcaagatagctgagaagtatgaatggggttcacagcaaagtccaattgatggcttttgaggctgggacacccccaaactgcccttctgtttttgtagttttgctttcttccacccaccctctctccgcatgctgtaagttaggggagttagtatcttgaacttctaaatgcaaaaggagattttataataagccatgctacctgtaaatacattattgaggtttgcatttttatttttggaggtatgaaagagttgagtagaccaagtcaaaagaggtgtggggatttatgtttatttttatttgtttggggttgtttggttggtggctgggtttcttgtaacagacctattctggaatagcaaagaaggataccttggtgatctgcaatgtttctgaatctgtttctctttaggaagtgattgccatcaaatttagtgatatgatatttgagtcaaaaatctgaggttatagtaccagctgtcttttctctctggtctcctttttgtcgtctttctctttctgtctaaattggcctctgtcttttcctaaggacttaaaatataacccaaattaatgaagaactgccccaaaacttcagtgaaagccaaggaggtacagaattttttcaggacatctttaaccaatacaaaatttatgtcttaagaagataatttttacaatagtgtagtaatctgataaatgaaaactattggaagtcaatagttttttatattccagctttctgtattcaaacttgtgccttcagcaagcatctcttcactttctttcccttgtcaattgaaacatgaatgtttggctaactcatgatgtaaagtgtctgttaagttaataatacataatttaaagcacttagtctccacaaagcaatttagaaaaatcttcacttgttagatcccatgaagtacctatgaaattctcagcattgctataagcatttgattttttttaaggaaacttcctgtttaatggaatctgaatccaagatttgctttaatttcactctattcttcccattttcccttattcttcttgttgtctctctaattaaaaaaaaaaaaaacctaggcttttttttttctatccagaaagttgggttttcatgatctgagcttccttatgtctccttctctttgtgcaaacttaaaccagtcatagattgtcacccagacatattctccaacccagcattggaaatctgaacgaatcttttctctttttgtcctacaagtttgtcagagatgagaatggattgctgtctacattctacaaccagaccctagactttataccaggctgtgccacttcctcttcacttcactcagaggatggccccaaaactgaaaaggaaatgaaataatcaaatataccaaatccgaatttgactttatttgatgactcaatattttccttccagtactctaatttttttttatggcaatggcctatatggcacaagaaccaccacttaaagcaaatctgttgaacatttttataagggatgagcaagaaaaacacactccaaaattttaaagtgccattaatcaatttttaagaataaaggtaatatgaaatgagggctaaacaatgtaatataactgccagttaaggtagacagtagttgtggtcttagttacatttgatatggagttgtgtaatattaagcagatcccagtggagttagtaaaaacataggtattgagttttaatggctaccaattgggatatatacttagcctgcaggctgaactttagtcagtgtttttctatcatgttgttttgtgaacaagtcaaaatttatacaaagctaccctaagtgctgcaattgcagaggaacttgcctcttcgtgatattagagggcagtccaactccgctcaaactgagtccaagatttgaattcatccagaaaaacaaatggaggagaaaagcctaatgcaccacatgtgtttggcatttcatggctgggacaatggagtagagggtaggaagacaagctgtagaacaaaagcaaagtgaggtagaaagtaacaggtcccagacgaggacagacttagagatgtgtaaccttggatcctctttttcacttagaatatgggtaaacttcttagcacaagactggattaagagaagttctttctgttaaactcacctagggtagtggctttgaaggcctcagaggattaatagattcccaaaattttcttccagacctgggagatggagagaaagaggttcttgctttaaagcggctcgaagacaatctttatgacttcagcaactcttcaacatagtagcaccaataaaggagagattatgttaacttcctagtggtgagaataccatgggatgggagaagggccagtgagtgggatgggaatgagcttcatcaggaacagatttcagactctgcagggtgcaccggttctagcctcaaataacaacattgcaaggaggtggactacagggtccacaccctctgtccttcggggcccatggtcaggccattccctctttgttttgctcctagaggatgagcatgtaagatgagatcaggagggaaattgggtgctctgcctcaggctgttaaaatgctgctacctgcattctaaaacgtgcaagtcatgccccacaagacacctccttagggcagcatccactgtggtgtgccagcctgacacccctgcagtcacggtgtttgaatggcagctgatgctggcccacccagagtatcggtgcatctctcctaaagccacagttcagcactgcatgttgaccaggcggatatcctataatatagatgctcgtttggatccaaaaggaaaaccattaaaaataaaagaaagatgaaaaactttaatgttttgggggggataaaagaaaagaataaataaaaccttgttgtaaagaatgcatcggcctgatttccctcacttgatgtgtttctttgctgctaccagaaagggaaatcatgggagtgaagcctgccaggaccctcagggtaagctggcagcaggctctgcagctgcacttagttggggtctgctcagaccagtcaggaggaattcagaggctttcaaagtcccaaggacatcctggctctgaaaggttttcttttgttaaaaaatgcactttgtgctgtgtgtggtagctcgtatgtgttaccccagctattcaggaagctagggcagaaggattgcttgaggctaggaattcaagactggcctggatgacagagtgaaaccctcatctcttaaaaaaaaaaaaaaggaataaaaatgttctctgccttggataacatttttttttaaagattccatacaaactcattccctgaaagagaaaaacagattttctaatcaggacattgtcctgatctgcaagcgaggagtttaacaaggtaggcagagaacttccttatggaacaacagggctctgtgaccagaaaaactatgaccagcctcctctgaaaaaaggtggggggattatagggcaccagctcagccgccaagttcaggaagcagctgattcccaagactcttaggagatactgtccattcttcctcctgtccacatcactccccatttaactgcaattgctcccttgccacagggaaagcagcaagccccaggcccaggcctccatttgatttgccactccgagaactgtctgcttcattctgcttgaggagatatcttcacctaatcctagtgttaattattttaatctgagcaacgcttttatcaattagatagaaaccagcattccaaaataagtcccctaagtttgtagtttgagccaagatattttcttgagccctaagatatatgactttattagctaggatttttcttatgattaaaaacatccaaaaatgtgatatgtggtcatctctcagggaggtctaggtccttgcaggctggattttagaaatttctaagattctctacaacttttaaattttatgttatttttcaatcataatttctttcctgtggcttctatcaccattggagttagaatctgacaacctttaacttcacacttttatgagataataagttggtttcttgggcaaaggttggtttgtaagccatttacatggattgatgatttctgttcttgttttcttctaacctagaactcaggtccacagttttccacaggctaatggcactatgaaacagatataaagaaaaatagacactg

SEQ ID NO: 82118 - DNA, 6609 bp, Artificial Sequence
  derived and/or modified sequence
atggccctgtacaaccccatccccgtgagacagaactgcttcaccgtgaacagaagcctgttcatcttcggcgaggacaacatcgtgagaaagtacgccaagaagctgatcgactggccccccttcgagtacatgatcctggccaccatcatcgccaactgcatcgtgctggccctggagcagcacctgcccgaggacgacaagacccccatgagcagaagactggagaagaccgagccctacttcatcggcatcttctgcttcgaggccggcatcaagatcgtggccctgggcttcatcttccacaagggcagctacctgagaaacggctggaacgtgatggacttcatcgtggtgctgagcggcatcctggccaccgccggcacccacttcaacacccacgtggacctgagaaccctgagagccgtgagagtgctgagacccctgaagctggtgagcggcatccccagcctgcagatcgtgctgaagagcatcatgaaggccatggtgcccctgctgcagatcggcctgctgctgttcttcgccatcctgatgttcgccatcatcggcctggagttctacagcggcaagctgcacagagcctgcttcatgaacaacagcggcatcctggagggcttcgaccccccccacccctgcggcgtgcagggctgccccgccggctacgagtgcaaggactggatcggccccaacgacggcatcacccagttcgacaacatcctgttcgccgtgctgaccgtgttccagtgcatcaccatggagggctggaccaccgtgctgtacaacaccaacgacgccctgggcgccacctggaactggctgtacttcatccccctgatcatcatcggcagcttcttcgtgctgaacctggtgctgggcgtgctgagcggcgagttcgccaaggagagagagagagtggagaacagaagagccttcatgaagctgagaagacagcagcagatcgagagagagctgaacggctacagagcctggatcgacaaggccgaggaggtgatgctggccgaggagaacaagaacgccggcaccagcgccctggaggtgctgagaagagccaccatcaagagaagcagaaccgaggccatgaccagagacagcagcgacgagcactgcgtggacatcagcagcgtgggcacccccctggccagagccagcatcaagagcgccaaggtggacggcgtgagctacttcagacacaaggagagactgctgagaatcagcatcagacacatggtgaagagccaggtgttctactggatcgtgctgagcctggtggccctgaacaccgcctgcgtggccatcgtgcaccacaaccagccccagtggctgacccacctgctgtactacgccgagttcctgttcctgggcctgttcctgctggagatgagcctgaagatgtacggcatgggccccagactgtacttccacagcagcttcaactgcttcgacttcggcgtgaccgtgggcagcatcttcgaggtggtgtgggccatcttcagacccggcaccagcttcggcatcagcgtgctgagagccctgagactgctgagaatcttcaagatcaccaagtactgggccagcctgagaaacctggtggtgagcctgatgagcagcatgaagagcatcatcagcctgctgttcctgctgttcctgttcatcgtggtgttcgccctgctgggcatgcagctgttcggcggcagattcaacttcaacgacggcacccccagcgccaacttcgacaccttccccgccgccatcatgaccgtgttccagatcctgaccggcgaggactggaacgaggtgatgtacaacggcatcagaagccagggcggcgtgagcagcggcatgtggagcgccatctacttcatcgtgctgaccctgttcggcaactacaccctgctgaacgtgttcctggccatcgccgtggacaacctggccaacgcccaggagctgaccaaggacgagcaggaggaggaggaggccttcaaccagaagcacgccctgcagaaggccaaggaggtgagccccatgagcgcccccaacatgcccagcatcgagagagagagaagaagaagacaccacatgagcgtgtgggagcagagaaccagccagctgagaaagcacatgcagatgagcagccaggaggccctgaacagagaggaggcccccaccatgaaccccctgaaccccctgaaccccctgagcagcctgaaccccctgaacgcccaccccagcctgtacagaagacccagagccatcgagggcctggccctgggcctggccctggagaagttcgaggaggagagaatcagcagaggcggcagcctgaagggcgacggcggcgacagaagcagcgccctggacaaccagagaacccccctgagcctgggccagagagagcccccctggctggccagaccctgccacggcaactgcgaccccacccagcaggaggccggcggcggcgaggccgtggtgaccttcgaggacagagccagacacagacagagccagagaagaagcagacacagaagagtgagaaccgagggcaaggagagcagcagcgccagcagaagcagaagcgccagccaggagagaagcctggacgaggccatgcccaccgagggcgagaaggaccacgagctgagaggcaaccacggcgccaaggagcccaccatccaggaggagagagcccaggacctgagaagaaccaacagcctgatggtgagcagaggcagcggcctggccggcggcctggacgaggccgacacccccctggtgctgccccaccccgagctggaggtgggcaagcacgtggtgctgaccgagcaggagcccgagggcagcagcgagcaggccctgctgggcaacgtgcagctggacatgggcagagtgatcagccagagcgagcccgacctgagctgcatcaccgccaacaccgacaaggccaccaccgagagcaccagcgtgaccgtggccatccccgacgtggaccccctggtggacagcaccgtggtgcacatcagcaacaagaccgacggcgaggccagccccctgaaggaggccgagatcagagaggacgaggaggaggtggagaagaagaagcagaagaaggagaagagagagaccggcaaggccatggtgccccacagcagcatgttcatcttcagcaccaccaaccccatcagaagagcctgccactacatcgtgaacctgagatacttcgagatgtgcatcctgctggtgatcgccgccagcagcatcgccctggccgccgaggaccccgtgctgaccaacagcgagagaaacaaggtgctgagatacttcgactacgtgttcaccggcgtgttcaccttcgagatggtgatcaagatgatcgaccagggcctgatcctgcaggacggcagctacttcagagacctgtggaacatcctggacttcgtggtggtggtgggcgccctggtggccttcgccctggccaacagcatgaagaccaacaagggcagagacatcaagaccatcaagagcctgagagtgctgagagtgctgagacccctgaagaccatcaagagactgcccaagctgaaggccgtgttcgactgcgtggtgaccagcctgaagaacgtgttcaacatcctgatcgtgtacaagctgttcatgttcatcttcgccgtgatcgccgtgcagctgttcaagggcaagttcttctactgcaccgacagcagcaaggacaccgagaaggagtgcatcggcaactacgtggaccacgagaagaacaagatggaggtgaagggcagagagtggaagagacacgagttccactacgacaacatcatctgggccctgctgaccctgttcaccgtgagcaccggcgagggctggccccaggtgctgcagcacagcgtggacgtgaccgaggaggacagaggccccagcagaagcaacagaatggagatgagcatcttctacgtggtgtacttcgtggtgttccccttcttcttcgtgaacatcttcgtggccctgatcatcatcaccttccaggagcagggcgacaagatgatggaggagtgcagcctggagaagaacgagagagcctgcatcgacttcgccatcagcgccaagcccctgaccagatacatgccccagaacagacacaccttccagtacagagtgtggcacttcgtggtgagccccagcttcgagtacaccatcatggccatgatcgccctgaacaccgtggtgctgatgatgaagtactacagcgccccctgcacctacgagctggccctgaagtacctgaacatcgccttcaccatggtgttcagcctggagtgcgtgctgaaggtgatcgccttcggcttcctgaactacttcagagacacctggaacatcttcgacttcatcaccgtgatcggcagcatcaccgagatcatcctgaccgacagcaagctggtgaacaccagcggcttcaacatgagcttcctgaagctgttcagagccgccagactgatcaagctgctgagacagggctacaccatcagaatcctgctgtggaccttcgtgcagagcttcaaggccctgccctacgtgtgcctgctgatcgccatgctgttcttcatctacgccatcatcggcatgcaggtgttcggcaacatcaagctggacgaggagagccacatcaacagacacaacaacttcagaagcttcttcggcagcctgatgctgctgttcagaagcgccaccggcgaggcctggcaggagatcatgctgagctgcctgggcgagaagggctgcgagcccgacaccaccgcccccagcggccagaacgagaacgagagatgcggcaccgacctggcctacgtgtacttcgtgagcttcatcttcttctgcagcttcctgatgctgaacctgttcgtggccgtgatcatggacaacttcgagtacctgaccagagacagcagcatcctgggcccccaccacctggacgagttcgtgagagtgtgggccgagtacgacagagccgcctgcggcagaatcccctacaaggacatgtacaagctggtgagagtgatcagcccccccctgggcctgggcgagaactgcccctacagagtggcctgcaagagactggtgctgatgaacatgcccgtggccgaggacatgaccgtgcacttcaccagcaccctgatggccctgatcagaaccgccctggacatcaagatcgccaagggcggcgccgacagacagcagctggacagcgagctgcagaaggagaccctggccatctggccccacctgagccagaagatgctggacctgctggtgcccatgcccaaggccagcgacctgaccgtgggcaagatctacgccgccatgatgatcatggactactacaagcagagcaaggtgaagaagcagagacagcagctggaggagcagaagaacgcccccatgttccagagaatggagcccagcagcctgccccaggagatcatcgccaacgccaaggccctgccctacctgcagcaggaccccgtgagcggcctgagcggcagaagcggctaccccagcatgagccccctgagcccccaggacatcttccagctggcctgcatggaccccgccgacgacggccagttccaggagagacagagcctggtggtgaccgaccccagcagcatgagaagaagcttcagcaccatcagagacaagagaagcaacagcagctggctggaggagttcagcatggagagaagcagcgagaacacctacaagagcagaagaagaagctaccacagcagcctgagactgagcgcccacagactgaacagcgacagcggccacaagagcgacacccacagaagcggcggcagagagagaggcagaagcaaggagagaaagcacctgctgagccccgacgtgagcagatgcaacagcgaggagagaggcacccaggccgactgggagagccccgagagaagacagagcagaagccccagcgagggcagaagccagacccccaacagacagggcaccggcagcctgagcgagagcagcatccccagcgtgagcgacaccagcacccccagaagaagcagaagacagctgccccccgtgccccccaagcccagacccctgctgagctacagcagcctgatcagacacgccggcagcatcagcccccccgccgacggcagcgaggagggcagccccctgaccagccaggccctggagagcaacaacgcctgcctgaccgagagcagcaacagcccccacccccagcagagccagcacgccagcccccagagatacatcagcgagccctacctggccctgcacgaggacagccacgccagcgactgcggcgaggaggagaccctgaccttcgaggccgccgtggccaccagcctgggcagaagcaacaccatcggcagcgccccccccctgagacacagctggcagatgcccaacggccactacagaagaagaagaagaggcggccccggccccggcatgatgtgcggcgccgtgaacaacctgctgagcgacaccgaggaggacgacaagtgctag

SEQ ID NO: 82119 - DNA, 1317 bp, Artificial Sequence
  derived and/or modified sequence
atggccagattcggcgaggccgtggtggccagacccggcagcggcgacggcgacagcgaccagagcagaaacagacagggcacccccgtgcccgccagcggccaggccgccgcctacaagcagaccaaggcccagagagccagaaccatggccctgtacaaccccatccccgtgagacagaactgcttcaccgtgaacagaagcctgttcatcttcggcgaggacaacatcgtgagaaagtacgccaagaagctgatcgactggccccccttcgagtacatgatcctggccaccatcatcgccaactgcatcgtgctggccctggagcagcacctgcccgaggacgacaagacccccatgagcagaagactggagaagaccgagccctacttcatcggcatcttctgcttcgaggccggcatcaagatcgtggccctgggcttcatcttccacaagggcagctacctgagaaacggctggaacgtgatggacttcatcgtggtgctgagcggcatcctggccaccgccggcacccacttcaacacccacgtggacctgagaaccctgagagccgtgagagtgctgagacccctgaagctggtgagcggcatccccagcctgcagatcgtgctgaagagcatcatgaaggccatggtgcccctgctgcagatcggcctgctgctgttcttcgccatcctgatgttcgccatcatcggcctggagttctacagcggcaagctgcacagagcctgcttcatgaacaacagcggcatcctggagggcttcgaccccccccacccctgcggcgtgcagggctgccccgccggctacgagtgcaaggactggatcggccccaacgacggcatcacccagttcgacaacatcctgttcgccgtgctgaccgtgttccagtgcatcaccatggagggctggaccaccgtgctgtacaacaccaacgacgccctgggcgccacctggaactggctgtacttcatccccctgatcatcatcggcagcttcttcgtgctgaacctggtgctgggcgtgctgagcggcgagttcgccaaggagagagagagagtggagaacagaagagccttcatgaagctgagaagacagcagcagatcgagagagagctgaacggctacagagcctggatcgacaaggccgaggaggtgatgctggccgaggagaacaagaacgccggcaccagcgccctggaggtgctgagaagagccaccatcaagagaagcagaaccgaggccatgaccagagacagcagcgacgagcactgcgtggacatcagcagcgtgtag

SEQ ID NO: 82120 - DNA, 6756 bp, Artificial Sequence
  derived and/or modified sequence
atggccagattcggcgaggccgtggtggccagacccggcagcggcgacggcgacagcgaccagagcagaaacagacagggcacccccgtgcccgccagcggccaggccgccgcctacaagcagaccaaggcccagagagccagaaccatggccctgtacaaccccatccccgtgagacagaactgcttcaccgtgaacagaagcctgttcatcttcggcgaggacaacatcgtgagaaagtacgccaagaagctgatcgactggccccccttcgagtacatgatcctggccaccatcatcgccaactgcatcgtgctggccctggagcagcacctgcccgaggacgacaagacccccatgagcagaagactggagaagaccgagccctacttcatcggcatcttctgcttcgaggccggcatcaagatcgtggccctgggcttcatcttccacaagggcagctacctgagaaacggctggaacgtgatggacttcatcgtggtgctgagcggcatcctggccaccgccggcacccacttcaacacccacgtggacctgagaaccctgagagccgtgagagtgctgagacccctgaagctggtgagcggcatccccagcctgcagatcgtgctgaagagcatcatgaaggccatggtgcccctgctgcagatcggcctgctgctgttcttcgccatcctgatgttcgccatcatcggcctggagttctacagcggcaagctgcacagagcctgcttcatgaacaacagcggcatcctggagggcttcgaccccccccacccctgcggcgtgcagggctgccccgccggctacgagtgcaaggactggatcggccccaacgacggcatcacccagttcgacaacatcctgttcgccgtgctgaccgtgttccagtgcatcaccatggagggctggaccaccgtgctgtacaacaccaacgacgccctgggcgccacctggaactggctgtacttcatccccctgatcatcatcggcagcttcttcgtgctgaacctggtgctgggcgtgctgagcggcgagttcgccaaggagagagagagagtggagaacagaagagccttcatgaagctgagaagacagcagcagatcgagagagagctgaacggctacagagcctggatcgacaaggccgaggaggtgatgctggccgaggagaacaagaacgccggcaccagcgccctggaggtgctgagaagagccaccatcaagagaagcagaaccgaggccatgaccagagacagcagcgacgagcactgcgtggacatcagcagcgtgggcacccccctggccagagccagcatcaagagcgccaaggtggacggcgtgagctacttcagacacaaggagagactgctgagaatcagcatcagacacatggtgaagagccaggtgttctactggatcgtgctgagcctggtggccctgaacaccgcctgcgtggccatcgtgcaccacaaccagccccagtggctgacccacctgctgtactacgccgagttcctgttcctgggcctgttcctgctggagatgagcctgaagatgtacggcatgggccccagactgtacttccacagcagcttcaactgcttcgacttcggcgtgaccgtgggcagcatcttcgaggtggtgtgggccatcttcagacccggcaccagcttcggcatcagcgtgctgagagccctgagactgctgagaatcttcaagatcaccaagtactgggccagcctgagaaacctggtggtgagcctgatgagcagcatgaagagcatcatcagcctgctgttcctgctgttcctgttcatcgtggtgttcgccctgctgggcatgcagctgttcggcggcagattcaacttcaacgacggcacccccagcgccaacttcgacaccttccccgccgccatcatgaccgtgttccagatcctgaccggcgaggactggaacgaggtgatgtacaacggcatcagaagccagggcggcgtgagcagcggcatgtggagcgccatctacttcatcgtgctgaccctgttcggcaactacaccctgctgaacgtgttcctggccatcgccgtggacaacctggccaacgcccaggagctgaccaaggacgagcaggaggaggaggaggccttcaaccagaagcacgccctgcagaaggccaaggaggtgagccccatgagcgcccccaacatgcccagcatcgagagagagagaagaagaagacaccacatgagcgtgtgggagcagagaaccagccagctgagaaagcacatgcagatgagcagccaggaggccctgaacagagaggaggcccccaccatgaaccccctgaaccccctgaaccccctgagcagcctgaaccccctgaacgcccaccccagcctgtacagaagacccagagccatcgagggcctggccctgggcctggccctggagaagttcgaggaggagagaatcagcagaggcggcagcctgaagggcgacggcggcgacagaagcagcgccctggacaaccagagaacccccctgagcctgggccagagagagcccccctggctggccagaccctgccacggcaactgcgaccccacccagcaggaggccggcggcggcgaggccgtggtgaccttcgaggacagagccagacacagacagagccagagaagaagcagacacagaagagtgagaaccgagggcaaggagagcagcagcgccagcagaagcagaagcgccagccaggagagaagcctggacgaggccatgcccaccgagggcgagaaggaccacgagctgagaggcaaccacggcgccaaggagcccaccatccaggaggagagagcccaggacctgagaagaaccaacagcctgatggtgagcagaggcagcggcctggccggcggcctggacgaggccgacacccccctggtgctgccccaccccgagctggaggtgggcaagcacgtggtgctgaccgagcaggagcccgagggcagcagcgagcaggccctgctgggcaacgtgcagctggacatgggcagagtgatcagccagagcgagcccgacctgagctgcatcaccgccaacaccgacaaggccaccaccgagagcaccagcgtgaccgtggccatccccgacgtggaccccctggtggacagcaccgtggtgcacatcagcaacaagaccgacggcgaggccagccccctgaaggaggccgagatcagagaggacgaggaggaggtggagaagaagaagcagaagaaggagaagagagagaccggcaaggccatggtgccccacagcagcatgttcatcttcagcaccaccaaccccatcagaagagcctgccactacatcgtgaacctgagatacttcgagatgtgcatcctgctggtgatcgccgccagcagcatcgccctggccgccgaggaccccgtgctgaccaacagcgagagaaacaaggtgctgagatacttcgactacgtgttcaccggcgtgttcaccttcgagatggtgatcaagatgatcgaccagggcctgatcctgcaggacggcagctacttcagagacctgtggaacatcctggacttcgtggtggtggtgggcgccctggtggccttcgccctggccaacgccctgggcaccaacaagggcagagacatcaagaccatcaagagcctgagagtgctgagagtgctgagacccctgaagaccatcaagagactgcccaagctgaaggccgtgttcgactgcgtggtgaccagcctgaagaacgtgttcaacatcctgatcgtgtacaagctgttcatgttcatcttcgccgtgatcgccgtgcagctgttcaagggcaagttcttctactgcaccgacagcagcaaggacaccgagaaggagtgcatcggcaactacgtggaccacgagaagaacaagatggaggtgaagggcagagagtggaagagacacgagttccactacgacaacatcatctgggccctgctgaccctgttcaccgtgagcaccggcgagggctggccccaggtgctgcagcacagcgtggacgtgaccgaggaggacagaggccccagcagaagcaacagaatggagatgagcatcttctacgtggtgtacttcgtggtgttccccttcttcttcgtgaacatcttcgtggccctgatcatcatcaccttccaggagcagggcgacaagatgatggaggagtgcagcctggagaagaacgagagagcctgcatcgacttcgccatcagcgccaagcccctgaccagatacatgccccagaacagacacaccttccagtacagagtgtggcacttcgtggtgagccccagcttcgagtacaccatcatggccatgatcgccctgaacaccgtggtgctgatgatgaagtactacagcgccccctgcacctacgagctggccctgaagtacctgaacatcgccttcaccatggtgttcagcctggagtgcgtgctgaaggtgatcgccttcggcttcctgaactacttcagagacacctggaacatcttcgacttcatcaccgtgatcggcagcatcaccgagatcatcctgaccgacagcaagctggtgaacaccagcggcttcaacatgagcttcctgaagctgttcagagccgccagactgatcaagctgctgagacagggctacaccatcagaatcctgctgtggaccttcgtgcagagcttcaaggccctgccctacgtgtgcctgctgatcgccatgctgttcttcatctacgccatcatcggcatgcaggtgttcggcaacatcaagctggacgaggagagccacatcaacagacacaacaacttcagaagcttcttcggcagcctgatgctgctgttcagaagcgccaccggcgaggcctggcaggagatcatgctgagctgcctgggcgagaagggctgcgagcccgacaccaccgcccccagcggccagaacgagaacgagagatgcggcaccgacctggcctacgtgtacttcgtgagcttcatcttcttctgcagcttcctgatgctgaacctgttcgtggccgtgatcatggacaacttcgagtacctgaccagagacagcagcatcctgggcccccaccacctggacgagttcgtgagagtgtgggccgagtacgacagagccgcctgcggcagaatccactacaccgagatgtacgagatgctgaccctgatgagcccccccctgggcctgggcaagagatgccccagcaaggtggcctacaagagactggtgctgatgaacatgcccgtggccgaggacatgaccgtgcacttcaccagcaccctgatggccctgatcagaaccgccctggacatcaagatcgccaagggcggcgccgacagacagcagctggacagcgagctgcagaaggagaccctggccatctggccccacctgagccagaagatgctggacctgctggtgcccatgcccaaggccagcgacctgaccgtgggcaagatctacgccgccatgatgatcatggactactacaagcagagcaaggtgaagaagcagagacagcagctggaggagcagaagaacgcccccatgttccagagaatggagcccagcagcctgccccaggagatcatcgccaacgccaaggccctgccctacctgcagcaggaccccgtgagcggcctgagcggcagaagcggctaccccagcatgagccccctgagcccccaggacatcttccagctggcctgcatggaccccgccgacgacggccagttccaggagagacagagcctggtggtgaccgaccccagcagcatgagaagaagcttcagcaccatcagagacaagagaagcaacagcagctggctggaggagttcagcatggagagaagcagcgagaacacctacaagagcagaagaagaagctaccacagcagcctgagactgagcgcccacagactgaacagcgacagcggccacaagagcgacacccacagaagcggcggcagagagagaggcagaagcaaggagagaaagcacctgctgagccccgacgtgagcagatgcaacagcgaggagagaggcacccaggccgactgggagagccccgagagaagacagagcagaagccccagcgagggcagaagccagacccccaacagacagggcaccggcagcctgagcgagagcagcatccccagcgtgagcgacaccagcacccccagaagaagcagaagacagctgccccccgtgccccccaagcccagacccctgctgagctacagcagcctgatcagacacgccggcagcatcagcccccccgccgacggcagcgaggagggcagccccctgaccagccaggccctggagagcaacaacgcctgcctgaccgagagcagcaacagcccccacccccagcagagccagcacgccagcccccagagatacatcagcgagccctacctggccctgcacgaggacagccacgccagcgactgcggcgaggaggagaccctgaccttcgaggccgccgtggccaccagcctgggcagaagcaacaccatcggcagcgccccccccctgagacacagctggcagatgcccaacggccactacagaagaagaagaagaggcggccccggccccggcatgatgtgcggcgccgtgaacaacctgctgagcgacaccgaggaggacgacaagtgctag

SEQ ID NO: 82121 - protein, 1017 aa, Artificial Sequence
  derived and/or modified sequence
MDLIRGVLLRLLLLASSLGPGAVSLRAAIRKPGKVGPPLDIKLGALNCTAFSIQWKMPRHPGSPILGYTVFYSEVGADKSLQEQLHSVPLSRDIPTTEEVIGDLKPGTEYRVSIAAYSQAGKGRLSSPRHVTTLSQDSCLPPAAPQQPHVIVVSDSEVALSWKPGASEGSAPIQYYSVEFIRPDFDKKWTSIHERIQMDSMVIKGLDPDTNYQFAVRAMNSHGPSPRSWPSDIIRTLCPEEAGSGRYGPRYITDMGAGEDDEGFEDDLDLDISFEEVKPLPATKGGNKKFLVESKKMSISNPKTISRLIPPTSASLPVTTVAPQPIPIQRKGKNGVAIMSRLFDMPCDETLCSADSFCVNDYTWGGSRCQCTLGKGGESCSEDIVIQYPQFFGHSYVTFEPLKNSYQAFQITLEFRAEAEDGLLLYCGENEHGRGDFMSLAIIRRSLQFRFNCGTGVAIIVSETKIKLGGWHTVMLYRDGLNGLLQLNNGTPVTGQSQGQYSKITFRTPLYLGGAPSAYWLVRATGTNRGFQGCVQSLAVNGRRIDMRPWPLGKALSGADVGECSSGICDEASCIHGGTCTAIKADSYICLCPLGFKGRHCEDAFTLTIPQFRESLRSYAATPWPLEPQHYLSFMEFEITFRPDSGDGVLLYSYDTGSKDFLSINLAGGHVEFRFDCGSGTGVLRSEDPLTLGNWHELRVSRTAKNGILQVDKQKIVEGMAEGGFTQIKCNTDIFIGGVPNYDDVKKNSGVLKPFSGSIQKIILNDRTIHVKHDFTSGVNVENAAHPCVRAPCAHGGSCRPRKEGYDCDCPLGFEGLHCQKECGNYCLNTIIEAIEIPQFIGRSYLTYDNPDILKRVSGSRSNVFMRFKTTAKDGLLLWRGDSPMRPNSDFISLGLRDGALVFSYNLGSGVASIMVNGSFNDGRWHRVKAVRDGQSGKITVDDYGARTGKSPGMMRQLNINGALYVGGMKEIALHTNRQYMRGLVGCISHFTLSTDYHISLVEDAVDGKNINTCGAK

SEQ ID NO: 82122 - protein, 112 aa, Artificial Sequence
  derived and/or modified sequence
MRFKTTAKDGLLLWRGDSPMRPNSDFISLGLRDGALVFSYNLGSGVASIMVNGSFNDGRWHRVKAVRDGQSGKITVDDYGARTGKSPGMMRQLNINGALYVGGMKEIALHTN

SEQ ID NO: 82123 - DNA, 1299 bp, Artificial Sequence
  derived and/or modified sequence
gacgttctggactctcgggcagagctttgtgagagaaacaaggctggcttcaagtgatctgcaaccagagtaattgggatttgacaaggactgtgaaaggctgactctccctgttctctttcatgctggcaccgggcagagtgtgggaactactgcctcaatacgatcatagaagccattgagatcccgcagtttatcggccgcagttacctgacgtatgacaacccagatatcttgaagagggtgtcaggatcaagatcaaatgtgttcatgaggtttaaaacaactgccaaggatggccttttgctgtggaggggagacagccccatgagacccaacagcgacttcatttccttgggccttcgggatggagccctcgtgttcagctataacctgggcagtggtgtggcatccatcatggtgaatggctccttcaacgatggtcggtggcaccgagttaaggccgttagggatggccagtcaggaaagataaccgtggatgactatggagccagaacaggcaaatccccaggcatgatgcggcagcttaacatcaatggagctctgtatgtgggtggaatgaaggaaattgctctgcacactaacaggcaatatatgagagggctcgtgggctgtatctctcacttcaccctgtccaccgattaccacatttccctcgtggaagatgccgtggatgggaaaaacatcaacacttgtggagccaagtaacaccagctggccttgtccaagggacagagccttctattctgagaatcccaggggccctcagaccctgcctgatgctatatgcagaggcccagggaccaggtgtgtttcctctcaccaagaagaaagtacacactgatgagaaactgagaaccaagacaggcatccctgggtggcctttcctgctgacactccacgagctgacccagcagaattctctgtgtaggaagcatcggactttgtccattgaatatgtagcggctgccagagatcacacatcaatgcaaattccagagcctgtctgctatagctcagtgactgtgttgtgattcatagtacattaaaaagagagagagagagaaagaatcccacagggcactattaaaatacttctctccttccctgactcatgacactcttcctgacagcagaatgactgtgtgaccttgaacttcacatttcccacattggcccttggattgttcggattaaccccttccactcctcactggctggttcactgtgttctgactagtccataaaaataaagatggaaggagatcaaacacagaa

SEQ ID NO: 82124 - DNA, 3054 bp, Artificial Sequence
  derived and/or modified sequence
atggacctgattagaggggttcttcttaggctgttgttactcgcaagcagcttaggccctggcgctgtcagtcttagagctgctattcgcaagccaggcaaagttgggccacccctggatatcaagctgggcgcacttaactgcaccgccttttctatccagtggaaaatgccccgtcaccccggtagtccaatcctcggatacacagtgttttatagcgaagtgggcgctgacaaaagtctgcaggaacagctgcactccgtccccttaagccgggacatccctaccacggaggaagttattggagacctgaagcccggaaccgagtaccgtgtatccatcgccgcatatagtcaagcagggaaaggacgcctctcttccccccgacacgtaacaacccttagtcaggatagctgtttgcctccggcagccccacagcagccccacgtgatagtagtgagtgattccgaggtggcattgtcctggaaacctggagccagcgaggggtctgcccctattcagtattatagtgtggagtttatcaggcccgattttgataagaaatggacttccattcatgagaggattcaaatggatagcatggtcatcaagggcctggatcctgacacaaattaccagttcgccgttcgcgctatgaattctcacgggccttcccccaggagctggcccagtgatatcattcgtacactctgtcctgaagaggccggaagcggtaggtacggtccaagatacatcactgacatgggcgcaggcgaggacgacgaagggtttgaggacgacctggacctggacatatcctttgaggaggtgaagcctctaccggcaaccaagggcggaaacaagaagttcttggtggagtctaagaagatgtccatctccaatccgaagaccatctcccgcttaatccctccaacatcggccagcttgcccgtaaccacagtggccccacagccaattccaatccagagaaagggtaagaatggggtggctatcatgagcaggctatttgacatgccctgcgatgagaccctttgcagcgccgacagtttctgcgtgaacgactacacttggggcggttcccgctgccagtgtactctggggaaaggaggggagagctgtagtgaggacattgtcatacagtatccccagtttttcggacatagttacgttacttttgaaccactgaagaactcttaccaggcgtttcagattacacttgagtttcgggcagaggctgaggatgggctcttactgtattgtggtgaaaacgagcatggccgaggggactttatgagcctcgctattatacggcgtagcctgcagttccggtttaattgtgggacgggcgtggctatcatagtatccgagactaaaataaagctagggggatggcacacagtcatgctctatagggacgggctgaatgggctacttcagctgaataacgggactccggtcaccggacaatcccagggccagtattcaaagatcacattcaggacgccactgtacctaggtggcgctccatcagcatactggctggtgagagctactgggactaacagaggttttcaaggctgcgtgcagtccctggccgtgaatggccgacgcatagacatgaggccttggcccctgggcaaggcgctgtcaggggcagacgttggcgagtgttctagcggaatatgcgacgaggcttcatgcattcatggaggtacttgtacggctattaaagcggattcttacatttgcctgtgtccattaggatttaagggtaggcattgcgaagacgcctttaccctcacgatccctcaattccgggagtccctccgatcttacgcagctaccccatggcctcttgaaccacagcactatctttcatttatggagtttgagatcaccttccggcctgattcgggagatggagtgcttctctattcttacgatactgggagcaaagatttcctctccatcaatcttgccggagggcacgtggagtttcgcttcgattgcgggtccggcacaggcgtgctcagaagtgaggaccccttgactctcggcaactggcacgagctgcgggtgtctcggaccgctaaaaatggcatcctgcaggtggataagcaaaagatcgtagaagggatggctgaaggaggtttcacgcagataaaatgcaacactgatatctttattgggggtgtcccgaactatgatgatgttaagaaaaactctggagttctgaaacctttttctgggagtatccagaaaattattttgaatgaccggaccattcatgtcaaacacgatttcacctccggcgtgaacgtggaaaacgccgcacatccctgtgtgagggcgccttgcgcacacgggggatcttgccggccaagaaaggagggttatgactgtgactgtccactcggctttgagggattacactgccagaaagagtgcggcaattactgcctgaataccatcattgaggcaatagaaattcctcaatttatcggtcgctcttacctcacatatgacaaccctgatatactcaagcgagttagtggctcccgttcaaatgttttcatgcggtttaaaaccacagctaaggacggcctgctactttggagaggtgattcccctatgcgccctaactccgacttcatttcgttgggcttgagagatggcgcactcgtgttctcttataacctcggctcaggagttgcctcaattatggtgaacggctcctttaacgacggcaggtggcacagggtcaaggcagtgcgcgatggacaatcaggcaaaattaccgtagacgactatggagccaggactggaaaaagccctggtatgatgcggcagctgaatatcaacggcgctctgtatgtgggtgggatgaaagaaattgccctccacactaacaggcaatacatgcggggtcttgtcgggtgtatctcccacttcactcttagcacagattaccatataagcctggttgaagacgccgtggacgggaagaacattaacacttgtggggctaaatag

SEQ ID NO: 82125 - DNA, 3054 bp, Artificial Sequence
  derived and/or modified sequence
atggatctgatccgcggggtgctgctaaggctgctgctcctagctagcagcttgggtcccggtgctgtttctctgagggccgcaataaggaagcctggtaaggttggcccacccctggatatcaaactcggagctttgaactgcaccgcattttcaatccagtggaagatgccaagacaccctggatccccgatcctgggttacacagtgttttacagcgaggttggagccgacaagagcctacaggaacagctgcactcagtgccactgtcaagggatatcccaacaaccgaggaagtaataggagatttgaaaccgggcaccgagtatcgggtgagcattgctgcctattcccaggctggaaaggggaggctgtcttctccacgacatgttacgaccctttcccaggatagttgtttacctccagctgcgccccaacagccccatgtcattgtcgtctccgattctgaggtcgccctgagttggaagccaggggcctcagagggtagtgcccctatccagtattatagcgtggaattcattcgaccggatttcgataagaagtggaccagcatacatgagagaattcaaatggactctatggtaattaagggcttagatcccgataccaattatcagtttgccgtcagggcaatgaactcacatggcccatcgccgcgctcatggccaagcgacattattcgtacactttgccccgaggaagccggatcggggaggtatggacctagatacatcacagatatgggggccggagaggacgacgagggatttgaagatgatctggatctcgatatttctttcgaggaggttaagcctttgccagccacgaagggtggcaacaaaaaatttctggtagaatctaagaagatgagtatttcaaacccaaaaaccatctcacgtttgattccaccgacatctgcctctctccccgtgaccacagtggcaccgcagccgatccccatccagcgtaagggaaagaatggagtcgcaatcatgagccgcctctttgacatgccttgcgacgaaaccctgtgttcagccgacagcttctgtgttaatgattatacatggggtggctccagatgccagtgcacacttggaaaaggcggtgaaagctgctcagaagatatcgtgatacagtatccccagttcttcggccactcttatgtaacatttgaaccccttaagaattcctaccaggctttccagatcacactggaattccgcgcggaagctgaggatgggctgctattgtactgcggcgaaaatgaacacggtcggggagactttatgagtctcgctatcatccggagatcactgcagtttagatttaattgtgggaccggagtcgctatcatcgtgtcagaaacaaagatcaagttgggtggatggcacaccgtgatgctctacagagatggactgaacggacttctgcaattaaacaacggaacccccgtgaccggacaaagccagggccaatattccaagattacctttcgcaccccactgtatttgggcggggctccgagcgcctattggctagttcgggcgaccggtacgaaccgtggatttcaaggttgtgtccagagcctcgccgtgaacggaaggcggattgacatgcgaccctggccccttggaaaagctttgtccggggcagacgtaggcgagtgctcgtcaggaatctgcgacgaggccagttgtattcacggaggaacgtgcacggctattaaagccgactcttatatttgtttgtgcccgctgggattcaaaggccgccactgcgaggacgccttcacactaacgattccccaatttcgggagtcgctgaggtcatacgcggctaccccctggccgttggagccccagcactacctcagctttatggagtttgagatcacctttagacccgattcaggagatggtgtgttgctctattcttatgatactggatcaaaagactttctttcgataaatctcgccgggggacacgtggagtttcgttttgactgcggatcaggaacaggcgtacttaggtcagaggacccgttgacactcggaaactggcacgaattgagggtgagtagaacagcaaagaacggaatcctgcaagtggataagcaaaagatcgtggagggcatggctgaaggcgggtttactcaaatcaaatgcaataccgatatatttattggcggagtacctaactatgatgacgttaaaaaaaactctggtgtgttgaagcctttttccggctcgatacagaaaattatactgaacgataggaccatacacgtgaaacacgacttcacgagcggcgtcaacgtggagaatgccgcacacccctgcgtgcgcgccccctgcgctcacggcggctcttgccgccccaggaaagagggatatgactgcgactgtccactaggatttgaagggcttcattgccaaaaagaatgcggaaattactgtctgaacactatcatcgaggccattgaaatccctcagttcatcggccggtcttatcttacttacgacaaccccgatattttgaagagggtgtccgggtcaaggtccaatgtcttcatgcggtttaaaacaacagcaaaagatggcctactgttgtggcgtggagacagccctatgagaccaaattccgattttattagccttggcttgagggatggagctctggtcttctcttataatttggggagcggtgtcgccagtattatggttaatggttccttcaatgatgggcgctggcacagggttaaagctgtaagagatggacaaagcggaaagattacagtggacgactatggggcaagaactggcaagtcgcctggaatgatgcggcaattgaatatcaatggtgccctctacgtgggaggcatgaaggaaatcgctttacacactaatcgccagtatatgcggggtctggtgggatgcatcagccattttaccctgtcaacggattatcacatcagtttagtagaggatgccgtcgatggaaagaacatcaatacttgcggcgccaagtag

SEQ ID NO: 82126 - DNA, 3054 bp, Artificial Sequence
  derived and/or modified sequence
atggatctgatccgtggggtcttgctcaggcttctcctgctcgccagttcacttgggcctggggccgtctcactccgtgccgcaatcaggaaacccggcaaagttggaccacctttggacattaaattgggcgctctcaactgtactgcttttagcattcagtggaaaatgccacgccatccagggtcccccatcctgggctacactgtgttttattctgaagtcggtgccgataaaagtttacaggaacagctgcattccgtgcctttatctcgggatatcccaaccactgaggaagtgatcggcgatttgaagcctggaaccgaataccgagtgtcgatcgcagcttacagtcaggctggcaagggcagactttcctctccacgacacgtaaccacactgagtcaggatagttgccttccccctgccgctccccagcagcctcatgtaatcgtggtgtctgattccgaagttgccctcagctggaagcctggagcatccgaggggtctgccccaatccaatactacagtgttgaattcattcgaccagactttgataagaaatggacaagcattcacgagaggattcaaatggacagtatggtcattaaagggcttgatcccgatactaactaccagtttgccgttagagcgatgaacagccacggaccttctcctcgcagttggccatcagacattatccgtacgttatgccccgaagaggccggctctggtcgatacggcccaagatacattacagatatgggtgctggtgaggatgatgagggctttgaggacgatcttgacttggacattagctttgaggaagtaaagcctttgcctgctaccaaaggaggcaacaaaaaatttctcgtggaatcgaagaagatgtcaatcagcaacccaaaaaccatctcacgtttgattccaccgacatctgcctctctccccgtgaccacagtggcaccgcagccgatccccatccagcgtaagggaaagaatggagtcgcaatcatgagccgcctctttgacatgccttgcgacgaaaccctgtgttcagccgacagcttctgtgttaatgattatacatggggtggctccagatgccagtgcacacttggaaaaggcggtgaaagctgctcagaagatatcgtgatacagtatccccagttcttcggccactcttatgtaacatttgaaccactgaagaactcttaccaggcctttcaaatcactcttgaatttagagcagaagccgaagacggcctcctgttgtactgtggcgaaaacgagcacgggcgcggagatttcatgtcactggccattattagaagaagccttcagtttaggtttaactgcggtactggagtcgctataattgtgtctgagactaagattaagctgggagggtggcacaccgtgatgctttacagagatggactgaacggattattacagctaaacaatggtactcctgtgactggccagagtcaggggcagtacagcaagattacctttcgaacacccttgtatctgggaggggcaccttcggcatattggttggtaagggcaaccggaacaaatcgtggatttcaaggatgtgtgcaatccctagcagtgaacggaagacgtatcgatatgcggccttggcccttgggaaaggcgctgagcggcgctgacgtaggagaatgttctagtggcatctgcgatgaggcgtcgtgcatacacggggggacttgtaccgctatcaaagctgactcttatatatgcctgtgtcctctgggattcaaaggacgtcattgtgaagacgcatttaccctaaccatacctcagttcagggagagccttagatcctacgcagccactccatggcctctggagccacagcattatctgtccttcatggagttcgaaattacatttaggccggacagcggggacggcgttctcttatattcctacgacaccgggtccaaagactttctttcaattaacttagcgggaggtcacgtggagtttcgattcgattgtggcagtggtaccggcgtattacgctcagaggatccccttacactgggcaactggcacgagttacgagtctcacgcacagcaaagaacggaattctgcaggtggataaacagaaaattgtggaaggaatggcagaaggcggttttactcaaatcaagtgtaatacagacattttcattggcggtgtcccgaattacgacgacgtgaagaagaactcaggtgttttaaaaccattttccggctctatacagaaaattatcctaaatgatcggactatccatgtaaaacatgatttcacatccggagtgaacgtggaaaacgcggcccacccctgcgtgcgcgctccctgtgcccatggcggaagctgccgccctaggaaggagggttatgactgcgactgtccactaggattcgaaggcctgcactgtcaaaaggaatgcggcaactactgtcttaacacaataatcgaggctatcgagattccccaattcattgggcgctcatatttgacctacgacaaccctgacatacttaagcgcgtgagtgggtcacgctcaaatgtatttatgagattcaagacaactgcaaaagacgggcttctgttgtggcggggagattcccccatgcgtcctaattcagacttcattagccttggtttgcgcgacggagccctggtgtttagttacaatctcggcagcggagtggcaagtataatggtcaatggcagctttaacgacgggaggtggcatagagtgaaggctgtgcgcgatgggcaatcagggaagattacggtggacgattatggggctcggaccggcaaatccccaggaatgatgcgacaactcaacattaacggtgcattatacgtcggagggatgaaagaaattgctctgcacacaaacagacagtacatgcgcggcctggtcggttgcatctcccatttcacgctatcaacagattaccacatttcacttgttgaagatgcggttgatgggaaaaatataaacacatgtggagctaaatag

SEQ ID NO: 82127 - DNA, 552 bp, Artificial Sequence
  derived and/or modified sequence
atctgcaaccagagtaattgggatttgacaaggactgtgaaaggctgactctccctgttctctttcatgctggcaccgggcagagtgtgggaactactgcctcaatagtaagtacaaagccattgagatcccgcagtttatcggccgcagttacctgacgtatgacaacccagatatcttgaagagggtgtcaggatcaagatcaaatgtgttcatgaggtttaaaacaactgccaaggatggccttttgctgtggaggggagacagccccatgagacccaacagcgacttcatttccttgggccttcgggatggagccctcgtgttcagctataacctgggcagtggtgtggcatccatcatggtgaatggctccttcaacgatggtcggtggcaccgagttaaggccgttagggatggccagtcaggaaagataaccgtggatgactatggagccagaacaggcaaatccccaggcatgatgcggcagcttaacatcaatggagctctgtatgtgggtggaatgaaggaaattgctctgcacactaacag

SEQ ID NO: 82128 - DNA, 3054 bp, Artificial Sequence
  derived and/or modified sequence
atggacctgatcagaggcgtgctgctgagactgctgctgctggccagcagcctgggccccggcgccgtgagcctgagagccgccatcagaaagcccggcaaggtgggcccccccctggacatcaagctgggcgccctgaactgcaccgccttcagcatccagtggaagatgcccagacaccccggcagccccatcctgggctacaccgtgttctacagcgaggtgggcgccgacaagagcctgcaggagcagctgcacagcgtgcccctgagcagagacatccccaccaccgaggaggtgatcggcgacctgaagcccggcaccgagtacagagtgagcatcgccgcctacagccaggccggcaagggcagactgagcagccccagacacgtgaccaccctgagccaggacagctgcctgccccccgccgccccccagcagccccacgtgatcgtggtgagcgacagcgaggtggccctgagctggaagcccggcgccagcgagggcagcgcccccatccagtactacagcgtggagttcatcagacccgacttcgacaagaagtggaccagcatccacgagagaatccagatggacagcatggtgatcaagggcctggaccccgacaccaactaccagttcgccgtgagagccatgaacagccacggccccagccccagaagctggcccagcgacatcatcagaaccctgtgccccgaggaggccggcagcggcagatacggccccagatacatcaccgacatgggcgccggcgaggacgacgagggcttcgaggacgacctggacctggacatcagcttcgaggaggtgaagcccctgcccgccaccaagggcggcaacaagaagttcctggtggagagcaagaagatgagcatcagcaaccccaagaccatcagcagactgatcccccccaccagcgccagcctgcccgtgaccaccgtggccccccagcccatccccatccagagaaagggcaagaacggcgtggccatcatgagcagactgttcgacatgccctgcgacgagaccctgtgcagcgccgacagcttctgcgtgaacgactacacctggggcggcagcagatgccagtgcaccctgggcaagggcggcgagagctgcagcgaggacatcgtgatccagtacccccagttcttcggccacagctacgtgaccttcgagcccctgaagaacagctaccaggccttccagatcaccctggagttcagagccgaggccgaggacggcctgctgctgtactgcggcgagaacgagcacggcagaggcgacttcatgagcctggccatcatcagaagaagcctgcagttcagattcaactgcggcaccggcgtggccatcatcgtgagcgagaccaagatcaagctgggcggctggcacaccgtgatgctgtacagagacggcctgaacggcctgctgcagctgaacaacggcacccccgtgaccggccagagccagggccagtacagcaagatcaccttcagaacccccctgtacctgggcggcgcccccagcgcctactggctggtgagagccaccggcaccaacagaggcttccagggctgcgtgcagagcctggccgtgaacggcagaagaatcgacatgagaccctggcccctgggcaaggccctgagcggcgccgacgtgggcgagtgcagcagcggcatctgcgacgaggccagctgcatccacggcggcacctgcaccgccatcaaggccgacagctacatctgcctgtgccccctgggcttcaagggcagacactgcgaggacgccttcaccctgaccatcccccagttcagagagagcctgagaagctacgccgccaccccctggcccctggagccccagcactacctgagcttcatggagttcgagatcaccttcagacccgacagcggcgacggcgtgctgctgtacagctacgacaccggcagcaaggacttcctgagcatcaacctggccggcggccacgtggagttcagattcgactgcggcagcggcaccggcgtgctgagaagcgaggaccccctgaccctgggcaactggcacgagctgagagtgagcagaaccgccaagaacggcatcctgcaggtggacaagcagaagatcgtggagggcatggccgagggcggcttcacccagatcaagtgcaacaccgacatcttcatcggcggcgtgcccaactacgacgacgtgaagaagaacagcggcgtgctgaagcccttcagcggcagcatccagaagatcatcctgaacgacagaaccatccacgtgaagcacgacttcaccagcggcgtgaacgtggagaacgccgcccacccctgcgtgagagccccctgcgcccacggcggcagctgcagacccagaaaggagggctacgactgcgactgccccctgggcttcgagggcctgcactgccagaaggagtgcggcaactactgcctgaacaccatcatcgaggccatcgagatcccccagttcatcggcagaagctacctgacctacgacaaccccgacatcctgaagagagtgagcggcagcagaagcaacgtgttcatgagattcaagaccaccgccaaggacggcctgctgctgtggagaggcgacagccccatgagacccaacagcgacttcatcagcctgggcctgagagacggcgccctggtgttcagctacaacctgggcagcggcgtggccagcatcatggtgaacggcagcttcaacgacggcagatggcacagagtgaaggccgtgagagacggccagagcggcaagatcaccgtggacgactacggcgccagaaccggcaagagccccggcatgatgagacagctgaacatcaacggcgccctgtacgtgggcggcatgaaggagatcgccctgcacaccaacagacagtacatgagaggcctggtgggctgcatcagccacttcaccctgagcaccgactaccacatcagcctggtggaggacgccgtggacggcaagaacatcaacacctgcggcgccaagtag

SEQ ID NO: 82129 - DNA, 3054 bp, Artificial Sequence
  derived and/or modified sequence
atggatcttattagaggcgtgctattacgcctgctgctcctagcctcctcgctggggcctggggctgtcagcttgagggctgctatccgcaaaccaggcaaagtcggcccgccgctcgacatcaagttaggagcattgaactgtacagctttcagcatacagtggaaaatgcctcgacatccaggaagtcccatactgggttacacagtattctattcggaagtaggggctgacaagtcccttcaggagcagctacactccgtccccctgtctcgcgacatccccacgacagaggaagtgataggcgacctgaaacccgggacagaatacagggtcagtatcgcagcatattcacaggctggtaaaggacgcctcagcagccctaggcacgttaccacattgagccaggactcttgtttgccaccagccgccccccaacagccgcatgtgattgtcgtcagcgatagcgaggtcgcactatcctggaaacctggtgcctctgagggctctgcacctatccaatactacagcgtagagttcatacgaccagacttcgacaaaaagtggacatccattcacgagaggattcagatggattccatggtgatcaagggtctggacccggacacaaattaccagttcgcagtcagggctatgaacagtcacggaccttctccccgttcctggccttctgatataatcaggacgctttgcccagaggaggccggttccggccgctacggccctcgatatattactgacatgggtgcaggagaggatgatgaaggtttcgaggatgacttggacctggatatttcctttgaggaggtgaagccactgccagcaactaaaggtgggaacaagaaatttctcgtagagtctaagaaaatgtccatctcgaatcctaagacgattagccgcttgatcccccccacatctgcatccctcccagtcactactgtggcacctcaaccaatccctattcagaggaagggcaagaacggcgttgccataatgtctaggctctttgatatgccttgtgatgagacgttgtgcagtgccgacagtttttgcgtgaatgattatacctggggaggatcaaggtgccagtgtactctgggtaagggcggagaatcgtgctctgaagatatagttattcagtatcctcagttttttggtcactcttacgttactttcgagcccttgaaaaactcttatcaagcctttcagatcacccttgagttcagggcagaggctgaagatgggctgttgctgtattgtggtgagaatgaacatggccggggagacttcatgagtcttgccatcataaggcggagtctgcagtttcgctttaattgtgggacaggggtcgcgattatagtctctgaaacaaaaatcaagctggggggctggcacactgtgatgctctaccgcgatggcctcaacggcctacttcagttgaataacggtactcctgtcacaggtcaatcccaaggtcaatatagcaagattactttcagaacccccctgtatctcggcggcgcccccagcgcctactggcttgtgcgagctactggaacaaaccgtgggtttcagggttgcgttcaatcattagcagtcaatgggcgtaggattgatatgcggccttggcccttagggaaagccctcagcggagccgacgtcggcgagtgtagctccggcatctgcgacgaagcatcctgcattcacgggggcacttgcaccgctatcaaggcggatagctatatttgcctctgtccccttggatttaagggccgtcactgtgaggacgcctttacactcacgatcccacagtttagggaatctctgcgttcatatgctgccacgccttggccattagagcctcagcactatctaagcttcatggagtttgaaattacctttaggccagatagtggggacggcgtgttgctctactcctatgacactggaagcaaggattttctctctatcaatctggccggcggtcacgtagagttcaggttcgactgtggttctggtactggggtgctgcggagcgaggacccattgaccctcgggaactggcacgaactgcgcgtgagcaggacagcaaagaacggtatccttcaggtagataagcagaaaattgttgaagggatggcagaaggtgggtttacccagattaagtgcaatactgatattttcataggcggggttcctaactacgatgatgtcaaaaagaattccggtgtgctgaagcccttcagcggcagtattcagaagatcattctgaacgataggactattcacgttaagcacgatttcacttccggagtgaacgtggagaacgctgcccacccatgcgtgagggccccgtgcgctcacggcggctcatgccgaccgcgaaaagagggctacgactgtgactgtcctttggggtttgaaggactgcactgtcagaaagagtgcggcaactattgcctgaacacaattattgaggccattgagatcccccagttcattgggcgtagctatctgacatatgacaatcccgacatccttaagcgcgtctccggaagtcgcagcaatgtgtttatgcggtttaagacaactgctaaggacggccttctgctctggagaggggactctcctatgcgcccaaattcagattttatcagtttggggctgcgtgatggcgcactagtgtttagctataatttgggctcgggggttgccagcatcatggtcaatggaagctttaatgatgggcgctggcaccgggtcaaagctgtgcgagacgggcagagtgggaaaatcacagttgacgactatggggccagaactgggaaatccccaggcatgatgcgccagttaaacatcaacggcgcactctatgtgggtggaatgaaggaaatcgcactgcacacgaatagacagtatatgagggggcttgtggggtgtatcagtcacttcaccctgtcaaccgactaccacattagcttggtggaggacgcagtggacggcaagaacataaatacttgtggtgctaaatag

SEQ ID NO: 82130 - DNA, 3963 bp, Artificial Sequence
  derived and/or modified sequence
agggcctgtccctctcacttccactcgattgtaatttcatccccgggccggtcgagcctccctccctcccgcggccagcccttccctcccagtcggcctccttcgtcgcccccgcccccgcgaaaagccctgcagcttgcagccggcttcactcgcgcacgccgacctcccggctgcagtcctacctcttggaactacccgtgtttccgggcccagccctcgcagccccccacctcctcgccccggcccggggatccgttggggccgcgtcccccacgcgcccccggagacgccctttccgtgtgcgcccgggacttggtgaaactttgcaggcgccggctgcgaaatggatttaatccgaggcgtcttgctccggctcctgctcctggcttccagcctcggacccggcgcggtgtcgctccgagcggccatccgaaaaccaggcaaggtagggcctcctcttgacatcaagctgggcgcattgaactgtacggctttcagcatccagtggaaaatgccaaggcatcctggaagtcccatccttgggtacactgtcttttactctgaggttggcgcagataaatccctgcaggagcagttgcacagcgtgcctctcagccgggacatcccgaccacggaggaagtgattggagatttgaaaccaggcactgaatatcgtgtgagcatagcagcttacagccaggctggcaaagggcggctgagctctcctcggcatgtcaccactttgtcccaagattcctgcctgcctcctgcagctccccagcagccacatgtcattgtggtttcggattctgaggtggccctgtcttggaaacctggagcgagtgaaggaagcgcccctattcagtactattctgtggaattcatcaggccagatttcgacaagaagtggacctcaatccatgagcggatccagatggactccatggttatcaagggcctcgatccagataccaactaccagtttgccgtgagggcaatgaattcccatggccccagcccccgcagctggcccagtgacatcatccggaccctctgccctgaggaggcgggaagtggccgctatggaccccgttatatcaccgacatgggagctggtgaggatgatgaaggatttgaagacgacttagatttggatatttcctttgaggaggttaaaccacttcctgctaccaaaggagggaataagaaatttttggtggaaagcaagaagatgtctatatctaacccaaagaccatttctaggctcatcccccctacctcagcatctctccctgtgaccacggtggctccccagcccattcccatacagagaaaggggaagaatggtgtggccataatgtcaaggctctttgacatgccttgtgatgaaactctctgctctgctgacagcttctgtgtcaatgactacacctgggggggctcgcgatgccagtgcaccctgggcaaaggtggtgagagctgctcagaagatattgttatccagtatcctcagttctttggccactcctatgtaacgtttgaacctctgaagaattcttatcaggcatttcaaattactcttgaatttagggcggaggcagaggatggcttactgctctactgtggggagaacgaacacgggaggggggatttcatgtccctggctatcatccgacgctccctgcagttcaggtttaattgtggaactggggttgccatcatcgtaagtgagaccaaaatcaaactagggggttggcacacggttatgctctacagagatgggctgaacgggctgctgcagctgaacaatggcaccccagtgacaggccagtctcagggccaatacagtaaaattactttccggacacctctctatcttggtggcgctcccagcgcttactggttggttagagcaacagggacaaaccgaggctttcaaggctgtgtgcagtcgctcgctgtgaatgggaggagaattgacatgaggccctggcccctgggaaaagcactcagtggggctgatgtgggggaatgcagcagtggaatctgtgatgaggcctcgtgcatccatggtggcacctgcacagcaatcaaagccgactcctacatttgcctctgtccccttgggtttaaaggtcgacactgtgaagatgctttcaccttgaccattcctcagttcagagagtctctgagatcttacgctgcaactccctggccactggagccccagcattacctttccttcatggaatttgagatcacatttcggccagactcaggagatggtgtcctcctgtacagctatgacacaggcagcaaagacttcctgtccatcaacttggcagggggccacgtggagttccgctttgactgtggctctgggaccggtgtcctcaggagtgaagatcccctcaccctgggcaactggcacgagcttcgtgtatctcgcacagcaaagaatggaatcttacaggtggataagcagaagatagtggagggaatggcagagggaggcttcacacagattaagtgcaacacagacattttcattggcggagtccccaattatgatgatgtgaagaagaactcgggtgtcctgaagcctttcagcgggagcatccagaagatcatcctgaatgaccgaaccatccatgtgaagcatgacttcacctccggagtgaatgtggagaatgcggcccacccctgtgtgagagccccttgtgcccatgggggcagctgccggcccaggaaggagggctatgactgtgactgccccttgggctttgaggggcttcactgccagaaagagtgtgggaactactgcctcaatacgatcatagaagccattgagatcccgcagtttatcggccgcagttacctgacgtatgacaacccagatatcttgaagagggtgtcaggatcaagatcaaatgtgttcatgaggtttaaaacaactgccaaggatggccttttgctgtggaggggagacagccccatgagacccaacagcgacttcatttccttgggccttcgggatggagccctcgtgttcagctataacctgggcagtggtgtggcatccatcatggtgaatggctccttcaacgatggtcggtggcaccgagttaaggccgttagggatggccagtcaggaaagataaccgtggatgactatggagccagaacaggcaaatccccaggcatgatgcggcagcttaacatcaatggagctctgtatgtgggtggaatgaaggaaattgctctgcacactaacaggcaatatatgagagggctcgtgggctgtatctctcacttcaccctgtccaccgattaccacatttccctcgtggaagatgccgtggatgggaaaaacatcaacacttgtggagccaagtaacaccagctggccttgtccaagggacagagccttctattctgagaatcccaggggccctcagaccctgcctgatgctatatgcagaggcccagggaccaggtgtgtttcctctcaccaagaagaaagtacacactgatgagaaactgagaaccaagacaggcatccctgggtggcctttcctgctgacactccacgagctgacccagcagaattctctgtgtaggaagcatcggactttgtccattgaatatgtagcggctgccagagatcacacatcaatgcaaattccagagcctgtctgctatagctcagtgactgtgttgtgattcatagtacattaaaaagagagagagagagaaagaatcccacagggcactattaaaatacttctctccttccctgactcatgacactcttcctgacagcagaatgactgtgtgaccttgaacttcacatttcccacattggcccttggattgttcggattaaccccttccactcctcactggctggttcactgtgttctgactagtccataaaaataaagatggaaggagatcaaa

SEQ ID NO: 82131 - DNA, 3054 bp, Artificial Sequence
  derived and/or modified sequence
atggacctgatccggggcgtgctgctgcggctgctgctgctggccagcagcctgggccctggagctgtgtccctgcgggccgccatcaggaagccaggcaaggtgggcccccccctggacatcaagctgggcgccctgaactgcacagccttcagcatccagtggaagatgcccaggcaccctggcagccccatcctgggctacacagtgttctacagcgaggtgggcgctgacaagagcctgcaggagcagctgcacagcgtgcccctgagccgggacatccccaccacagaggaggtgattggagacctgaagccaggcacagagtacagagtgtccattgctgcctacagccaggccggcaagggccgcctgagcagccccaggcatgtgaccaccctgagccaggacagctgcctgcccccagctgccccccagcagccccacgtgattgtggtgtctgacagcgaggtggccctgtcctggaagccaggggccagcgagggcagcgcccccatccagtactacagcgtggagttcatccggccagactttgacaagaagtggaccagcatccacgagcgcatccagatggacagcatggtgatcaagggcctggaccctgacaccaactaccagtttgctgtgcgggccatgaacagccacggccccagccccaggtcctggcccagcgacatcatccgcaccctgtgcccagaggaggccggcagcggccgctatggcccccgctacatcacagacatgggcgctggagaagatgatgagggctttgaagatgacctggacctggacatcagctttgaggaggtgaagcccctgcctgccaccaagggcggcaacaagaagttcctggtggagagcaagaagatgagcatcagcaaccccaagaccatcagccgcctcatcccccccaccagcgccagcctgcctgtgaccaccgtggccccccagcccatccccatccagaggaagggcaagaatggagtggccatcatgagccggctgtttgacatgccctgtgatgagaccctgtgcagcgctgacagcttctgtgtgaatgactacacctggggcggcagccgctgccagtgcaccctgggcaaaggaggagagagctgcagcgaggacatcgtcatccagtacccccagttcttcggccacagctatgtgacctttgagcccctgaagaacagctaccaggccttccagatcaccctggagttccgggcagaggccgaggatggcctgctgctgtactgtggagaaaatgagcacggccgcggggacttcatgagcctggccatcatccgccgcagcctgcagttccgcttcaactgtggcactggagtggccatcatcgtgtctgagaccaagatcaagctgggcggctggcacacagtgatgctgtacagagatggcctgaatggcctgctgcagctgaacaacggcacccctgtgacaggccagagccagggccagtacagcaagatcaccttccgcacccccctgtacctgggcggggcccccagcgcctactggctggtgcgggccaccggcaccaacagaggcttccagggctgtgtgcagagcctggccgtgaatggaagaagaattgacatgaggccctggcccctgggcaaggccctgtctggagcagatgtgggagaatgtagcagcggcatctgtgatgaggccagctgcatccacggcggcacctgcacagccatcaaggctgacagctacatctgcctgtgccccctgggcttcaagggccgccactgtgaagatgccttcaccctgaccatcccccagttccgggagagcctgcggagctatgctgccaccccctggcccctggagccccagcactacctgtccttcatggagtttgagatcaccttccggccagattctggagatggagtgctgctgtacagctatgacaccggcagcaaggacttcctgagcatcaacctggccggcggccacgtggagttccgctttgactgtggcagcggcactggagtgctgcggtctgaggaccccctgaccctgggcaactggcatgagctgcgggtgtccaggacagccaagaatggcatcctgcaggtggacaagcagaagatcgtggagggcatggccgagggcggcttcacccagatcaagtgcaacacagacatcttcatcggcggcgtgcccaactatgatgatgtgaagaagaacagcggcgtgctgaagcccttcagcggcagcatccagaagatcatcctgaatgacaggaccatccacgtgaagcatgacttcaccagcggcgtgaatgtggagaatgctgcccacccctgtgtgcgggccccctgtgcccatggaggcagctgccggcccaggaaggagggctatgactgtgactgccccctgggctttgagggcctgcactgccagaaggaatgtggcaactactgcctgaacaccatcatcgaggccatcgagatcccccagttcatcggccgcagctacctgacctatgacaacccagacatcctgaagagggtgtctggcagccgcagcaatgtgttcatgaggttcaagaccacagccaaggatggcctgctgctgtggaggggggacagccccatgaggcccaacagcgacttcatcagcctgggcctgagagatggagccctggtgttctcctacaacctgggcagcggcgtggccagcatcatggtgaatggcagcttcaatgatggccgctggcaccgggtgaaggctgtgagagatggccagagcggcaagatcaccgtggatgattatggagccaggacaggcaagagccctggcatgatgaggcagctgaacatcaatggagccctgtatgtgggcggcatgaaggagatcgccctgcacaccaaccggcagtacatgaggggcctggtgggctgcatcagccacttcaccctgagcacagactaccacatcagcctggtggaggatgctgtggatggcaagaacatcaacacctgtggggccaagtag

SEQ ID NO: 82132 - DNA, 3054 bp, Artificial Sequence
  derived and/or modified sequence
atggacctgatccggggcgtgctgctgcggctgctgctgctggcctcatcgctgggaccgggtgcggtttctctgcgagctgccatcagaaagccaggcaaagtgggccccccactcgacatcaagttgggggctctaaactgtaccgccttttcaatccagtggaagatgcccagacacccaggatcccctatactcggctataccgtcttttattctgaggttggcgctgataagtccctgcaagaacagctgcactccgtgcccctgagcagggacattcctaccacagaagaggtgattggcgacttgaaaccaggaacagagtaccgtgttagcatcgccgcatattctcaggcaggtaaaggacgcctctcttccccacgccacgtaaccaccttgtcacaagacagttgcttgcctcctgctgcacctcagcagccccacgttattgtggtgtccgacagtgaggtggccctcagttggaagccgggggcctctgagggctccgcaccaatacagtactatagtgtcgagtttatcagacctgatttcgataagaagtggacaagtattcatgagcggatccagatggactcaatggtgattaaggggctggaccccgacacgaactaccagtttgccgtgcgtgcgatgaattcacatggacctagccccaggagttggccctccgacatcatccggacattgtgccctgaggaggcgggcagcgggcgttacggcccccggtatatcacagatatgggcgccggcgaggatgatgaagggttcgaagacgacctcgacctggacatatcttttgaggaggttaagcctctgcctgccacaaaaggtggcaataagaagttcttggttgagagcaaaaagatgtctatttcgaatcctaaaacaatttcacgcttaatccctccaacgagtgccagcctgcccgtgaccaccgtcgcgcctcagcccatccctatccagagaaaaggcaagaatggggtggccataatgtcccgcctgtttgatatgccctgtgatgaaaccctgtgttccgccgattctttttgcgttaacgattacacatggggaggatcccgatgtcagtgtactttgggaaaagggggggaaagctgtagcgaggatattgtgatccagtaccctcagttcttcgggcacagctacgtcactttcgagcctttaaaaaattcctatcaggcttttcagatcactttggaatttcgggcagaggccgaagatggcctgctcctgtattgtggcgaaaatgagcatggtaggggggacttcatgtctctggcgatcatacgccggtctttgcagttcaggttcaattgcggcaccggagttgctattattgtcagcgagactaagattaagctgggtgggtggcacactgttatgctctatcgggacggtctgaatggactgctccaactgaataatggaacacccgtgacggggcagtcccaggggcaatatagtaagatcactttccggacccccctttatctgggaggtgccccaagcgcctattggttagtgcgggcgacagggaccaatcgcggattccagggttgtgtgcagtcactggctgtcaatgggaggcgaatagatatgagaccttggcctctgggcaaggcactgtccggagctgacgtcggcgaatgctcgtctgggatctgcgacgaagccagttgcattcacggggggacttgtacagcaatcaaagccgacagctatatttgtttatgtcccctcggcttcaagggccggcattgtgaggatgcattcaccctaaccattcctcagttccgcgagtctcttagaagctacgcagcgactccctggccccttgaaccgcagcattacttgtccttcatggaatttgaaattaccttccgacccgactccggcgacggcgttctgctgtactcctatgacaccgggagcaaggattttctttctatcaacttggcgggcggccatgtggagtttcgattcgattgcggttccggaacaggcgttttacgctcagaggaccctctcacactaggcaactggcacgaactgcgtgtcagcaggaccgcaaagaatggcattttacaagtggataagcagaaaatagtggaagggatggctgaagggggcttcacccaaataaagtgtaatactgacatctttatcgggggtgtccctaactacgatgatgtaaagaagaattctggcgttctgaagccgttttctggcagtattcagaaaatcatactcaatgatcgcactatccacgtcaagcatgactttaccagcggagttaacgtggagaacgcggctcacccatgcgtgcgcgctccgtgcgcccatggggggtcctgtcggccccggaaggagggctatgactgcgactgccccctggggtttgaggggctccattgtcaaaaggagtgtggtaactactgtctcaacaccattattgaagccattgagatccctcaatttattgggcgaagctatctcacctatgacaaccctgatattctgaagcgtgtttccggctcacggagcaacgtcttcatgaggtttaaaacaaccgccaaagacggactgctgttatggcgtggagattctcctatgagacccaactctgatttcattagtttgggactgcgagacggagcacttgtttttagctacaacctcggctccggagtagcttctataatggtgaatgggtctttcaatgacggcagatggcaccgagtaaaagcagtcagggatggccagtctgggaagattaccgtagatgactacggggccaggaccggaaaatccccagggatgatgcgacagctgaacatcaatggcgcgctctacgtcgggggcatgaaagagattgccttgcacaccaaccggcagtacatgcgaggactggtaggatgtattagccacttcacactgagcaccgattatcatatcagtcttgtagaagatgccgtagacgggaaaaacattaatacttgcggggcaaagtag

SEQ ID NO: 82133 - RNA, 3054 nt, Artificial Sequence
  derived and/or modified sequence
auggaucugauccgcggggugcugcuaaggcugcugcuccuagcuagcagcuugggucccggugcuguuucucugagggccgcaauaaggaagccugguaagguuggcccaccccuggauaucaaacucggagcuuugaacugcaccgcauuuucaauccaguggaagaugccaagacacccuggauccccgauccuggguuacacaguguuuuacagcgagguuggagccgacaagagccuacaggaacagcugcacucagugccacugucaagggauaucccaacaaccgaggaaguaauaggagauuugaaaccgggcaccgaguaucgggugagcauugcugccuauucccaggcuggaaaggggaggcugucuucuccacgacauguuacgacccuuucccaggauaguuguuuaccuccagcugcgccccaacagccccaugucauugucgucuccgauucugaggucgcccugaguuggaagccaggggccucagaggguagugccccuauccaguauuauagcguggaauucauucgaccggauuucgauaagaaguggaccagcauacaugagagaauucaaauggacucuaugguaauuaagggcuuagaucccgauaccaauuaucaguuugccgucagggcaaugaacucacauggcccaucgccgcgcucauggccaagcgacauuauucguacacuuugccccgaggaagccggaucggggagguauggaccuagauacaucacagauaugggggccggagaggacgacgagggauuugaagaugaucuggaucucgauauuucuuucgaggagguuaagccuuugccagccacgaaggguggcaacaaaaaauuucugguagaaucuaagaagaugaguauuucaaacccaaaaaccaucucacguuugauuccaccgacaucugccucucuccccgugaccacaguggcaccgcagccgauccccauccagcguaagggaaagaauggagucgcaaucaugagccgccucuuugacaugccuugcgacgaaacccuguguucagccgacagcuucuguguuaaugauuauacaugggguggcuccagaugccagugcacacuuggaaaaggcggugaaagcugcucagaagauaucgugauacaguauccccaguucuucggccacucuuauguaacauuugaaccccuuaagaauuccuaccaggcuuuccagaucacacuggaauuccgcgcggaagcugaggaugggcugcuauuguacugcggcgaaaaugaacacggucggggagacuuuaugagucucgcuaucauccggagaucacugcaguuuagauuuaauugugggaccggagucgcuaucaucgugucagaaacaaagaucaaguuggguggauggcacaccgugaugcucuacagagauggacugaacggacuucugcaauuaaacaacggaacccccgugaccggacaaagccagggccaauauuccaagauuaccuuucgcaccccacuguauuugggcggggcuccgagcgccuauuggcuaguucgggcgaccgguacgaaccguggauuucaagguuguguccagagccucgccgugaacggaaggcggauugacaugcgacccuggccccuuggaaaagcuuuguccggggcagacguaggcgagugcucgucaggaaucugcgacgaggccaguuguauucacggaggaacgugcacggcuauuaaagccgacucuuauauuuguuugugcccgcugggauucaaaggccgccacugcgaggacgccuucacacuaacgauuccccaauuucgggagucgcugaggucauacgcggcuacccccuggccguuggagccccagcacuaccucagcuuuauggaguuugagaucaccuuuagacccgauucaggagaugguguguugcucuauucuuaugauacuggaucaaaagacuuucuuucgauaaaucucgccgggggacacguggaguuucguuuugacugcggaucaggaacaggcguacuuaggucagaggacccguugacacucggaaacuggcacgaauugagggugaguagaacagcaaagaacggaauccugcaaguggauaagcaaaagaucguggagggcauggcugaaggcggguuuacucaaaucaaaugcaauaccgauauauuuauuggcggaguaccuaacuaugaugacguuaaaaaaaacucugguguguugaagccuuuuuccggcucgauacagaaaauuauacugaacgauaggaccauacacgugaaacacgacuucacgagcggcgucaacguggagaaugccgcacaccccugcgugcgcgcccccugcgcucacggcggcucuugccgccccaggaaagagggauaugacugcgacuguccacuaggauuugaagggcuucauugccaaaaagaaugcggaaauuacugucugaacacuaucaucgaggccauugaaaucccucaguucaucggccggucuuaucuuacuuacgacaaccccgauauuuugaagaggguguccgggucaagguccaaugucuucaugcgguuuaaaacaacagcaaaagauggccuacuguuguggcguggagacagcccuaugagaccaaauuccgauuuuauuagccuuggcuugagggauggagcucuggucuucucuuauaauuuggggagcggugucgccaguauuaugguuaaugguuccuucaaugaugggcgcuggcacaggguuaaagcuguaagagauggacaaagcggaaagauuacaguggacgacuauggggcaagaacuggcaagucgccuggaaugaugcggcaauugaauaucaauggugcccucuacgugggaggcaugaaggaaaucgcuuuacacacuaaucgccaguauaugcggggucuggugggaugcaucagccauuuuacccugucaacggauuaucacaucaguuuaguagaggaugccgucgauggaaagaacaucaauacuugcggcgccaaguag

SEQ ID NO: 82134 - RNA, 3054 nt, Artificial Sequence
  derived and/or modified sequence
auggaucugauccguggggucuugcucaggcuucuccugcucgccaguucacuugggccuggggccgucucacuccgugccgcaaucaggaaacccggcaaaguuggaccaccuuuggacauuaaauugggcgcucucaacuguacugcuuuuagcauucaguggaaaaugccacgccauccagggucccccauccugggcuacacuguguuuuauucugaagucggugccgauaaaaguuuacaggaacagcugcauuccgugccuuuaucucgggauaucccaaccacugaggaagugaucggcgauuugaagccuggaaccgaauaccgagugucgaucgcagcuuacagucaggcuggcaagggcagacuuuccucuccacgacacguaaccacacugagucaggauaguugccuucccccugccgcuccccagcagccucauguaaucguggugucugauuccgaaguugcccucagcuggaagccuggagcauccgaggggucugccccaauccaauacuacaguguugaauucauucgaccagacuuugauaagaaauggacaagcauucacgagaggauucaaauggacaguauggucauuaaagggcuugaucccgauacuaacuaccaguuugccguuagagcgaugaacagccacggaccuucuccucgcaguuggccaucagacauuauccguacguuaugccccgaagaggccggcucuggucgauacggcccaagauacauuacagauaugggugcuggugaggaugaugagggcuuugaggacgaucuugacuuggacauuagcuuugaggaaguaaagccuuugccugcuaccaaaggaggcaacaaaaaauuucucguggaaucgaagaagaugucaaucagcaacccaaaaaccaucucacguuugauuccaccgacaucugccucucuccccgugaccacaguggcaccgcagccgauccccauccagcguaagggaaagaauggagucgcaaucaugagccgccucuuugacaugccuugcgacgaaacccuguguucagccgacagcuucuguguuaaugauuauacaugggguggcuccagaugccagugcacacuuggaaaaggcggugaaagcugcucagaagauaucgugauacaguauccccaguucuucggccacucuuauguaacauuugaaccacugaagaacucuuaccaggccuuucaaaucacucuugaauuuagagcagaagccgaagacggccuccuguuguacuguggcgaaaacgagcacgggcgcggagauuucaugucacuggccauuauuagaagaagccuucaguuuagguuuaacugcgguacuggagucgcuauaauugugucugagacuaagauuaagcugggaggguggcacaccgugaugcuuuacagagauggacugaacggauuauuacagcuaaacaaugguacuccugugacuggccagagucaggggcaguacagcaagauuaccuuucgaacacccuuguaucugggaggggcaccuucggcauauugguugguaagggcaaccggaacaaaucguggauuucaaggaugugugcaaucccuagcagugaacggaagacguaucgauaugcggccuuggcccuugggaaaggcgcugagcggcgcugacguaggagaauguucuaguggcaucugcgaugaggcgucgugcauacacggggggacuuguaccgcuaucaaagcugacucuuauauaugccuguguccucugggauucaaaggacgucauugugaagacgcauuuacccuaaccauaccucaguucagggagagccuuagauccuacgcagccacuccauggccucuggagccacagcauuaucuguccuucauggaguucgaaauuacauuuaggccggacagcggggacggcguucucuuauauuccuacgacaccggguccaaagacuuucuuucaauuaacuuagcgggaggucacguggaguuucgauucgauuguggcagugguaccggcguauuacgcucagaggauccccuuacacugggcaacuggcacgaguuacgagucucacgcacagcaaagaacggaauucugcagguggauaaacagaaaauuguggaaggaauggcagaaggcgguuuuacucaaaucaaguguaauacagacauuuucauuggcggugucccgaauuacgacgacgugaagaagaacucagguguuuuaaaaccauuuuccggcucuauacagaaaauuauccuaaaugaucggacuauccauguaaaacaugauuucacauccggagugaacguggaaaacgcggcccaccccugcgugcgcgcucccugugcccauggcggaagcugccgcccuaggaaggaggguuaugacugcgacuguccacuaggauucgaaggccugcacugucaaaaggaaugcggcaacuacugucuuaacacaauaaucgaggcuaucgagauuccccaauucauugggcgcucauauuugaccuacgacaacccugacauacuuaagcgcgugagugggucacgcucaaauguauuuaugagauucaagacaacugcaaaagacgggcuucuguuguggcggggagauucccccaugcguccuaauucagacuucauuagccuugguuugcgcgacggagcccugguguuuaguuacaaucucggcagcggaguggcaaguauaauggucaauggcagcuuuaacgacgggagguggcauagagugaaggcugugcgcgaugggcaaucagggaagauuacgguggacgauuauggggcucggaccggcaaauccccaggaaugaugcgacaacucaacauuaacggugcauuauacgucggagggaugaaagaaauugcucugcacacaaacagacaguacaugcgcggccuggucgguugcaucucccauuucacgcuaucaacagauuaccacauuucacuuguugaagaugcgguugaugggaaaaauauaaacacauguggagcuaaauag

SEQ ID NO: 82135 - protein, 283 aa, Artificial Sequence
  derived and/or modified sequence
MEKTCIDALPLTMNSSEKQETVCIFGTGDFGRSLGLKMLQCGYSVVFGSRNPQKTTLLPSGAEVLSYSEAAKKSGIIIIAIHREHYDFLTELTEVLNGKILVDISNNLKINQYPESNAEYLAHLVPGAHVVKAFNTISAWALQSGALDASRQAILKKENPFSTSSAWLSDSYVALGILGFFLFVLLGITSLPSVSNAVNWREFRFVQSKLGYLTLILCTAHTLVYGGKRFLSPSNLRWYLPAAYVLGLIIPCTVLVIKFVLIMPCVDNTLTRIRQGWERNSKH

SEQ ID NO: 82136 - DNA, 852 bp, Artificial Sequence
  derived and/or modified sequence
atggagaagacctgcatcgacgccctgcccctgaccatgaacagcagcgagaagcaggagaccgtgtgcatcttcggcaccggcgacttcggcagaagcctgggcctgaagatgctgcagtgcggctacagcgtggtgttcggcagcagaaacccccagaagaccaccctgctgcccagcggcgccgaggtgctgagctacagcgaggccgccaagaagagcggcatcatcatcatcgccatccacagagagcactacgacttcctgaccgagctgaccgaggtgctgaacggcaagatcctggtggacatcagcaacaacctgaagatcaaccagtaccccgagagcaacgccgagtacctggcccacctggtgcccggcgcccacgtggtgaaggccttcaacaccatcagcgcctgggccctgcagagcggcgccctggacgccagcagacaggccatcctgaagaaggagaaccccttcagcaccagcagcgcctggctgagcgacagctacgtggccctgggcatcctgggcttcttcctgttcgtgctgctgggcatcaccagcctgcccagcgtgagcaacgccgtgaactggagagagttcagattcgtgcagagcaagctgggctacctgaccctgatcctgtgcaccgcccacaccctggtgtacggcggcaagagattcctgagccccagcaacctgagatggtacctgcccgccgcctacgtgctgggcctgatcatcccctgcaccgtgctggtgatcaagttcgtgctgatcatgccctgcgtggacaacaccctgaccagaatcagacagggctgggagagaaacagcaagcactag

SEQ ID NO: 82137 - DNA, 852 bp, Artificial Sequence
  derived and/or modified sequence
atggagaagacatgcattgatgccctgcccctgacaatgaattcttccgagaaacaggaaaccgtgtgcatctttggcaccggcgatttcggtaggagcctgggccttaagatgcttcaatgcggctactcagtcgtgttcggatctcggaacccacagaagaccacgttgcttcccagtggagccgaagtgttgtcatacagtgaggccgcgaagaagtcaggaatcatcatcattgctatccaccgtgagcattacgactttctgactgaactgaccgaggtcctgaacggaaaaatcctcgtggacatatccaataatctgaagataaaccagtaccccgagtcaaatgcagaatatttggcccatttggtcccaggagcacatgttgtgaaggcttttaacaccatctccgcctgggctcttcaaagtggtgccctggatgcctctcgccaagcaatcctgaagaaagaaaacccattctctacatcttcagcttggctcagtgactcttacgttgccttagggattctaggtttctttctctttgtcctgttggggataacatcacttccaagcgtctctaatgccgtgaattggcgggaattccgttttgtacagtctaaattgggctatctcacgctcattctttgcacagcccataccctggtgtacgggggcaaaaggttcctgagcccgtctaacctgaggtggtacctccccgcagcttacgtgctgggcttgattatcccttgtactgtgctggtcattaagtttgttctcataatgccctgtgtggataacactctgaccagaattaggcagggttgggaacgcaattccaagcactag

SEQ ID NO: 82138 - DNA, 852 bp, Artificial Sequence
  derived and/or modified sequence
atggagaagacctgcattgatgccctgcccctgaccatgaacagcagcgagaagcaggagaccgtgtgcatctttggaactggagactttggccgcagcctgggcctgaagatgctgcagtgtggctacagcgtggtgtttggcagcaggaacccccagaagaccaccctgctgcccagcggggctgaggtgctgagctacagcgaggccgccaagaagagcggcatcatcatcatcgccatccaccgggagcactatgacttcctgacagagctgacagaggtgctgaatggcaagatcctggtggacatcagcaacaacctgaagatcaaccagtacccagagagcaatgctgagtacctggcccacctggtgcctggggcccacgtggtgaaggccttcaacaccatcagcgcctgggccctgcagagcggggccctggatgccagccggcaggccatcctgaagaaggagaaccccttcagcaccagcagcgcctggctgagtgacagctatgtggccctgggcatcctgggcttcttcctgtttgtgctgctgggcatcaccagcctgcccagcgtgtccaatgctgtgaactggagggagttccgctttgtgcagagcaagctgggctacctgaccctcatcctgtgcacagcccacaccctggtgtatggaggcaagcgcttcctgagccccagcaacctgcgctggtacctgcctgctgcctacgtgctgggcctcatcatcccctgcaccgtgctggtgatcaagtttgtgctgatcatgccctgtgtggacaacaccctgacccgcatccggcagggctgggagaggaacagcaagcactag

SEQ ID NO: 82139 - DNA, 852 bp, Artificial Sequence
  derived and/or modified sequence
atggagaagacctgcatcgacgccctgcccctgaccatgaacagctccgaaaagcaagaaacggtatgcatttttgggacaggcgacttcggacggagtctggggctgaagatgctccaatgtggctattccgtcgtgtttggcagccgcaacccacagaagacaacacttttgccttccggcgccgaggtgctgtcatattctgaggcagccaagaaatcgggaatcatcatcattgctatccatcgagaacactatgacttcctgactgaactcacagaggtgcttaatggaaaaatcttggtggatatcagtaacaacctaaaaatcaaccaataccccgagagtaacgcggaatacctcgcccaccttgtgcctggggcgcacgttgtgaaagcctttaacacgattagtgcctgggccctacagtccggagctctggatgcaagccgccaggcaatattgaagaaggagaaccctttcagcacttcctcagcatggctgagcgactcttatgtggcacttggcattcttggtttttttttgtttgtgttattaggcatcaccagcctccctagtgtgtccaatgctgtgaattggcgggagttcagattcgtacagtctaaactaggctacctcactctgatactgtgcacagcacatactctggtttacggcggcaaacggttcctgagtccctccaatctgcgatggtaccttccggctgcttatgtcctggggttaatcatcccctgcacagtactggtcatcaagtttgtcctcatcatgccatgtgtcgataacacacttacccggatcagacagggctgggaacgaaatagtaagcattag

SEQ ID NO: 82140 - DNA, 852 bp, Artificial Sequence
  derived and/or modified sequence
atggaaaagacctgcatagacgctctcccactcactatgaatagctccgagaaacaggagacggtctgcatctttggtactggagacttcggccgttccctcggtctgaaaatgctgcaatgcggctattctgtggtctttgggtcaaggaacccacagaaaacgacactgcttccatctggcgctgaagtcctgtcctactctgaggctgcaaaaaagtcaggaattatcatcattgccattcaccgtgagcactatgacttcttgaccgaactgactgaagtgctgaacggcaagatacttgtggatattagcaataacctaaaaatcaaccagtatccagagagcaacgcggagtacctagcccacttggtgccgggagcccatgtggttaaggctttcaacactattagcgcatgggcacttcaatccggagccttggacgcttcacgccaagcaatcctgaagaaagagaacccattctcaacctcatcagcctggctgagcgacagttatgtggccctggggattctcggattttttctgtttgtgttgctgggaatcacttcgcttccaagtgttagtaacgcagttaactggagggagtttagatttgtgcagtccaagctcggctacctgactctcatactctgtactgctcacactctagtctatgggggaaaacggtttctctccccttcgaacttaagatggtatctgcccgctgcatatgtcctgggcctcattataccctgcacagttctcgtgattaaattcgttcttattatgccttgtgtcgacaacacactgacccgtatcaggcagggatgggagaggaattctaaacattag

SEQ ID NO: 82141 - DNA, 2321 bp, Artificial Sequence
  derived and/or modified sequence
gagctgcaggcgcggcgaaacttccctctacccgcccggcccgcggcgcgcaccgttggcgctggacgcttcctccttggaagcgcctctccctcagttatggagaaaacttgtatagatgcacttcctcttactatgaattcttcagaaaagcaagagactgtatgtatttttggaactggtgattttggaagatcactgggattgaaaatgctccagtgtggttattctgttgtttttggaagtcgaaacccccagaagaccaccctactgcccagtggtgcagaagtcttgagctattcagaagcagccaagaagtctggcatcataatcatagcaatccacagagagcattatgattttctcacagaattaactgaggttctcaatggaaaaatattggtagacatcagcaacaacctcaaaatcaatcaatatccagaatctaatgcagagtaccttgctcatttggtgccaggagcccacgtggtaaaagcatttaacaccatctcagcctgggctctccagtcaggagcactggatgcaagtcggcaggcaatactcaagaaggagaatccatttagcacctcctcagcctggctcagtgattcatatgtggctttgggaatacttgggttttttctgtttgtactcttgggaatcacttctttgccatctgttagcaatgcagtcaactggagagagttccgatttgtccagtccaaactgggttatttgaccctgatcttgtgtacagcccacaccctggtgtacggtgggaagagattcctcagcccttcaaatctcagatggtatcttcctgcagcctacgtgttagggcttatcattccttgcactgtgctggtgatcaagtttgtcctaatcatgccatgtgtagacaacacccttacaaggatccgccagggctgggaaaggaactcaaaacactagaaaaagcattgaatggaaaatcaatatttaaaacaaagttcaatttagctggatttctgaactatggttttgaatgtttaaagaagaatgatgggtacagttaggaaagtttttttcttacaccgtgactgagggaaacattgcttgtctttgagaaattgactgacatactggaagagaacaccattttatctcaggttagtgaagaatcagtgcaggtccctgactcttattttcccagaggccatggagctgagattgagactagccttgtggtttcacactaaagagtttccttgttatgggcaacatgcatgacctaatgtcttgcaaaatccaatagaagtattgcagcttccttctctggctcaagggctgagttaagtgaaaggaaaaacagcacaatggtgaccactgataaaggctttattaggtatatctgaggaagtgggtcacatgaaatgtaaaaagggaatgaggtttttgttgttttttggaagtaaaggcaaacataaatattaccatgatgaattctagtgaaatgaccccttgactttgcttttcttaatacagatatttactgagaggaactatttttataacacaagaaaaatttacaattgattaaaagtatccatgtcttggatacatacgtatctatagagctggcatgtaattcttcctctataaagaataggtataggaaagactgaataaaaatggagggatatccccttggatttcacttgcattgtgcaataagcaaagaagggttgataaaagttcttgatcaaaaagttcaaagaaaccagaattttagacagcaagctaaataaatattgtaaaattgcactatattaggttaagtattatttaggtattataatatgctttgtaaattttatattccaaatattgctcaatatttttcatctattaaattaatttctagtgtaaataagtagcttctatatctgtcttagtctattataattgtaaggagtaaaattaaatgaatagtctgcaggtataaatttgaacaatgcatagatgatcgaaaattacggaaaatcatagggcagagaggtgtgaagattcatcattatgtgaaatttggatctttctcaaatccttgctgaaatttaggatggttctcactgtttttctgtgctgatagtaccctttccaaggtgaccttcagggggattaaccttcctagctcaagcaatgagctaaaaggagccttatgcatgatcttcccacatatcaaaataactaaaaggcactgagtttggcatttttctgcctgctctgctaagacctttttttttttttactttcattataacatattatacatgacattatac

SEQ ID NO: 82142 - protein, 270 aa, Artificial Sequence
  derived and/or modified sequence
MERSQSRLSLSASFEALAIYFPCMNSFDDEDAEGDSRRLKGAIQRSTETGLAVEMPSRTLRQASHESIEDSMNSYGSEGNLNYGGVCLASDAQFSDFLGSMGPAQFVGRQTLATTPMGDVEIGLQERNGQLEVDIIQARGLTAKPGSKTLPAAYIKAYLLENGICIAKKKTKVARKSLDPLYNQVLLFPESPQGKVLQVIVWGNYGRMERKQFMGVARVLLEELDLTTLAVGWYKLFPTSSMVDPATGPLLRQASQLSLESTVGPCGERS

SEQ ID NO: 82143 - DNA, 813 bp, Artificial Sequence
  derived and/or modified sequence
atggaaagaagccagtctcggcttagcctctctgcctcttttgaagcactcgcaatttactttccttgtatgaattcattcgacgacgaggacgctgaaggagattcacggagactgaagggcgcaattcagcgatcaaccgagactggactcgccgtggagatgccttcacgcacgctccggcaagcctcacacgaatctatcgaagatagcatgaattcatacgggagcgaggggaacctgaattatggcggagtctgcttagcaagcgatgcccaattcagtgacttcctgggatccatgggccctgcacaatttgtcggaaggcagacgttggctaccacacccatgggggacgtggaaatcggccttcaagaaagaaacggccagctcgaggtggatatcatccaggccaggggtcttactgcaaaacctgggtccaaaacccttccggccgcctatataaaggcctaccttttggagaatggaatttgtatcgccaagaagaagactaaggttgcacgtaagagcctagatcccctttataaccaggtcctgctgttcccagagagcccgcaaggtaaggtcctgcaggtcatagtctggggaaattacggtcggatggagcggaagcagttcatgggggttgctcgggtgctgctcgaagaactcgatttgacaaccctggctgttgggtggtataaactcttccccactagctcaatggtcgaccctgccaccggccccctgcttagacaggcttcgcagctttcccttgagtccactgtggggccttgcggcgagagaagttag

SEQ ID NO: 82144 - DNA, 813 bp, Artificial Sequence
  derived and/or modified sequence
atggagaggagccagagccggctgagcctgagcgccagctttgaggccctggccatctacttcccctgcatgaacagctttgatgatgaagatgctgagggggacagccggcggctgaagggggccatccagaggagcacagaaacaggcctggccgtggagatgcccagcaggaccctgcggcaggccagccatgagagcattgaagattccatgaacagctatggcagcgagggcaacctgaactatggaggagtgtgcctggccagtgatgcccagttcagtgacttcctgggctccatgggccctgcccagtttgtgggccggcagaccctggccaccacccccatgggagatgtggagatcggcctgcaggagagaaatggccagctggaggtggacatcatccaggcccggggcctgacagccaagccaggcagcaagaccctgcctgctgcctacatcaaggcctacctgctggagaatggcatctgcatcgccaagaagaagaccaaggtggccaggaagagcctggaccccctgtacaaccaggtgctgctcttccctgagagcccccagggcaaggtgctgcaggtgattgtgtggggcaactacggccgcatggagaggaagcagttcatgggcgtggcccgggtgctgctggaggagctggacctgaccaccctggccgtgggctggtacaagctgttccccaccagctccatggtggaccctgccaccggccccctgctgcggcaggccagccagctgagcctggagagcacagtgggcccctgtggggagaggagctag

SEQ ID NO: 82145 - DNA, 813 bp, Artificial Sequence
  derived and/or modified sequence
atggagcggagccagagccggctgagcctgagcgccagcttcgaggcgcttgccatttactttccatgcatgaacagctttgacgatgaagatgccgaaggcgattcgaggcggttaaaaggagccattcaacgtagcactgagacgggactcgccgttgaaatgccgagccggacactgaggcaggcctctcacgagtcaatagaggattccatgaattcttacggctcagaaggaaatctaaattacgggggagtctgcctcgcaagcgatgcacaattcagcgacttcctgggttccatgggtccagcacagtttgtcggacgtcagaccctggctactactccgatgggggacgttgagatcggccttcaagagcgtaacgggcaattggaggtcgacatcatccaggcccgcgggctcactgctaagcctggctccaagactctgcctgctgcatatattaaagcgtatctgctggaaaatgggatatgcattgccaaaaaaaaaaccaaggtagcccgcaagagcttggatcccctgtataaccaagtattgctattccccgagtccccacaaggcaaggtgctccaagtgattgtgtggggcaactacggacgtatggagagaaagcaatttatgggcgtggctagggtgctgctggaagagctggatcttaccaccttggccgttggttggtacaaactcttccctaccagtagcatggtggatcctgcgaccggcccactgttgagacaagcaagccagcttagtcttgaatccactgtcggaccttgcggagaaaggtcatag

SEQ ID NO: 82146 - DNA, 813 bp, Artificial Sequence
  derived and/or modified sequence
atggaacggtcccagtcaaggttgtctctatcagcttccttcgaagcactcgccatctatttcccgtgtatgaacagcttcgacgatgaggacgccgagggggattcccgacgcttgaagggggcaattcaacggagcaccgaaacaggcttggcagtggagatgccttctaggacactgaggcaagccagtcacgagtccatcgaggactcaatgaattcgtacggaagcgaaggcaacctcaattatggaggtgtgtgcttagcctccgacgcacagttctctgattttttggggtcaatgggaccagcccagtttgtgggtagacagaccctggcaactactcccatgggagatgtggagatcggcctgcaagagcgaaacgggcagctggaagtggacatcattcaggccaggggtctcactgccaaaccaggttcaaaaactctgccagccgcttatatcaaggcttacttgctggagaatggcatttgtatcgctaaaaagaagacaaaagtggctaggaagtcactggaccctctctacaaccaagttcttctatttcctgaatctcctcagggcaaagttcttcaagtcatcgtttggggtaattatgggagaatggagcgcaaacagttcatgggggtggccagggtcctactggaggaacttgaccttacaacattggcagtgggatggtacaaactgttcccaacatcttcgatggtggatcctgccaccggccctctgttgaggcaggcctcgcagttgtccttagaaagcactgtgggcccttgcggagagcggtcatag

SEQ ID NO: 82147 - DNA, 5137 bp, Artificial Sequence
  derived and/or modified sequence
atggagcgctcgcagagccgcctcagtctgtccgcctccttcgaggcgctcgccatctacttcccgtgcatgaactccttcgacgacgaggacgcagaaggggacagccggaggctgaagggggccatccagaggagcacggagacgggcctggcagtggagatgcccagccggacactgcgccaggccagccacgagtccattgaggacagcatgaacagctatggctcagagggcaaccttaactatggaggagtttgcctggcgtcggacgcccagttcagtgacttcctgggaagcatggggccggcacagtttgtgggccgccagaccctggccaccacacccatgggggatgtggagatcggtctgcaggagcggaacggtcagttggaggtggacattatccaggctcggggactgacagccaagccaggctccaagacactgccagcggcctacatcaaggcctacctgctagagaatggcatctgcattgccaagaagaagaccaaagtcgctcgcaagtcgctggacccactgtataaccaggtgctgctgtttcctgagagtccccagggcaaagtcctccaggtgatcgtgtgggggaactacgggcggatggagcggaagcagttcatgggtgtggctcgcgtgctgctggaggagctggacttgaccaccctggccgtgggctggtacaagctcttccccacctcctccatggtggacccagccacaggccccctgctccggcaggcatcccagttgtccctcgagagcaccgtggggccctgcggagaacgatcttagtgctggaatggggaggggctccccaagatggcctggagaccacccagccctgacctgggaccccaggcccaggggcacattgaacaggaggacggggctctcccccacagtggggaagcagaacggggagacctgcccccccttgggcccctcctcaccccttctttgcctcctacccccgagacctcccctctcccaacgggattggctacacttttgacttggccggttcttgacctggtggatgtggctgcagtccagagaaaggaaagattgaggtggcagagcagaccactctcccttcccaaactgtccaacttctccccctttttgcctcctcggaagctcgctgcccagagccatgtccagaacccagccggccatctccatggtgccaattaccagcaagtgtctttcctgcggcaccgggttcaggcagctactcctgccccagagatgaaggggcagctttgcaaggatccggagccagctcccaggggcccagagccccccacttgaagaggagcttgagcttccctctgcctgcccgtggaaggagctttgccgcagcctgtccgagtccatccgtccgtcccctcctgcctgcccctcttctggtggctctaggaattggggttcagcagggaccaaaggaaaggaggaggtgccgggggcctggcacagacccctaggtgcctcgctccatgggattgcaacaagctagtttaggaaccgctggcggactagaaagaatgttgtcgtctgtgttccggtggaggagctgtggaacctgagtttccagaaccccaaccctagagagcatttgggggtgctgtattggagggggaggctaaggaaagttgggattgggactggtggtgccaagataagggtttctcaaattggagaacccctccttgttgcatgaggtcaatggtcatcctgtctacccaccctgcctccaggccagggggctggggaggcaaatagagcccccctattttagtctttttaaaaaaaacatcctatactaagggcagaacccactgccccggcctcaattaccttggctgaaggaaagatggcggtaggagagaaaagtgaagaggcgtgagtgtaagaactgggagattccttttccagcaggcctgggtagctgccttcccagcccagccctccctggggcctgcgggagcccttttgcatgcaagggaggatggaggctggcccctctttatagaagcacatttctgccacctcccctgggaggcacccagaagcctgccactctttacctagtccctgctgtgtagggcgtagtccaggttagctaggtagagttagtgctccaagccctggggcctgttcttagctcatgcatagtccttacagagtcccaggaccgggggtggagaggagcctcaagtacattccaggagaccactgtctcctcgctggcctgggcctagatggggcagcctggctcacaggaggccagcccctcctcctccgcccccttccttcccttgtccccgtagggttatagctggagctgcctgttatactcggctgttctgatttattattcttggtactgactttctttatgagggactcctaagggttgtaggaccttggcagagggggcctggtctccattagagggtgttgttttctcctgaggacacccaggctgcctttggtcccaccctgttcctggtcccggtcccggtcccagtcccaccaggcaactccttccacccggaaattcttcccttcccttagcctgtggaaaccctgggtattctttaaagttctggtcaatgtatatcacctccacagagctgcttaccctgcactgggaaggggagatggagacgccccctttacccaggaggtcttcagagtttcctgggaccgcggtgggtggaatcccaaggctgggggtggaaggagcagggctctggagggattcgcattcaaggcacagaattggccccttgcctgtttgtttttctaaccagtgtgatttctctgctgttcgtttattacttaccattggaatattttgagccaggagagcgccttctctctccagccatcaccgctgtggttgttcaggggtagcttttcaaaaacagggcagagcctggctgtcccaaccagggggagcaggggcttggccctgacagcctgagcccttcccctggtgtctgcacagcctttataaagagagagagagctccgaagcaataacaacacctgggggtggtcagtgagggccccctcaatgattttcttgtttgttctgtgaaatcccgctcacctcctggaggggtggagcagctgggggctggagccctgtttctttgtgtcatcgtgagcatgtgccccttcccaggggctgtgaccattgggtgtgggaactacggtctgtcctcaccaagggatgggggtttggggaggagagtgacattttcatcattagcttcggagaagcttcaagcccatcctgtccccgctactgcctggccccttgctgactcaggctgcactgtttgaagaggagcagagaggctggcactaggggccactggggggctggggtctccaggggatgactgttttcaatctctgggccaagatcacatgcaggataccatgggaaggagccatctccactctccttctccagaacccccttgaagggcctttgggaccattagtccatttccattttacagacaaggaaatcaagacccagcttgggggaaaagccacccctggagtcacctgtgtgttcagtggcacccccagcctgggtcccctcctcccaatagaggctgagccggagccagggcagtatgaggtggggctgccactgcccatacctcctcctcccttctttctttgaagcctaatggccccccaaaagatgggcaggacaagctgtagcccatctgagaggttgggaaactgaggcccagaaacaggaagtgactcacacaagacccctcagcaagggtgcaaagggggaagaactaggggctccattgttcttcaggcgacaggagaccgttgctccagtgcatgtctgctgggacaaggattcctggcctcgaagccctgggctgcacagccctactgggctccacctctataaaccagtgacttctctgggcctgggtctgggggagagggttgccagggagactcagctctccttgggggctggcccagctgactgagggtacacaggattgggtctagaccttgatgcctgggtggagggcccttgtaaggggccatagcctcttcaggaccaactggagggagagttaggaaacaccagctcctgcctggggcagtgagggaatgggagcagctgtgggcgcctcatttcaggcaagtcctccccaaaccttcagatgcagtgagacctggccttcctgttgtgcttttcagactttgttttcagaatgcttttatctcgagtgtgcccttcggccctcacaagagcccctggggagtaggtggtggcctgtgccgtcatccccatttcaaagcagggagctgaggtcctgggaggggaaagtgcttgcctgaggtcccactgtgttagtgggtgggcaggactggaactcggttctccaacagcccagagctcactcttttacacccagaggtggagcaggtggcttagggggtggttatgtacttcacaagccaattcccttcagccaggagctcctgggtgcatttccgtgtcagaaacagtaccgagtcccaccccctctggaggcacagctgttgcgtcaggcaaggtcacctgcatttatttattgagcagcagtgctgtgtcaggcccagggaccgagcccctctccctgttcccctatggtgtctccgaggccctctgggagggccccacatctggagcagcacctcagagtggacagaaagcattagcgtccacgagctcacccgacgccgagcctgtgaggtgggctgatggtgcccgtctaacccagcgcttcagggaggtcagaatggagccgaacccagggctgtgagcatcacctctggagccctttcactttatgactgcttcctggacgggtggtgggaaggcaggagcctgggtccttaggctgggggcctctctccatccacccacctttccctcattccctctcttggagcagcagccgcccaggcctttagggagggagggtttctggggcccttgggttggagtggggtcgcgttgcattgtgttcatgaccatgtagctcatgttgaaattaaagtttttggcttttct

SEQ ID NO: 82148 - DNA, 813 bp, Artificial Sequence
  derived and/or modified sequence
atggagagaagccagagcagactgagcctgagcgccagcttcgaggccctggccatctacttcccctgcatgaacagcttcgacgacgaggacgccgagggcgacagcagaagactgaagggcgccatccagagaagcaccgagaccggcctggccgtggagatgcccagcagaaccctgagacaggccagccacgagagcatcgaggacagcatgaacagctacggcagcgagggcaacctgaactacggcggcgtgtgcctggccagcgacgcccagttcagcgacttcctgggcagcatgggccccgcccagttcgtgggcagacagaccctggccaccacccccatgggcgacgtggagatcggcctgcaggagagaaacggccagctggaggtggacatcatccaggccagaggcctgaccgccaagcccggcagcaagaccctgcccgccgcctacatcaaggcctacctgctggagaacggcatctgcatcgccaagaagaagaccaaggtggccagaaagagcctggaccccctgtacaaccaggtgctgctgttccccgagagcccccagggcaaggtgctgcaggtgatcgtgtggggcaactacggcagaatggagagaaagcagttcatgggcgtggccagagtgctgctggaggagctggacctgaccaccctggccgtgggctggtacaagctgttccccaccagcagcatggtggaccccgccaccggccccctgctgagacaggccagccagctgagcctggagagcaccgtgggcccctgcggcgagagaagctag

SEQ ID NO: 82149 - protein, 327 aa, Artificial Sequence
  derived and/or modified sequence
MADVSLHRNPATLKLWNKYRISNIPSLIFLDATTGKVVCRNGLLVIRDDPEGLEFPWGPKPFREVIAGPLLRNNGQSLESSSLEGSHVGVYFSAHWCPPCRSLTRVLVESYRKIKEAGQNFEIIFVSADRSEESFKQYFSEMPWLAVPYTDEARRSRLNRLYGIQGIPTLIMLDPQGEVITRQGRVEVLNDEDCREFPWHPKPVLELSDSNAAQLNEGPCLVLFVDSEDDGESEAAKQLIQPIAEKIIAKYKAKEEEAPLLFFVAGEDDMTDSLRDYTNLPEAAPLLTILDMSARAKYVMDVEEITPAIVEAFVNDFLAEKLKPEPI

SEQ ID NO: 82150 - DNA, 984 bp, Artificial Sequence
  derived and/or modified sequence
atggcggatgtgagcctccatagaaatccagcgacactgaaattatggaacaaatataggatctccaatatcccttcactgatattcctggacgctaccaccggcaaggtcgtttgtcggaatgggctccttgtgatccgggacgaccctgagggcctggaatttccatggggccctaaaccatttcgggaagtgatcgccgggccacttctgcggaacaacgggcagtccctggagtcttcctctctagaaggcagccacgttggggtctattttagtgcccattggtgcccaccttgcagatcactgaccagagtcttagttgagagctacaggaagatcaaagaagcagggcaaaacttcgagattatcttcgtgtcagccgaccgtagtgaagagagtttcaagcagtacttcagcgaaatgccctggctggctgtcccttataccgatgaggccaggcgctcacggctgaacaggctctatggcattcagggaatcccaaccctcataatgctggatccacagggagaagtgataactaggcaggggagggtggaagtcctgaacgacgaagactgtagagagtttccttggcacccaaagcctgttctggaattgtccgattccaatgccgcacagctcaacgagggtccctgcctggtcctctttgttgactctgaagacgatggcgaatctgaagcagctaagcaactgatccaacccatcgcagaaaagataatcgctaagtacaaagccaaggaggaagaggcacctctactattcttcgtcgctggggaggatgacatgacagactccttgcgggattacactaatctccccgaggccgcccccctccttacgatcctagacatgtccgcgcgcgcaaagtatgtgatggacgtggaagaaataacgcccgctattgtggaagcattcgtcaatgattttctggctgagaagctgaagcctgaacctatctag

SEQ ID NO: 82151 - DNA, 984 bp, Artificial Sequence
  derived and/or modified sequence
atggccgacgtctctctgcaccgtaacccggccactctcaaactgtggaacaaatatcgcatcagcaacattccaagcttgatcttcctggatgcgacaacaggaaaggtggtgtgccggaatggactgcttgttatccgtgacgatcctgaagggttagagtttccctggggtcccaagccattcagggaggttatcgccgggccactgcttcgcaacaatggccagagtctcgaatctagtagcctcgagggaagccacgtcggcgtttacttctctgcccactggtgtcctccatgtcggtccctgacccgggtgctggtcgagagctatcgcaagatcaaagaggccgggcagaacttcgagattatcttcgtaagcgcagaccgctcggaggagtcgtttaaacagtatttcagcgaaatgccatggctggccgttccttataccgacgaagccagaagatcaagattgaaccgcctgtatgggatccagggaataccgacactgataatgctcgacccccagggcgaggttattaccaggcagggccgggtggaagttctgaacgatgaagactgcagagaatttccatggcacccaaagcccgtactggagcttagcgacagcaacgccgcacaattaaatgagggtccctgtctagtgttgttcgtggatagtgaagacgacggtgagagcgaagccgctaaacaacttattcaacccattgctgagaagataatcgccaagtataaggccaaagaagaagaggcccctttgttgtttttcgtggcaggggaggatgatatgacagacagtctacgggattacacaaacctgcccgaggctgccccactcttgacaatcttagatatgagtgcccgggctaaatacgttatggacgtagaggaaataacccctgcgatagtcgaagctttcgtgaatgattttttggccgagaagctgaagccagaaccaatttag

SEQ ID NO: 82152 - DNA, 984 bp, Artificial Sequence
  derived and/or modified sequence
atggctgatgtgtccctgcacaggaacccagccaccctgaagctgtggaacaagtaccgcatcagcaacatccccagcctcatcttcctggatgccaccaccgggaaggtggtgtgcagaaatggcctgctggtgatcagagatgatcctgagggcctggagttcccctggggccccaagcccttccgggaggtgattgctggccccctgctgaggaacaacggccagagcctggagagcagcagcctggagggcagccacgtgggcgtgtacttcagcgcccactggtgccccccctgccgcagcctgaccagggtgctggtggagagctacaggaagatcaaggaggccggccagaactttgagatcatctttgtgtctgctgacagaagtgaggagagcttcaagcagtacttcagcgagatgccctggctggccgtgccctacacagatgaggcccggcgcagccggctgaaccggctgtatggcatccagggcatccccaccctcatcatgctggacccccagggcgaggtgatcacccggcagggccgggtggaggtgctgaatgatgaggactgccgggagttcccctggcaccccaagcctgtgctggagctgagtgacagcaatgctgcccagctgaatgaaggcccctgcctggtgctgtttgtggacagtgaagatgatggagagagcgaggccgccaagcagctgatccagcccatcgccgagaagatcatcgccaagtacaaggccaaggaggaggaggcccccctgctcttctttgtggccggagaagatgacatgacagacagcctgcgggactacaccaacctgcctgaggccgcccccctgctgaccatcctggacatgtctgcccgggccaagtatgtgatggatgtggaggagatcaccccagccatcgtggaggcctttgtgaatgacttcctggccgagaagctgaagccagagcccatctag

SEQ ID NO: 82153 - DNA, 984 bp, Artificial Sequence
  derived and/or modified sequence
atggccgacgtgagcctgcaccggaaccccgccaccctgaagctgtggaataaataccgaattagcaatatccccagcctcattttcctggacgctacaacagggaaggtggtctgcaggaacgggctgcttgtgatccgggatgaccctgagggcttagagtttccttggggccctaagccttttcgcgaagtgatagcagggccgcttcttaggaacaatggccaaagtctggaaagcagcagcttagaaggatctcacgtgggagtttacttcagcgcacattggtgccctccctgccgaagtcttactcgagtgttggtagagtcttatcgaaaaataaaagaagcaggtcagaacttcgaaattatcttcgtgtccgcggaccgctctgaggaaagcttcaaacagtacttctctgagatgccctggcttgctgtgccatacacagacgaggccaggcgaagcaggctgaatagactgtatggtattcaggggatccccacactcataatgctggatccccaaggagaagtgatcactcgtcaggggagggtggaagtcctgaatgatgaagactgcagggaatttccctggcaccctaagcccgtcctcgaattgtccgatagcaacgctgcccagctgaacgagggaccttgcttagtcctcttcgtggatagtgaggatgatggcgaaagtgaggcggcaaagcagcttatccagcctatcgcggagaaaataatcgctaagtacaaagccaaggaggaggaagcaccgctgttgttttttgtggcaggcgaggacgacatgacggattccctgagagactacactaatctccccgaggccgctcccctcttaacgatcctggatatgagcgcccgggcaaaatacgtgatggacgttgaggaaatcacccccgctatcgtcgaggccttcgtcaacgacttcctcgccgaaaaactcaaacctgaacccatctag

SEQ ID NO: 82154 - DNA, 984 bp, Artificial Sequence
  derived and/or modified sequence
atggccgacgtgagcctgcaccggaaccccgccaccctgaagctgtggaacaagtaccgtatttctaatatacccagtctcatcttcctggacgctactacaggaaaggttgtttgtagaaatggcctgttggtgatcagagacgacccagagggcctggagtttccctggggtcccaagcccttccgcgaagtcatcgccggcccccttctccgtaataacggccagtcgttggaatcaagttcactggaggggtcccacgtcggagtgtatttttcagctcattggtgccccccatgccggagcttgacgcgtgtgcttgttgagtcgtaccgaaagattaaagaggccggacagaattttgagataatctttgtttctgccgaccgcagcgaagaatctttcaagcaatatttttccgaaatgccatggctggccgtgccctacacggatgaagctaggcgatcacggcttaatcgcttgtacggaatccaaggcatacccacactgatcatgctggatccgcagggcgaggtgattactcggcaggggcgcgtggaagttctgaatgacgaagactgtcgggagttcccatggcacccgaagccggtgttagagctctccgacagtaatgcggcacagcttaatgaaggaccatgtctggtgctgtttgttgattcagaggatgatggggagtccgaggctgctaaacagctgattcaacccatcgccgagaagattatagccaaatacaaggccaaagaggaggaggctcccctcctgttctttgtggcaggggaggacgatatgacagatagcctacgggattatactaacctgcctgaggcggcaccccttctgacaatacttgacatgagtgccagagcgaaatatgtaatggatgtcgaagaaatcactcctgcaatagtggaggcttttgtgaatgatttccttgccgagaagctgaagcccgagccaatctag

SEQ ID NO: 82155 - DNA, 1200 bp, Artificial Sequence
  derived and/or modified sequence
aaacgtgccccttcaccggaaccgagcaacggtaactgtgccccttcaccggaaccgagcaatggcagacgtgtcccttcaccggaacccagcaacgctcaaactttggaacaaataccgaatttccaacattccatcactaatattcctcgacgccaccactgggaaggttgtgtgcaggaacgggctgctggtgatccgagatgacccagaaggtctggagttcccctggggaccgaaacccttcagggaagtcattgcagggcccttgcttagaaacaatgggcagtctctggagagcagcagcctggaggggtctcacgtgggcgtctatttctccgcacattggtgtccgccctgccgaagcctcacccgggtcctggtggaatcctaccggaagatcaaggaggcaggccagaacttcgagatcatcttcgttagtgcagacaggtcggaggagtccttcaaacagtacttcagtgagatgccctggctcgccgtcccctacacggatgaggcccggcggtcgcgcctcaaccggctgtacggaatccaaggcatccccacgctcatcatgctggacccgcagggcgaggtgatcacgcggcaggggcgggtggaggtgctgaacgacgaggactgccgggagttcccctggcaccccaagcccgtgctggagctctccgactccaacgccgcgcagcttaacgagggcccctgcctcgtcctttttgtagattctgaggatgacggagagtccgaggcggccaagcagctgattcagccgatagctgagaaaatcattgccaagtacaaagccaaagaggaggaggcaccccttctgttcttcgtagccggggaggatgacatgactgactccctgcgagattacaccaacctgcctgaggctgcccctttgctcaccatcctggacatgtcagcccgggccaagtacgtgatggacgtggaggagatcacccccgccatcgtggaggcctttgtgaatgacttcctagcagagaagctcaaaccggagcccatctagcgtggctccggcctcctgagacgttatttaaaactcagccttctcctcctccccctccttccttccgcccttggacttacccagcgtgccccgaatcccaccacccaagtgtccagcctctctgtggtgccttgtttctgcagtaaactcctcag

SEQ ID NO: 82156 - DNA, 2681 bp, Artificial Sequence
  derived and/or modified sequence
aaacgtgccccttcaccggaaccgagcaacggtaactgtgccccttcaccggaaccgagcaatggcagacgtgtcccttcaccggaacccagcaacgctcaaactttggaacaaataccgaatttccaacattccatcactaatattcctcgacgccaccactgggaaggttgtgtgcaggaacgggctgctggtgatccgagatgacccagaaggtctggagttcccctggggaccgaaacccttcagggaagtcattgcagggcccttgcttagaaacaatgggcagtctctggagagcagcagcctggaggggtctcacgtgggcgtctatttctccgcacattggtgtccgccctgccgaagcctcacccgggtcctggtggaatcctaccggaagatcaaggaggcaggccagaacttcgagatcatcttcgttagtgcagacaggtcggaggagtccttcaaacagtacttcagtgagatgccctggctcgccgtcccctacacggatgaggcccggcggtcgcgcctcaaccggctgtacggaatccaaggcatccccacgctcatcatgctggacccgcagggcgaggtgatcacgcggcaggggcgggtggaggtgctgaacgacgaggactgccgggagttcccctggcaccccaagcccgtgctggagctctccgactccaacgccgcgcagcttaacgagggcccctgcctcgtcctttttgtagattctgaggatgacggagagtccgaggcggccaagcagctgattcagccgatagctgagaaaatcattgccaagtacaaagccaaagaggaggaggcaccccttctgttcttcgtagccggggaggatgacatgactgactccctgcgagattacaccaacctgcctgaggctgcccctttgctcaccatcctggacatgtcagcccgggccaagtacgtgatggacgtggaggagatcacccccgccatcgtggaggcctttgtgaatgacttcctagcagagaagctcaaaccggagcccatctagcgtggctccggcctcctgagacgttatttaaaactcagccttctcctcctccccctccttccttccgcccttggacttacccagcgtgccccgaatcccaccacccaagtgtccagcctctctgtggtgccttgtttctgcagtaaactcctcagccagcaccctggggtgtggaatcagcagcggcagagtccaccgtgtttggagactctgtttgggagcacgggatggccgggggcccggccagagcggggctgcatggctttcgcaaagtcactagcttttggtgaaggatctgccagggtgtcctgggcagagtgagcgtggagggccggtgggtcccgctcgggctctgactctgacgtcggcacacacggccccggacggccagaggggaaccgccgggtgacacctgcgtggaggctgagctgagaaagggcctccgcttagagctgcgggtgaggacgtccttttctaagcaacacagtcttcctcggtctgagagaaaagcagcccactcttgtgttctcaggcaggggatctccaaatgcaaaaggaagcttgtagaggttttttgggtgagaagaaaaatgtagctaaggtaatggttcatatcatacaaacagctcccacgatcctgaaattctgttaacgaatccttctctttggacatcttcccaagaaacttagccctgagtcctaggaggagcacctctgcaccagcacggacctctcgctccacccagctctgtgcccaaggcccctgatctctgctgaggtgcccacacccacgttcgatcacccctgccattcccttttattttcttttttttgagatggagtcttgctctgtcgcccaggctggagtgcagtggcaccatcttggctcacttcaacctccgcccccaaggttcaagtgattctcctgcctcagcctcccgagtagctgggattacaggcacccgccaccgtacctggctaatttttgtatttttagtagagatggggtttcaccatgttggccaggctggtctcgaactcctgacctcaggtgatccacccgcctcggcctcccaaagtgctgggattacaggcgtgagccgccgtgcccggcccccttttcttttcaaagcagaactacaaagatgagaaattaccagaagcctcgccttttcctaagcaccagcggaaggagctgtgccccgggatggagtgagggtggagggcgcgtcagccacgggtgggccttgtgtcgccttgtatcggcccaggtaggttgttggcctcttacttgggctgacctgacccccgaaagagaaacagacaactctgttctcaggattggggatggacggcttcggccaagcgttttagcctcattcactcaggccccactcagcactctgccagccaagaccattgatttggaaaatccggtccccacccgctaatgagctgttgacactgttgttccttgctgaattggattgttgacttgtagttcagaggcgtacaactagttggcgattagacttgttatgtgatgttaccagcctgaaatgcgatcaccccgtaggaaataaagcaggcatctctggacctcatccaccctgggcctctgctgtccttgatcaca

SEQ ID NO: 82157 - DNA, 984 bp, Artificial Sequence
  derived and/or modified sequence
atggccgacgtatcactccacagaaacccggctacacttaagctatggaacaagtacaggatttcaaacatcccgagccttatatttctggacgccaccacagggaaggttgtctgccgcaacggtcttctggtaattcgggacgatccagagggcctcgaattcccgtgggggcctaaacccttccgggaggtgatagccggacccctgctaaggaataacgggcagagtctagaatcatctagtctcgaaggtagtcatgtgggagtgtatttctctgcccattggtgccccccatgtcggagccttacgcgcgttttggttgaatcttaccggaaaatcaaagaagccggtcaaaatttcgagatcatctttgtgtcagccgatcggtcagaagagtcgtttaaacaatacttctctgaaatgccttggcttgcggtgccatataccgacgaggctagacgcagccggctgaacaggttatacggcatccaaggtatcccaactctgataatgttggacccacaaggcgaagtaataactcgacaaggaagagttgaggtgttgaatgacgaggactgcagggagttcccctggcatccgaagcctgtactcgagctttcggattctaacgccgctcagttaaacgaagggccatgcctggtacttttcgttgattccgaggacgatggggaaagtgaggccgcaaagcagctgatccaacccatcgccgagaagattattgccaagtacaaagccaaagaggaggaggcaccactgctgttcttcgtggccggagaggatgacatgaccgattctctgagggactatactaatctccccgaagccgcacccctgctgactatcttggatatgtcagcacgggctaagtatgtcatggacgtcgaagagattaccccggcaatagtggaggcattcgtcaacgatttcctggcagagaaactgaagcccgaaccgatttag

SEQ ID NO: 82158 - DNA, 984 bp, Artificial Sequence
  derived and/or modified sequence
atggccgacgtgagcttgcacaggaatccagcgacactgaagctttggaacaagtaccgcatctccaatattccttctctgattttcctggacgcaaccactggaaaggtggtgtgcagaaacggcctccttgtgatcagagacgatccagagggtcttgagttcccatggggaccgaaaccatttagagaggtgattgccggacccctcctgcggaataatgggcagagtctggagtcttccagcctggaaggttcccatgtgggggtatacttctccgcccactggtgcccgccttgcaggtctctcaccagggtcctcgtcgaatcttaccgcaaaatcaaggaggctggacagaactttgaaatcatcttcgtttccgccgacaggtctgaggaaagctttaagcagtactttagtgagatgccttggctggcggtgccttacaccgacgaggcacgccgatcccgactgaatcgtctctatgggatccaaggtattcccacacttattatgctcgatccccagggggaggttatcacacgccaggggagagtggaggttttaaacgacgaggactgcagagaatttccatggcaccccaaacccgtgctggagctgtccgattccaacgcagcgcagctaaacgaagggccatgcctggtgttgtttgtggactccgaagatgatggcgaaagtgaggccgctaagcaactcatacagccaattgcggagaaaataatcgcaaagtataaggcaaaagaagaggaagcacccttgctattttttgttgctggcgaggacgatatgaccgacagcttacgcgattacaccaacctcccagaagcagcaccactgcttacaatcctggatatgtcagccagggccaaatatgttatggatgtggaggagattacgccggctattgttgaggcctttgtgaacgattttctagccgagaagctgaaacctgagcccatctag

SEQ ID NO: 82159 - DNA, 984 bp, Artificial Sequence
  derived and/or modified sequence
atggccgacgtgagcctgcacagaaaccccgccaccctgaagctgtggaacaagtacagaatcagcaacatccccagcctgatcttcctggacgccaccaccggcaaggtggtgtgcagaaacggcctgctggtgatcagagacgaccccgagggcctggagttcccctggggccccaagcccttcagagaggtgatcgccggccccctgctgagaaacaacggccagagcctggagagcagcagcctggagggcagccacgtgggcgtgtacttcagcgcccactggtgccccccctgcagaagcctgaccagagtgctggtggagagctacagaaagatcaaggaggccggccagaacttcgagatcatcttcgtgagcgccgacagaagcgaggagagcttcaagcagtacttcagcgagatgccctggctggccgtgccctacaccgacgaggccagaagaagcagactgaacagactgtacggcatccagggcatccccaccctgatcatgctggacccccagggcgaggtgatcaccagacagggcagagtggaggtgctgaacgacgaggactgcagagagttcccctggcaccccaagcccgtgctggagctgagcgacagcaacgccgcccagctgaacgagggcccctgcctggtgctgttcgtggacagcgaggacgacggcgagagcgaggccgccaagcagctgatccagcccatcgccgagaagatcatcgccaagtacaaggccaaggaggaggaggcccccctgctgttcttcgtggccggcgaggacgacatgaccgacagcctgagagactacaccaacctgcccgaggccgcccccctgctgaccatcctggacatgagcgccagagccaagtacgtgatggacgtggaggagatcacccccgccatcgtggaggccttcgtgaacgacttcctggccgagaagctgaagcccgagcccatctag

SEQ ID NO: 82160 - protein, 259 aa, Artificial Sequence
  derived and/or modified sequence
MALRRPPRLRLCARLPDFFLLLLFRGCLIGAVNLKSSNRTPVVQEFESVELSCIITDSQTSDPRIEWKKIQDEQTTYVFFDNKIQVKPVTPVCRVPKAVPVGKMATLHCQESEGHPRPHYSWYRNDVPLPTDSRANPRFRNSSFHLNSETGTLVFTAVHKDDSGQYYCIASNDAGSARCEEQEMEVYDLNIGGIIGGVLVVLAVLALITLGICCAYRRGYFINNKQDGESYKNPGKPDGVNYIRTDEEGDFRHKSSFVI

SEQ ID NO: 82161 - DNA, 780 bp, Artificial Sequence
  derived and/or modified sequence
atggcgctaagacgcccgccgcgccttcggctgtgtgctcgccttcccgacttcttcttacttctattatttagagggtgcctcataggggccgtgaatctgaaaagttccaatcgcacacccgtggtccaagaatttgaatccgtcgagctgtcctgtattatcaccgattcccagaccagcgaccctcggattgagtggaaaaagatccaagacgagcagaccacctatgtttttttcgataacaagatacaggtcaagccagttacacccgtttgtcgcgtgcccaaagcggtaccggtgggcaaaatggccaccctgcactgccaggaaagtgaagggcatccccggcctcactattcttggtaccgaaatgatgtccctcttccaactgatagcagagctaatcctaggtttaggaacagcagtttccacctgaattcagaaaccggcaccctggttttcactgcggtgcataaagacgactccggccagtactattgcattgcaagtaatgacgcaggcagcgctagatgcgaggaacaagaaatggaagtctatgacctgaacattggtggaatcattggtggcgttctagtcgtgctggctgtacttgcgttaataacactgggaatctgctgcgcctaccgtaggggctactttatcaataacaaacaggacggcgagagctataaaaatccagggaagcccgacggtgtgaattatatcagaaccgatgaggagggtgattttaggcataagagtagttttgtcatctag

SEQ ID NO: 82162 - DNA, 3363 bp, Artificial Sequence
  derived and/or modified sequence
agcaaccctcgacatggcgctgaggcggccaccgcgactccggctctgcgctcggctgcctgacttcttcctgctgctgcttttcaggggctgcctgataggggctgtaaatctcaaatccagcaatcgaaccccagtggtacaggaatttgaaagtgtggaactgtcttgcatcattacggattcgcagacaagtgaccccaggatcgagtggaagaaaattcaagatgaacaaaccacatatgtgttttttgacaacaaaattcaggtgaagccagtgacccctgtctgtagagtgccgaaggctgtaccagtaggcaagatggcaacactgcactgccaggagagtgagggccacccccggcctcactacagctggtatcgcaatgatgtaccactgcccacggattccagagccaatcccagatttcgcaattcttctttccacttaaactctgaaacaggcactttggtgttcactgctgttcacaaggacgactctgggcagtactactgcattgcttccaatgacgcaggctcagccaggtgtgaggagcaggagatggaagtctatgacctgaacattggcggaattattgggggggttctggttgtccttgctgtactggccctgatcacgttgggcatctgctgtgcatacagacgtggctacttcatcaacaataaacaggatggagaaagttacaagaacccagggaaaccagatggagttaactacatccgcactgacgaggagggcgacttcagacacaagtcatcgtttgtgatctgagacccgcggtgtggctgagagcgcacagagcgcacgtgcacatacctctgctagaaactcctgtcaaggcagcgagagctgatgcactcggacagagctagacactcattcagaagcttttcgttttggccaaagttgaccactactcttcttactctaacaagccacatgaatagaagaattttcctcaagatggacccggtaaatataaccacaaggaagcgaaactgggtgcgttcactgagttgggttcctaatctgtttctggcctgattcccgcatgagtattagggtgatcttaaagagtttgctcacgtaaacgcccgtgctgggccctgtgaagccagcatgttcaccactggtcgttcagcagccacgacagcaccatgtgagatggcgaggtggctggacagcaccagcagcgcatcccggcgggaacccagaaaaggcttcttacacagcagccttacttcatcggcccacagacaccaccgcagtttcttcttaaaggctctgctgatcggtgttgcagtgtccattgtggagaagctttttggatcagcattttgtaaaaacaaccaaaatcaggaaggtaaattggttgctggaagagggatcttgcctgaggaaccctgcttgtccaacagggtgtcaggatttaaggaaaaccttcgtcttaggctaagtctgaaatggtactgaaatatgcttttctatgggtcttgtttattttataaaattttacatctaaatttttgctaaggatgtattttgattattgaaaagaaaatttctatttaaactgtaaatatattgtcatacaatgttaaataacctatttttttaaaaaagttcaacttaaggtagaagttccaagctactagtgttaaattggaaaatatcaataattaagagtattttacccaaggaatcctctcatggaagtttactgtgatgttccttttctcacacaagttttagcctttttcacaagggaactcatactgtctacacatcagaccatagttgcttaggaaacctttaaaaattccagttaagcaatgttgaaatcagtttgcatctcttcaaaagaaacctctcaggttagctttgaactgcctcttcctgagatgactaggacagtctgtacccagaggccacccagaagccctcagatgtacatacacagatgccagtcagctcctggggttgcgccaggcgcccccgctctagctcactgttgcctcgctgtctgccaggaggccctgccatccttgggccctggcagtggctgtgtcccagtgagctttactcacgtggcccttgcttcatccagcacagctctcaggtgggcactgcagggacactggtgtcttccatgtagcgtcccagctttgggctcctgtaacagacctctttttggttatggatggctcacaaaatagggcccccaatgctattttttttttttaagtttgtttaattatttgttaagattgtctaaggccaaaggcaattgcgaaatcaagtctgtcaagtacaataacatttttaaaagaaaatggatcccactgttcctctttgccacagagaaagcacccagacgccacaggctctgtcgcatttcaaaacaaaccatgatggagtggcggccagtccagccttttaaagaacgtcaggtggagcagccaggtgaaaggcctggcggggaggaaagtgaaacgcctgaatcaaaagcagttttctaattttgactttaaatttttcatccgccggagacactgctcccatttgtggggggacattagcaacatcactcagaagcctgtgttcttcaagagcaggtgttctcagcctcacatgccctgccgtgctggactcaggactgaagtgctgtaaagcaaggagctgctgagaaggagcactccactgtgtgcctggagaatggctctcactactcaccttgtctttcagcttccagtgtcttgggttttttatactttgacagcttttttttaattgcatacatgagactgtgttgactttttttagttatgtgaaacactttgccgcaggccgcctggcagaggcaggaaatgctccagcagtggctcagtgctccctggtgtctgctgcatggcatcctggatgcttagcatgcaagttccctccatcattgccaccttggtagagagggatggctccccaccctcagcgttggggattcacgctccagcctccttcttggttgtcatagtgatagggtagccttattgccccctcttcttataccctaaaaccttctacactagtgccatgggaaccaggtctgaaaaagtagagagaagtgaaagtagagtctgggaagtagctgcctataactgagactagacggaaaaggaatactcgtgtattttaagatatgaatgtgactcaagactcgaggccgatacgaggctgtgattctgcctttggatggatgttgctgtacacagatgctacagacttgtactaacacaccgtaatttggcatttgtttaacctcatttataaaagcttcaaaaaaaccc

SEQ ID NO: 82163 - DNA, 780 bp, Artificial Sequence
  derived and/or modified sequence
atggccctgcggcggcccccccggctgcggctgtgtgcccggctgcctgacttcttcctgctgctgctcttccggggctgcctgattggagctgtgaacctgaagagcagcaacagaacacctgtggtgcaggagtttgagagcgtggagctgagctgcatcatcacagacagccagaccagtgaccccagaattgagtggaagaagatccaggatgagcagaccacctacgtgttctttgacaacaagatccaggtgaagcctgtgacccctgtgtgccgggtgcccaaggctgtgcctgtgggcaagatggccaccctgcactgccaggagagcgagggccacccccggccccactacagctggtacagaaatgatgtgcccctgcccacagacagccgggccaacccccgcttcaggaacagcagcttccacctgaacagcgagaccggcaccctggtgttcaccgctgtgcacaaggatgattctggccagtactactgcatcgccagcaatgatgctggcagcgcccgctgtgaggagcaggagatggaggtgtatgacctgaacattggaggcatcattggaggagtgctggtggtgctggccgtgctggccctgatcaccctgggcatctgctgtgcctacagaagaggctacttcatcaacaacaagcaggatggagagagctacaagaaccctgggaagccagatggagtgaactacatcagaacagatgaggagggggacttccgccacaagagcagctttgtgatctag

SEQ ID NO: 82164 - DNA, 780 bp, Artificial Sequence
  derived and/or modified sequence
atggccctgcggcggcccccccggctgcggctgtgcgcccggctgccagacttttttttattgttactgttcagagggtgcctgataggcgcagtcaatctcaagtcaagtaataggacaccagtggtgcaggagtttgaatccgttgagctgtcctgcattataaccgattctcagacgagcgacccgagaattgagtggaagaagatccaggatgaacagactacgtacgtgttcttcgataacaaaattcaggtcaagccagtaacccctgtgtgtcgtgtccccaaagccgtgcccgtaggtaaaatggccactctgcactgccaagaatctgaggggcacccacgcccccactactcttggtataggaacgacgttccgttgccaactgactcccgggcgaacccccggttccggaactctagttttcacctaaacagtgagactggaactttggtgttcaccgccgtccacaaagatgacagtgggcagtactactgcattgcctctaacgacgctggtagcgctcgttgcgaggagcaggagatggaagtgtatgatctgaacatcggcggtattatcggaggagttcttgtcgtcctggccgtactagctctgattaccctggggatctgctgtgcctacagacggggttatttcattaataataagcaagacggggagtcctacaagaacccagggaagcccgacggcgtgaactatattagaaccgatgaagaaggtgatttccgccacaaatcctccttcgtgatctag

SEQ ID NO: 82165 - DNA, 780 bp, Artificial Sequence
  derived and/or modified sequence
atggctctcaggcgccctccgcgactgaggctctgtgccaggctgcctgatttcttcctgctgctccttttccgtgggtgcctcatcggggctgttaacttgaagagctctaatcgcacacccgtggtgcaagaattcgaatctgtagagctgagttgcatcatcacagattcccagacgtctgatcccagaatcgagtggaaaaagatccaggacgagcagacaacctatgtctttttcgacaacaaaatacaggtgaaaccagtgaccccagtgtgccgggtacctaaggcggtgcccgtcggtaagatggccacgctccactgccaggagagtgaagggcatccgcgaccccactactcctggtaccgcaatgacgtgccactccctaccgattcccgggctaaccctcggttccggaattccagcttccacctgaactccgaaaccgggacactggtgttcacagctgtgcataaggacgacagtggccagtactactgcatcgcatccaatgatgcgggatctgctagatgtgaagagcaagagatggaggtgtatgacctgaatatcggaggtataatcggcggagtgttggtagtccttgccgttctagccctaatcaccctgggtatctgttgcgcttaccggagagggtacttcatcaacaacaaacaggatggggaaagttacaagaaccccggtaagcccgacggggtgaactatattaggactgacgaggagggggattttagacacaagagttctttcgtgatttag

SEQ ID NO: 82166 - DNA, 780 bp, Artificial Sequence
  derived and/or modified sequence
atggccctgagaagaccccccagactgagactgtgcgccagactgcccgacttcttcctgctgctgctgttcagaggctgcctgatcggcgccgtgaacctgaagagcagcaacagaacccccgtggtgcaggagttcgagagcgtggagctgagctgcatcatcaccgacagccagaccagcgaccccagaatcgagtggaagaagatccaggacgagcagaccacctacgtgttcttcgacaacaagatccaggtgaagcccgtgacccccgtgtgcagagtgcccaaggccgtgcccgtgggcaagatggccaccctgcactgccaggagagcgagggccaccccagaccccactacagctggtacagaaacgacgtgcccctgcccaccgacagcagagccaaccccagattcagaaacagcagcttccacctgaacagcgagaccggcaccctggtgttcaccgccgtgcacaaggacgacagcggccagtactactgcatcgccagcaacgacgccggcagcgccagatgcgaggagcaggagatggaggtgtacgacctgaacatcggcggcatcatcggcggcgtgctggtggtgctggccgtgctggccctgatcaccctgggcatctgctgcgcctacagaagaggctacttcatcaacaacaagcaggacggcgagagctacaagaaccccggcaagcccgacggcgtgaactacatcagaaccgacgaggagggcgacttcagacacaagagcagcttcgtgatctag

SEQ ID NO: 82167 - protein, 124 aa, Artificial Sequence
  derived and/or modified sequence
MSSALESVTVSDRPLGVSITKAEVAPEEDERKKRRRERNKIAAAKCRNKKKEKTECLQKESEKLESVNAELKAQIEELKNEKQHLIYMLNLHRPTCIVRAQNGRTPEDERNLFIQQIKEGTLQS

SEQ ID NO: 82168 - DNA, 375 bp, Artificial Sequence
  derived and/or modified sequence
atgagctctgcactggagagtgtcacagtgtctgacagaccgctgggcgtcagtattaccaaagccgaggtcgcacccgaagaagacgagcggaagaagcgaaggcgcgagaggaataagatagcagctgccaagtgccggaacaaaaagaaagagaagactgagtgtctgcaaaaggaaagtgaaaagctggaaagcgtgaatgctgagttgaaggctcaaatcgaggagctgaaaaatgaaaagcagcaccttatttacatgctcaatctgcatcggcctacctgcatagtgcgagcacagaatggacgtacgcccgaggatgaacgcaacctcttcattcaacagattaaggaagggaccttacagtcctag

SEQ ID NO: 82169 - DNA, 375 bp, Artificial Sequence
  derived and/or modified sequence
atgagcagcgccctggagagcgtgacagtgtctgaccggcccctgggcgtgtccatcaccaaggccgaggtggcccctgaggaggatgagaggaagaagagaagaagagagaggaacaagattgctgctgccaagtgcaggaacaagaagaaggagaagacagaatgtctgcagaaggagagcgagaagctggagagcgtgaatgctgagctgaaggcccagatcgaggagctgaagaatgagaagcagcacctgatctacatgctgaacctgcaccggcccacctgcatcgtgcgggcccagaatggccgcaccccagaagatgagaggaacctcttcatccagcagatcaaggagggcaccctgcagagctag

SEQ ID NO: 82170 - DNA, 375 bp, Artificial Sequence
  derived and/or modified sequence
atgagcagcgccctggagagcgtgaccgtgagcgaccggcccctgggtgtgtctattaccaaggcggaggtggcccctgaggaggacgaacggaaaaaacgtaggcgggagcgtaacaaaattgccgcagctaaatgcaggaacaaaaagaaagagaagaccgagtgtctccagaaggaatccgagaaacttgagtcagtaaatgcagagttgaaggcacagattgaggaactgaaaaatgaaaagcaacacctgatttacatgctgaatttgcataggccgacttgtatcgtgagggcccagaacggtcggacgcccgaggacgagcggaacctgtttattcagcaaattaaagaggggaccctccagtcttag

SEQ ID NO: 82171 - DNA, 375 bp, Artificial Sequence
  derived and/or modified sequence
atgagctctgccctggaatcagtgactgtcagcgacagaccccttggcgtcagcattacaaaggccgaggtcgctccagaggaagatgagcgaaagaagcggaggagagagcgtaacaagatagccgcagcaaaatgccggaacaaaaagaaagagaaaacagaatgcctgcagaaggagtcagaaaagctcgagagcgttaatgctgagctgaaagcacagattgaagaattgaaaaatgaaaaacagcacctgatctatatgctcaatcttcaccggcctacatgcatcgtcagggcacagaacggcagaacccccgaggacgagcgcaacttgttcatccagcagattaaagaaggcaccctacagtcctag

SEQ ID NO: 82172 - DNA, 375 bp, Artificial Sequence
  derived and/or modified sequence
atgagcagcgccctggagagcgtgaccgtgagcgacagacccctgggcgtgagcatcaccaaggccgaggtggcccccgaggaggacgagagaaagaagagaagaagagagagaaacaagatcgccgccgccaagtgcagaaacaagaagaaggagaagaccgagtgcctgcagaaggagagcgagaagctggagagcgtgaacgccgagctgaaggcccagatcgaggagctgaagaacgagaagcagcacctgatctacatgctgaacctgcacagacccacctgcatcgtgagagcccagaacggcagaacccccgaggacgagagaaacctgttcatccagcagatcaaggagggcaccctgcagagctag

SEQ ID NO: 82173 - protein, 106 aa, Artificial Sequence
  derived and/or modified sequence
MMLQHPGQVSASEEELRFAIQNKHLCHRMSSALESVTVSDRPLGVSITKAEVAPEEDERKKRRRERNKIAAAKCRNKKKEKTECLQKLPRPFWVQKTCIWAVDSCK

SEQ ID NO: 82174 - DNA, 321 bp, Artificial Sequence
  derived and/or modified sequence
atgatgctccagcatcccggacaggtgtccgcatccgaagaggagcttcgtttcgcaatccagaataaacatctgtgtcataggatgtcaagtgctttggagtccgtgacggtgtcagacaggccgctcggcgtcagcataaccaaagctgaggtagcaccagaagaggatgaacggaaaaagcggaggcgcgaacggaataaaattgcagctgccaagtgccgaaacaagaaaaaggagaaaacagagtgtctgcagaagctgcctagaccattctgggttcagaaaacctgcatttgggccgtggacagctgcaagtag

SEQ ID NO: 82175 - DNA, 321 bp, Artificial Sequence
  derived and/or modified sequence
atgatgctgcagcaccctggccaggtgtctgccagcgaggaggagctgcgctttgccatccagaacaagcacctgtgccacaggatgagcagcgccctggagagcgtgacagtgtctgaccggcccctgggcgtgtccatcaccaaggccgaggtggcccctgaggaggatgagaggaagaagagaagaagagagaggaacaagattgctgctgccaagtgcaggaacaagaagaaggagaagacagaatgtctgcagaagctgccccggcccttctgggtgcagaagacctgcatctgggccgtggacagctgcaagtag

SEQ ID NO: 82176 - DNA, 321 bp, Artificial Sequence
  derived and/or modified sequence
atgatgctgcagcaccccggccaggtgagcgccagcgaggaggagttgcgcttcgccatccagaacaaacacctgtgccatcgcatgtcgagtgctttagagtccgtgaccgtgagcgatcgccccctgggcgtgagcattaccaaggccgaagtggccccagaagaagatgagcgtaagaagcgccggcgagagcggaataaaatcgccgcggctaagtgtcgcaacaagaaaaaggagaaaacagaatgcctgcaaaaactgcctcgcccattttgggtgcagaaaacctgtatttgggctgtggatagctgcaaatag

SEQ ID NO: 82177 - DNA, 321 bp, Artificial Sequence
  derived and/or modified sequence
atgatgttgcagcaccctggtcaggtctcggcaagtgaagaagagctcagattcgccatccagaacaaacatttatgccaccgtatgagcagcgctcttgagagtgtgaccgtatcagaccgccctttgggagttagtattaccaaagccgaggtggcccctgaagaggacgaaaggaagaaacgacgcagggaacgaaataaaatcgccgctgctaaatgtcggaacaagaagaaagaaaagaccgaatgcctgcagaagctcccacgcccattctgggtccagaagacttgcatctgggctgtggacagctgcaagtag

SEQ ID NO: 82178 - DNA, 482 bp, Artificial Sequence
  derived and/or modified sequence
atgatgcttcaacacccaggccaggtctctgcctcggaagaagagctgaggtttgccatccagaacaagcacctctgccaccggatgtcctctgcgctggaatcagtcactgtcagcgacagacccctcggggtgtccatcacaaaagccgaggtagcccctgaagaagatgaaaggaaaaagaggcgacgagaaagaaataagattgcagctgcaaagtgccgaaacaagaagaaggagaagacggagtgcctgcagaaactcccaaggcccttttgggtccagaagacctgcatatgggctgttgactcatgcaaatgaggtatctgaactgcagcttcagtattagcagagccacaggccgcctctgtggcatcaccagggtttctctgaagaagagggtctgcattttcctaaacccagtgctgctctcccatctcccatcttcctctcgcagcttgatgagccccggtgtgtcccag

SEQ ID NO: 82179 - DNA, 321 bp, Artificial Sequence
  derived and/or modified sequence
atgatgctgcagcaccccggccaggtgagcgccagcgaggaggagctgagattcgccatccagaacaagcacctgtgccacagaatgagcagcgccctggagagcgtgaccgtgagcgacagacccctgggcgtgagcatcaccaaggccgaggtggcccccgaggaggacgagagaaagaagagaagaagagagagaaacaagatcgccgccgccaagtgcagaaacaagaagaaggagaagaccgagtgcctgcagaagctgcccagacccttctgggtgcagaagacctgcatctgggccgtggacagctgcaagtag

SEQ ID NO: 82180 - protein, 399 aa, Artificial Sequence
  derived and/or modified sequence
MPVQETQAPESPGENSEQALQTLSPRAIPRNPDGGPLESSSDLAALSPLTSSGHQEQDTELGSTHTAGATSSLTPSRGPVSPSVSFQPLARSTPRASRLPGPTGSVVSTGTSFSSSSPGLASAGAAEGKQGAESDQAEPIICSSGAEAPANSLPSKVPTTLMPVNTVALKVPANPASVSTVPSKLPTSSKPPGAVPSNALTNPAPSKLPINSTRAGMVPSKVPTSMVLTKVSASTVPTDGSSRNEETPAAPTPAGATGGSSAWLDSSSENRGLGSELSKPGVLASQVDSPFSGCFEDLAISASTSLGMGPCHGPEENEYKSEGTFGIHVAENPSIQLLEGNPGPPADPDGGPRPQADRKFQEREVPCHRPSPGALWLQVAVTGVLVVTLLVVLYRRRLH

SEQ ID NO: 82181 - DNA, 1200 bp, Artificial Sequence
  derived and/or modified sequence
atgcctgttcaggagacccaagccccggagagtcctggggagaacagcgaacaagctctgcaaacattgagccctcgcgcaattcccagaaatccggacggtggcccgcttgagtcaagctcagacttggccgccctgtcacccctgacctcatcaggacaccaggaacaggacaccgagctgggtagtacacatacggccggcgcaacaagctccctgaccccttcacggggtccagtcagccccagtgtgtcctttcagcccttagctcggagtacaccacgggcctctaggttgcccgggccgaccgggagcgtcgtgtctaccggcacatccttttcatcctcctcccccggattggcttctgcaggtgccgccgagggaaagcagggggccgagagtgaccaagcggaacctatcatttgttctagcggtgccgaagcccctgccaattctctgcctagcaaagttcctacgactctgatgcctgtcaatactgtggcactaaaggtgcccgccaaccctgcatccgtgtctacagtcccttcaaaactgccaacatcgtctaaaccccccggagctgtgccgagcaacgccctaacaaatcccgccccaagtaagctgcccatcaatagcactcgcgccggcatggtgccaagcaaggtgccaacatccatggtcctcacgaaggtgagtgcaagcaccgttcctaccgatgggtctagcagaaatgaggagaccccagctgcacccaccccagcaggcgcaacaggaggatctagcgcttggctggacagctctagcgagaaccggggactgggttccgaacttagtaaacctggcgtgttggccagtcaggtggattctccctttagtgggtgttttgaggatcttgcgattagtgcaagtacctccctggggatgggaccctgtcatggacccgaagaaaacgagtacaagtcagagggcacctttggcatccacgtggcagagaaccccagcatccaactgctggagggaaacccgggacctcctgccgaccccgacggcggccccagaccgcaggccgacagaaagtttcaggagagagaggtgccatgtcatagacccagtccgggggccctctggttgcaggtggccgtcactggggtgcttgtggtgactctgttggttgttttataccggagacgattgcattag

SEQ ID NO: 82182 - DNA, 1200 bp, Artificial Sequence
  derived and/or modified sequence
atgcctgtgcaggagacccaggcccctgagagccctggagagaacagcgagcaggccctgcagaccctgagcccccgggccatccccaggaacccagatggcggccccctggagagcagcagtgacctggccgccctgagccccctgaccagcagcggccaccaggagcaggacacagagctgggcagcacccacacagctggggccaccagcagcctgacccccagccggggccctgtgagccccagcgtgtccttccagcccctggcccggagcaccccccgggccagccggctgcccggccccactggatctgtggtgtccacaggcaccagcttcagcagcagcagccctggcctggccagcgctggagctgctgagggcaagcagggcgctgagagtgaccaggccgagcccatcatctgcagcagcggggctgaggccccagccaacagcctgcccagcaaggtgcccaccaccctgatgcctgtgaacacagtggccctgaaggtgcctgccaacccagcctctgtgtccacagtgcccagcaagctgcccaccagcagcaagcccccaggagctgtgcccagcaatgccctgaccaacccagcccccagcaagctgcccatcaacagcaccagggctggcatggtgcccagcaaggtgcccacctccatggtgctgaccaaggtgtctgccagcacagtgcccacagatggcagcagcagaaatgaggagaccccagctgcccccaccccagctggggccactggaggcagcagcgcctggctggacagcagcagtgaaaatagaggcctgggcagcgagctgagcaagccaggagtgctggccagccaggtggacagccccttcagcggctgctttgaggacctggccatcagcgccagcaccagcctgggcatgggcccctgccacggccctgaggagaatgagtacaagtctgagggcaccttcggcatccacgtggccgagaaccccagcatccagctgctggagggcaaccctggccccccagctgaccctgatggcggcccccggccccaggccgacaggaagttccaggagcgggaggtgccctgccaccggcccagccctggggccctgtggctgcaggtggccgtgactggagtgctggtggtgaccctgctggtggtgctgtacagaagaaggctgcactag

SEQ ID NO: 82183 - DNA, 1450 bp, Artificial Sequence
  derived and/or modified sequence
atgccgtttgctgaagacaagacctataagtatatctgccgcaatttcagcaatttttgcaatgtggatgttgtagagattctgccttacctgccctgcctcacagcaagagaccaggatcgactgcgggccacctgcacactctcagggaaccgggacaccctctggcatctcttcaatacccttcagcggcggcccggctgggtggagtacttcattgcggcactgaggggctgtgagctagttgatctcgcggacgaagtggcctctgtctaccagagctaccagcctcaattcagagcaagccctgcagacgctcagccccagagccatcccaaggaatccagatggtggccccctggagtcctcctctgacctggcagccctcagccctctgacctccagcgggcatcaggagcaggacacagaactgggcagtacccacacagcaggtgcgacctccagcctcacaccatcccgtgggcctgtgtctccatctgtctccttccagcccctggcccgttccacccccagggcaagccgcttgcctggacccacagggtcagttgtatctactggcacctccttctcctcctcatcccctggcttggcctctgcaggggctgcagagggtaaacagggtgcagagagtgaccaggccgagcctatcatctgctccagtggggcagaggcacctgccaactctctgccctccaaagtgcctaccaccttgatgcctgtgaacacagtggccctgaaagtgcctgccaacccagcatctgtcagcacagtgccctccaagttgccaactagctcaaagccccctggtgcagtgccttctaatgcgctcaccaatccagcaccatccaaattgcccatcaactcaacccgtgctggcatggtgccatccaaagtgcctactagcatggtgctcaccaaggtgtctgccagcacagtccccactgacgggagcagcagaaatgaggagaccccagcagctccaacacccgccggcgccactggaggcagctcagcctggctagacagcagctctgagaataggggccttgggtcggagctgagtaagcctggcgtgctggcatcccaggtagacagcccgttctcgggctgcttcgaggatcttgccatcagtgccagcacctccttgggcatggggccctgccatggcccagaggagaatgagtataagtccgagggcacctttgggatccacgtggctgagaaccccagcatccagctcctggagggcaaccctgggccacctgcggacccggatggcggccccaggccacaagccgaccggaagttccaggagagggaggtgccatgccacaggccctcacctggggctctgtggctccaggtggctgtgacaggggtgctggtagtcacactcctggtggtgctgtaccggcggcgtctgcactag

SEQ ID NO: 82184 - DNA, 1200 bp, Artificial Sequence
  derived and/or modified sequence
atgcccgtgcaggagacccaggcccccgagagccccggcgagaactccgagcaggccctacaaacactgagtccaagagcaataccacggaatcccgacggagggcctcttgaaagttcttctgacttggccgcactgagccccttaacgtccagcggccatcaggagcaagacacagagctggggagtacgcacacagccggagccacctctagtcttactccttcgagaggtccggtgagtccaagcgtctcctttcagccgttagccagatcaaccccgagggcttcgcgcctgcctggcccaactggatctgtggtttcaactggcactagcttttcatcaagtagtcctggcctggctagcgcaggggcagccgagggcaaacaaggtgcagaaagcgatcaggcagaacccatcatttgctcctcaggagccgaggctcccgcaaatagcctaccgagtaaggtcccgactaccctgatgcctgtgaataccgtcgccctcaaagtgcccgctaaccctgcctctgtctcaaccgtcccctcaaaattaccaacgtccagtaagccccctggtgctgtgcccagtaatgccttgaccaatccagccccatctaaattgccaatcaactctacaagagccggcatggtgccctccaaggtacccacgagcatggttctaaccaaagtttcagcctcaactgtgccaactgatggatcctcaagaaacgaagagacccctgcagctcccactccggcaggagcaacgggagggagcagtgcatggctcgatagtagctccgaaaaccggggtctgggatctgaactatctaagccgggagtgttggcgagccaggtggactctcccttctcaggctgcttcgaggatctggccatctccgcttcaacaagcctcggtatggggccgtgccatggcccagaagagaatgagtataagagtgaagggactttcggcatccatgtggcagagaatcctagtatccagctgttggagggtaatcctggtccacccgcagatcctgacggaggacccaggccacaagcagatcgtaagtttcaggagagggaagtcccttgtcaccggccttcccctggcgcgttgtggttgcaggtggctgtgaccggggtgctcgttgtgaccctcctcgttgtgctgtatcgccgacgactgcattag

SEQ ID NO: 82185 - DNA, 1200 bp, Artificial Sequence
  derived and/or modified sequence
atgcctgttcaggagacccaggctcctgaatcccccggtgagaactctgaacaggccctgcagaccctgtccccacgtgctattccacggaatcccgacggcggtccgctggaatcctcgagcgatctcgcggctctctctcctctcactagctcaggacaccaggagcaggacaccgaactgggctctacccacacagccggtgcgactagtagtctcacgccgtctagaggcccagtttcccctagcgtgtcttttcaacccttggcacgatcgactcccagagcctcccggctgcctggtcctactgggagcgtcgtgtcaacaggaactagcttctcttcaagctctcccggtctagcctctgccggagcagctgagggtaaacagggtgcagaatccgaccaggctgaaccaattatctgctcttcaggggctgaagcccctgctaactcgctgccttctaaggtcccgaccacattaatgcctgtgaatacagtagctcttaaggtcccggcaaatccagccagcgtctcaactgttccctctaagcttcctacctcttcaaagccaccaggagccgtaccttcgaatgctctgacaaacccagccccttccaaacttcctatcaatagtacaagagctggtatggttccaagtaaagtgcctacctctatggttctcaccaaggtgtcagcttcaaccgtgcctaccgacggtagcagcaggaatgaggagactcctgcggctccgacccctgctggcgcaacaggaggctcgtccgcatggttagactcaagctctgaaaaccgtggtctgggcagtgagctgtctaagcccggtgtcttggcctctcaggttgactccccgttttcaggttgctttgaggacctggcaatttccgctagcacctcccttggaatgggcccatgtcatggtccggaagaaaatgagtacaaaagtgagggaacattcggaattcacgtggctgagaacccaagcatccagctgctggagggcaatcctgggcctcctgctgaccccgatggcggacccagaccccaggctgatagaaagttccaagaaagggaagtgccctgccacaggccaagccctggcgctttgtggctccaggtggccgtgacaggagtgctagttgtcacgcttttggtcgttctctacagacgaaggttgcactag

SEQ ID NO: 82186 - DNA, 1200 bp, Artificial Sequence
  derived and/or modified sequence
atgcccgtgcaggagacccaggcccccgagagccccggcgagaacagcgagcaggccctgcagaccctgagccccagagccatccccagaaaccccgacggcggccccctggagagcagcagcgacctggccgccctgagccccctgaccagcagcggccaccaggagcaggacaccgagctgggcagcacccacaccgccggcgccaccagcagcctgacccccagcagaggccccgtgagccccagcgtgagcttccagcccctggccagaagcacccccagagccagcagactgcccggccccaccggcagcgtggtgagcaccggcaccagcttcagcagcagcagccccggcctggccagcgccggcgccgccgagggcaagcagggcgccgagagcgaccaggccgagcccatcatctgcagcagcggcgccgaggcccccgccaacagcctgcccagcaaggtgcccaccaccctgatgcccgtgaacaccgtggccctgaaggtgcccgccaaccccgccagcgtgagcaccgtgcccagcaagctgcccaccagcagcaagccccccggcgccgtgcccagcaacgccctgaccaaccccgcccccagcaagctgcccatcaacagcaccagagccggcatggtgcccagcaaggtgcccaccagcatggtgctgaccaaggtgagcgccagcaccgtgcccaccgacggcagcagcagaaacgaggagacccccgccgcccccacccccgccggcgccaccggcggcagcagcgcctggctggacagcagcagcgagaacagaggcctgggcagcgagctgagcaagcccggcgtgctggccagccaggtggacagccccttcagcggctgcttcgaggacctggccatcagcgccagcaccagcctgggcatgggcccctgccacggccccgaggagaacgagtacaagagcgagggcaccttcggcatccacgtggccgagaaccccagcatccagctgctggagggcaaccccggcccccccgccgaccccgacggcggccccagaccccaggccgacagaaagttccaggagagagaggtgccctgccacagacccagccccggcgccctgtggctgcaggtggccgtgaccggcgtgctggtggtgaccctgctggtggtgctgtacagaagaagactgcactag

SEQ ID NO: 82187 - protein, 455 aa, Artificial Sequence
  derived and/or modified sequence
MKSQGQHWYSSSDKNCKVSFREKLLIIDSNLGVQDVENLKFLCIGLVPNKKLEKSSSASDVFEHLLAEDLLSEEDPFFLAELLYIIRQKKLLQHLNCTKEEVERLLPTRQRVSLFRNLLYELSEGIDSENLKDMIFLLKDSLPKTEMTSLSFLAFLEKQGKIDEDNLTCLEDLCKTVVPKLLRNIEKYKREKAIQIVTPPVDKEAESYQGEEELVSQTDVKTFLEALPQESWQNKHAGSNEILSHVFQWLGFTVHIHNNVTKVEMEMVLQKQKCNPAHADGDCFVFCILTHGRFGAVYSSDEALIPIREIMSHFTALQCPRLAEKPKLFFIQACQGEEIQPSVSIEADALNPEQAPTSLQDSIPAEADFLLGLATVPGYVSFRHVEEGSWYIQSLCNHLKKLVPRHEDILSILTAVNDDVSRRVDKQGTKKQMPQPAFTLRKKLVFPVPLDALSL

SEQ ID NO: 82188 - DNA, 1368 bp, Artificial Sequence
  derived and/or modified sequence
atgaagagccagggccagcactggtatagttcttccgacaaaaactgcaaagtttcatttcgcgagaaactgttgatcatagactccaacttaggagtgcaggatgttgaaaatttgaagtttttgtgtattgggttggtgcctaataaaaaacttgaaaaatccagttccgcttcagacgtctttgagcacctccttgcagaggacctgcttagcgaggaggatcctttctttttggccgagttgctctacattatccgacagaaaaaactgctccaacacctaaattgcacaaaggaggaggtggagcggctgctgccaacaagacagagagtgtccctattccgaaacctgctatacgagctctcagagggaatagattccgagaacctgaaagacatgatattcctcctcaaggatagcctcccgaagaccgagatgacgtcactttcgttcctggctttcctggaaaaacagggaaagatcgatgaagataacctgacctgtctggaggacctgtgcaaaacagtggtacccaagctattgcggaacattgagaaatataagcgagaaaaggctattcagatcgttaccccacccgtggataaagaagctgagagttatcaaggtgaggaggagctggtcagtcaaactgacgtcaaaacatttctagaggccctgccccaggaaagctggcaaaataaacacgccggcagcaatgaaattttgtctcacgtctttcagtggctcggattcactgtccacattcacaacaatgtaactaaggtcgagatggaaatggttttacagaagcagaaatgcaaccccgctcacgcagatggggattgtttcgtgttctgtattcttacccacggcaggttcggtgctgtctacagctccgatgaggccctgatcccaatccgagaaataatgtcccacttcaccgctctgcagtgccctcgcctggccgagaagccaaagctgttttttatccaggcttgccaaggcgaagaaatccagcctagcgtgtccattgaggctgatgctttgaatcctgagcaagcacccacttctctgcaggatagcatcccagccgaggccgacttcttgcttggcctagccactgtcccagggtacgtgtctttcaggcacgtcgaagaggggtcctggtacatccagagtctgtgtaaccacctgaagaagcttgtgccccgccacgaagacatactgtccatcctcacggccgtcaatgatgacgttagtcgacgtgtcgataagcaggggacaaaaaaacagatgccgcagcctgcattcaccctgcgaaagaaactggtgttccctgtgccgctggatgctctgagtctgtag

SEQ ID NO: 82189 - DNA, 1368 bp, Artificial Sequence
  derived and/or modified sequence
atgaagagccagggccagcactggtacagcagcagtgacaagaactgcaaggtgtccttccgggagaagctgctgatcatcgacagcaacctgggcgtgcaggatgtggagaacctgaagttcctgtgcatcggcctggtgcccaacaagaagctggagaagagcagcagcgccagtgatgtgtttgagcacctgctggccgaggacctgctgtctgaggaggaccccttcttcctggccgagctgctgtacatcatccggcagaagaagctgctgcagcacctgaactgcaccaaggaggaggtggagcggctgctgcccacccggcagagggtgtccctcttcaggaacctgctgtatgagctgtctgagggcatcgacagcgagaacctgaaggacatgatcttcctgctgaaggacagcctgcccaagacagagatgaccagcctgtccttcctggccttcctggagaagcagggcaagattgatgaggacaacctgacctgcctggaggacctgtgcaagacagtggtgcccaagctgctgagaaatattgagaagtacaagcgggagaaggccatccagatcgtgaccccacctgtggacaaggaggccgagagctaccagggcgaggaggagctggtgtcccagacagatgtgaagaccttcctggaggccctgccccaggagagctggcagaacaagcatgctggcagcaatgagatcctgagccacgtgttccagtggctgggcttcaccgtgcacatccacaacaacgtgaccaaggtggagatggagatggtgctgcagaagcagaagtgcaacccagcccatgctgatggagactgctttgtgttctgcatcctgacccacggccgctttggagctgtgtacagcagtgatgaggccctgatccccatccgggagatcatgagccacttcaccgccctgcagtgcccccggctggccgagaagcccaagctgttcttcatccaggcctgccagggcgaggagatccagcccagcgtgtccattgaagcagatgccctgaaccctgagcaggcccccaccagcctgcaggacagcatcccagctgaggccgacttcctgctgggcctggccaccgtgcccggctacgtgtccttccgccacgtggaggagggctcctggtacatccagagcctgtgcaaccacctgaagaagctggtgcccaggcatgaggacatcctgagcatcctgacagctgtgaatgatgatgtgtcccggcgggtggacaagcagggcaccaagaagcagatgccccagcctgccttcaccctgaggaagaagctggtgtttcctgtgcccctggatgccctgagcctgtag

SEQ ID NO: 82190 - DNA, 1368 bp, Artificial Sequence
  derived and/or modified sequence
atgaagagccagggccagcactggtacagcagcagcgacaagaactgtaaagtatcttttagagagaagttacttattatcgacagcaacctgggggttcaggatgtagagaatctgaaattcctatgcattggactcgtgcctaacaagaaattggagaagtcctcatcagccagcgatgtctttgaacatctgttggccgaggatctgctgtccgaggaggatccgttctttttggcagagctcctctacataatccgccagaagaagctgctgcagcacctgaattgtacgaaagaggaggttgagcggttgcttccaacacgccaacgggtcagcttgtttcgtaatcttctatacgagttgagcgaaggcattgattccgaaaacctgaaggatatgatattccttttgaaagatagcctgcccaaaactgagatgactagtctgagcttcctcgccttcttagagaaacagggaaaaattgacgaagataacctgacatgcctggaggatttgtgtaaaaccgtcgtgccaaagttgttgaggaacattgagaagtataagcgcgagaaggccatccagatagtgacccccccagtagacaaggaggcggagtcctaccagggcgaggaagaattggtgtcccagactgacgtgaagacttttctggaggctctgccccaggaatcctggcaaaacaagcacgcagggtcgaacgaaattctgtcccacgtcttccagtggcttgggtttacagtgcacattcataataacgtgaccaaggttgagatggagatggtcctacaaaaacagaagtgtaatccagcccatgccgacggcgactgctttgtattctgtatcttgactcacggccgcttcggcgctgtttattccagtgatgaagccctgatcccaattcgagaaatcatgtctcattttactgctctccaatgccctcgacttgctgaaaaacccaagctgttctttatacaggcctgccagggcgaggagatccagccatcggtgtctattgaggccgatgcacttaacccagaacaggcacccactagcctccaggactctattcctgcggaggccgatttccttttaggtctcgctactgttccaggatatgtgagttttcggcacgtagaggagggatcatggtacattcaatctctttgcaatcatcttaagaaactggtgccccggcacgaggatattctgagtatcctgaccgcagttaatgatgacgtgagcagacgagtggataagcaagggactaagaagcaaatgccccaaccagcctttacattgcgaaagaagctggttttcccagtgccactggatgccttgtctctgtag

SEQ ID NO: 82191 - DNA, 1368 bp, Artificial Sequence
  derived and/or modified sequence
atgaagagtcagggacagcactggtactctagctcggataagaactgcaaagtctccttcagagagaaactgttaataattgactcaaacctgggtgtccaagatgttgagaatctcaaattcttatgtatcggccttgttccgaataaaaaactggaaaagagctcaagcgcaagcgatgtgttcgagcacctgttggccgaggacttgctttctgaggaggatcccttctttctggccgagcttttgtatatcatacggcagaaaaagctgctgcaacatctcaactgcactaaggaagaggtggagcggctgcttccaaccaggcagagggtgtctctgttccgcaatcttctgtacgaattaagcgaaggaatcgactcagagaatctgaaagatatgatcttcttgcttaaagacagtttgcctaaaacggagatgacctcactgagttttctagcattcctggagaaacagggcaaaatcgacgaagacaacctgacttgcctcgaggacctgtgcaaaacagtggtgccaaagctgttgagaaatatcgaaaagtataaaagggagaaagctattcagattgtgacaccaccggttgacaaagaggccgaatcctatcagggagaagaggaactggtcagccagacagacgttaagacatttctcgaggccctgccccaggagtcatggcagaacaagcatgcgggatctaatgaaatcttgagccacgtgtttcaatggcttggatttacagtgcacattcacaacaatgtcaccaaggtggaaatggagatggtactgcaaaaacagaaatgtaaccccgctcatgctgatggcgactgctttgtcttctgtatattaacccacggcaggtttggagctgtgtattctagtgatgaggcgctgatccccattcgggagataatgtcccattttactgccctccaatgccctagactagccgaaaagcccaagctcttcttcatccaagcttgccagggggaagagattcaaccatccgtgagcatcgaagctgacgctcttaaccccgagcaggctcccacctccctgcaggactccatacctgccgaagctgattttttgctgggccttgctaccgtgcctggttatgtatcatttcggcacgtcgaagaggggtcttggtacatccagtccctgtgcaaccacttgaaaaaactcgtcccccgacacgaggacatactatccatcctcactgcggtgaatgatgacgtcagccggagggtcgacaaacagggcacaaagaagcagatgccccagcctgccttcacacttcgaaaaaaacttgtgttcccagtgccactagatgctttatcactgtag

SEQ ID NO: 82192 - DNA, 1521 bp, Artificial Sequence
  derived and/or modified sequence
ggagcttctttggaccttggagcacacagaggattctactttctttaaaactttgttttcaggcaatttccctgagaaccgtttacttccagaagattggtggagcttgatctgaaggctggccatgaaatctcaaggtcaacattggtattccagttcagataaaaactgtaaagtgagctttcgtgagaagcttctgattattgattcaaacctgggggtccaagatgtggagaacctcaagtttctctgcataggattggtccccaacaagaagctggagaagtccagctcagcctcagatgtttttgaacatctcttggcagaggatctgctgagtgaggaagaccctttcttcctggcagaactcctctatatcatacggcagaagaagctgctgcagcacctcaactgtaccaaagaggaagtggagcgactgctgcccacccgacaaagggtttctctgtttagaaacctgctctacgaactgtcagaaggcattgactcagagaacttaaaggacatgatcttccttctgaaagactcgcttcccaaaactgaaatgacctccctaagtttcctggcatttctagagaaacaaggtaaaatagatgaagataatctgacatgcctggaggacctctgcaaaacagttgtacctaaacttttgagaaacatagagaaatacaaaagagagaaagctatccagatagtgacacctcctgtagacaaggaagccgagtcgtatcaaggagaggaagaactagtttcccaaacagatgttaagacattcttggaagccttaccgcaggagtcctggcaaaataagcatgcaggtagtaatgagatcctgagtcatgtgttccagtggcttgggttcacagtgcatatacacaataatgtgacgaaagtggaaatggagatggtcctgcagaagcagaagtgcaatccagcccatgccgacggggactgcttcgtgttctgtattctgacccatgggagatttggagctgtctactcttcggatgaggccctcattcccattcgggagatcatgtctcacttcacagccctgcagtgccctagactggctgaaaaacctaaactctttttcatccaggcctgccaaggtgaagagatacagccttccgtatccatcgaagcagatgctctgaaccctgagcaggcacccacttccctgcaggacagtattcctgccgaggctgacttcctacttggtctggccactgtcccaggctatgtatcctttcggcatgtggaggaaggcagctggtatattcagtctctgtgtaatcatctgaagaaattggtcccaagacatgaagacatcttatccatcctcactgctgtcaacgatgatgtgagtcgaagagtggacaaacagggaacaaagaaacagatgccccagcctgctttcacactaaggaaaaaactagtattccctgtgcccctggatgcactttcattatagcagagagtttttgttggttcttagacctc

SEQ ID NO: 82193 - DNA, 1368 bp, Artificial Sequence
  derived and/or modified sequence
atgaagagccagggccagcactggtacagcagcagcgacaagaactgcaaggtgagcttcagagagaagctgctgatcatcgacagcaacctgggcgtgcaggacgtggagaacctgaagttcctgtgcatcggcctggtgcccaacaagaagctggagaagagcagcagcgccagcgacgtgttcgagcacctgctggccgaggacctgctgagcgaggaggaccccttcttcctggccgagctgctgtacatcatcagacagaagaagctgctgcagcacctgaactgcaccaaggaggaggtggagagactgctgcccaccagacagagagtgagcctgttcagaaacctgctgtacgagctgagcgagggcatcgacagcgagaacctgaaggacatgatcttcctgctgaaggacagcctgcccaagaccgagatgaccagcctgagcttcctggccttcctggagaagcagggcaagatcgacgaggacaacctgacctgcctggaggacctgtgcaagaccgtggtgcccaagctgctgagaaacatcgagaagtacaagagagagaaggccatccagatcgtgaccccccccgtggacaaggaggccgagagctaccagggcgaggaggagctggtgagccagaccgacgtgaagaccttcctggaggccctgccccaggagagctggcagaacaagcacgccggcagcaacgagatcctgagccacgtgttccagtggctgggcttcaccgtgcacatccacaacaacgtgaccaaggtggagatggagatggtgctgcagaagcagaagtgcaaccccgcccacgccgacggcgactgcttcgtgttctgcatcctgacccacggcagattcggcgccgtgtacagcagcgacgaggccctgatccccatcagagagatcatgagccacttcaccgccctgcagtgccccagactggccgagaagcccaagctgttcttcatccaggcctgccagggcgaggagatccagcccagcgtgagcatcgaggccgacgccctgaaccccgagcaggcccccaccagcctgcaggacagcatccccgccgaggccgacttcctgctgggcctggccaccgtgcccggctacgtgagcttcagacacgtggaggagggcagctggtacatccagagcctgtgcaaccacctgaagaagctggtgcccagacacgaggacatcctgagcatcctgaccgccgtgaacgacgacgtgagcagaagagtggacaagcagggcaccaagaagcagatgccccagcccgccttcaccctgagaaagaagctggtgttccccgtgcccctggacgccctgagcctgtag

SEQ ID NO: 82194 - protein, 637 aa, Artificial Sequence
  derived and/or modified sequence
MSRMLPFLLLLWFLPITEGSQRAEPMFTAVTNSVLPPDYDSNPTQLNYGVAVTDVDHDGDFEIVVAGYNGPNLVLKYDRAQKRLVNIAVDERSSPYYALRDRQGNAIGVTACDIDGDGREEIYFLNTNNAFSGVATYTDKLFKFRNNRWEDILSDEVNVARGVASLFAGRSVACVDRKGSGRYSIYIANYAYGNVGPDALIEMDPEASDLSRGILALRDVAAEAGVSKYTGGRGVSVGPILSSSASDIFCDNENGPNFLFHNRGDGTFVDAAASAGVDDPHQHGRGVALADFNRDGKVDIVYGNWNGPHRLYLQMSTHGKVRFRDIASPKFSMPSPVRTVITADFDNDQELEIFFNNIAYRSSSANRLFRVIRREHGDPLIEELNPGDALEPEGRGTGGVVTDFDGDGMLDLILSHGESMAQPLSVFRGNQGFNNNWLRVVPRTRFGAFARGAKVVLYTKKSGAHLRIIDGGSGYLCEMEPVAHFGLGKDEASSVEVTWPDGKMVSRNVASGEMNSVLEILYPRDEDTLQDPAPLECGQGFSQQENGHCMDTNECIQFPFVCPRDKPVCVNTYGSYRCRTNKKCSRGYEPNEDGTACVAQVAFLGGYSSAASRISEPLSRASYLSLGLGLCLQLYAL

SEQ ID NO: 82195 - protein, 645 aa, Artificial Sequence
  derived and/or modified sequence
MAPSADPGMSRMLPFLLLLWFLPITEGSQRAEPMFTAVTNSVLPPDYDSNPTQLNYGVAVTDVDHDGDFEIVVAGYNGPNLVLKYDRAQKRLVNIAVDERSSPYYALRDRQGNAIGVTACDIDGDGREEIYFLNTNNAFSGVATYTDKLFKFRNNRWEDILSDEVNVARGVASLFAGRSVACVDRKGSGRYSIYIANYAYGNVGPDALIEMDPEASDLSRGILALRDVAAEAGVSKYTGGRGVSVGPILSSSASDIFCDNENGPNFLFHNRGDGTFVDAAASAGVDDPHQHGRGVALADFNRDGKVDIVYGNWNGPHRLYLQMSTHGKVRFRDIASPKFSMPSPVRTVITADFDNDQELEIFFNNIAYRSSSANRLFRVIRREHGDPLIEELNPGDALEPEGRGTGGVVTDFDGDGMLDLILSHGESMAQPLSVFRGNQGFNNNWLRVVPRTRFGAFARGAKVVLYTKKSGAHLRIIDGGSGYLCEMEPVAHFGLGKDEASSVEVTWPDGKMVSRNVASGEMNSVLEILYPRDEDTLQDPAPLECGQGFSQQENGHCMDTNECIQFPFVCPRDKPVCVNTYGSYRCRTNKKCSRGYEPNEDGTACVAQVAFLGGYSSAASRISEPLSRASYLSLGLGLCLQLYAL

SEQ ID NO: 82196 - protein, 524 aa, Artificial Sequence
  derived and/or modified sequence
YALRDRQGNAIGVTACDIDGDGREEIYFLNTNNAFSGVATYTDKLFKFRNNRWEDILSDEVNVARGVASLFAGRSVACVDRKGSGRYSIYIANYAYGNVGPDALIEMDPEASDLSRGILALRDVAAEAGVSKYTGGRGVSVGPILSSSASDIFCDNENGPNFLFHNRGDGTFVDAAASAGVDDPHQHGRGVALADFNRDGKVDIVYGNWNGPHRLYLQMSTHGKVRFRDIASPKFSMPSPVRTVITADFDNDQELEIFFNNIAYRSSSANRLFRVIRREHGDPLIEELNPGDALEPEGRGTGGVVTDFDGDGMLDLILSHGESMAQPLSVFRGNQGFNNNWLRVVPRTRFGAFARGAKVVLYTKKSGAHLRIIDGGSGYLCEMEPVAHFGLGKDEASSVEVTWPDGKMVSRNVASGEMNSVLEILYPRDEDTLQDPAPLETPMNASSSHSCALETSPYVSTPMEATGAGPTRSAVGATSPTRMAQPAWGLSASHRAPAPPPPPLLLPLPLLLPLLELPLLHRSS

SEQ ID NO: 82197 - DNA, 1914 bp, Artificial Sequence
  derived and/or modified sequence
atgtctaggatgctgccctttttactcttactgtggttcctgcccattacagaaggttcacagagagccgagccaatgttcaccgccgtgacaaattcagttctcccccctgattatgatagcaaccccactcagctaaactacggcgtagccgtgaccgacgtagaccatgacggggatttcgaaattgtggtggcaggctacaatgggccaaatctcgtgctcaagtatgatagggctcagaagcgcctggttaacatcgccgtcgatgaacgatcttccccctactacgccctgagagatagacaggggaacgccattggagtcaccgcctgcgatatcgacggagacggcagggaagagatctattttctcaacaccaataacgcttttagcggcgtcgctacctacaccgataagctcttcaaattcaggaacaatcggtgggaggacatcctgtctgacgaggttaacgtggctaggggtgtggccagtttgttcgcgggtcgaagcgtagcatgtgtcgaccgcaagggaagcggaaggtacagcatctatatagcgaactatgcctatggtaacgtgggccctgatgccctgatcgagatggacccagaagccagcgacctgagccggggaatcctagccctaagggatgttgctgctgaagccggtgtgtccaaatacaccgggggacggggtgtgtccgttgggccaatcttgagctcctctgccagcgatatcttctgtgataacgagaacggacctaactttttatttcacaacaggggagacggcacgtttgtggacgctgctgcgagcgcaggcgtcgacgaccctcatcaacatgggcgtggggtggcactcgccgatttcaacagggatggcaaagtagacatcgtgtacgggaattggaacgggcctcaccgattatacctacagatgtccacccatggaaaggttaggtttcgggacattgcgagcccaaaattttctatgccatcccccgtgcgtacggttattacagcagacttcgataacgatcaggaactcgagatcttttttaataacattgcctataggtcttcctccgccaatcgcctttttagggtgattaggcgagagcatggtgacccattgattgaggagctcaatcccggtgatgcgttggaacccgaggggcgaggaacagggggagtagtcactgactttgatggcgatggcatgttggacctgatcctttctcacggggagagcatggcacagcccctgagcgtgttccggggaaatcaggggttcaacaataactggctgcgagtcgtgccccgaactaggtttggcgcattcgccaggggagccaaggtggtcctatacactaagaagtcaggtgcccatctgcgcataatcgacgggggttcgggatacttgtgtgagatggagcccgtggcgcatttcggacttggaaaagatgaagcctctagcgtggaggtaacgtggccggatgggaaaatggtgagtagaaacgttgcaagcggtgaaatgaatagtgtcttggagatactatacccgcgtgacgaagatacactgcaagatccggcacctctcgaatgcgggcaaggatttagccaacaagagaatggccattgcatggacacaaatgagtgcattcagttcccctttgtctgccccagagataagcccgtgtgcgttaatacttacggctcctacaggtgcagaaccaataagaagtgctctcggggatacgagcccaatgaagatgggactgcctgtgtagcgcaggtggccttcttgggcggatatagttccgcggcaagccggatatcagagccacttagtcgggcttcttatctcagccttgggcttggactgtgcttacagttgtacgctctatag

SEQ ID NO: 82198 - DNA, 1938 bp, Artificial Sequence
  derived and/or modified sequence
atggcacctagcgccgatcccggaatgagcagaatgcttccgttcttgctacttctgtggttcctgcccatcacagagggaagtcagcgggctgaacccatgttcacagccgtgactaattctgtgcttccccctgactatgacagcaatccgactcaattaaactacggagtcgccgttaccgacgtcgaccatgatggagacttcgaaatcgtcgtagccggatacaacgggccaaatctggtgcttaagtatgacagagctcagaaacgactagtgaacatcgcagtcgacgagagatcctcgccctattacgccctcagagacagacagggcaatgccatcggcgtgactgcttgcgatattgacggcgatgggagggaagaaatttattttctcaataccaacaacgcttttagcggcgtggccacttacacagacaagctgtttaagttccggaacaacagatgggaagacattctctctgatgaagtcaatgtcgccaggggtgtagctagcttgttcgccggacgtagcgttgcatgcgtggatcgcaagggatcagggaggtactctatatacatcgccaactacgcatacggtaatgtcggaccagatgccctgatcgaaatggaccctgaggcctctgacctgtctcgaggtatattagcccttagagatgtggccgcagaggccggtgtctctaagtatacggggggtcgaggagtctccgttggccctatcctgtcatcatctgcctcagacattttctgcgataacgaaaatgggcctaactttttattccacaacagaggcgacgggactttcgtggatgctgcagctagcgctggagtcgacgaccctcatcaacacggcaggggagttgccctagctgacttcaacagggatggaaaggtagatatagtgtacgggaattggaatggtcctcatcgcttgtacctgcagatgagcacgcatggaaaggtgcggttccgtgacatagcgagtcctaagtttagcatgcctagccctgttaggaccgttattacagccgactttgacaacgaccaggagctggagattttctttaataacatcgcatataggagctccagtgcaaatcggttgttccgagtgattagacgcgagcatggagaccccctgatcgaagaattgaaccccggtgacgccctggaacccgaagggcgtggaaccggtggggttgtcacagacttcgatggggatgggatgctggaccttattctgagtcacggggagtccatggcacaaccgcttagcgtctttcgcggaaatcaagggttcaataacaactggctgcgggttgttccgcgtactcgctttggcgctttcgcaagaggagcgaaggtggtcctctatacgaagaagagcggcgctcatctccggatcatcgatggcggttctgggtatctttgcgagatggaaccggttgctcacttcggattgggaaaagacgaggcttcaagtgtggaagtgacatggccagacggaaagatggtgagcagaaatgtcgcatcaggagagatgaacagcgttcttgaaatcctttaccctcgtgacgaggatacattgcaggatccagcacccctggaatgtggccagggtttctctcaacaggagaacgggcactgcatggacaccaatgaatgcatccaatttccgttcgtgtgccccagagataaacctgtctgcgtaaacacatatggctcatatcggtgccgtactaacaaaaagtgttcgaggggatacgaacctaacgaggacggcaccgcctgtgtggctcaggtggcttttcttggcggatactccagcgcggcttcccgtatcagcgaacccctcagtagagccagctatctcagcctgggactgggattatgtctccagctgtacgccctgtag

SEQ ID NO: 82199 - DNA, 1914 bp, Artificial Sequence
  derived and/or modified sequence
atgagccggatgctgcctttccttttacttctctggttcttgcctataaccgagggttctcagagagcggaaccgatgtttaccgctgttactaatagtgtgctacctccagattacgattccaatcccacccagttgaattatggggttgcagttaccgacgtcgatcacgatggtgattttgaaatcgtggttgcgggatacaatggaccaaaccttgttttaaagtacgacagagctcagaagcgccttgtgaatattgctgtcgatgagcggtcctctccatattatgccctgagagaccgacaggggaacgccataggagtaacagcctgtgatattgatggtgacggcagggaagaaatctacttcttaaatacgaacaacgctttcagtggggtagccacgtataccgataaattgttcaaatttcggaataaccggtgggaagacatactctcggacgaggtcaatgtcgctcgaggtgtggctagcctgtttgccggcaggtctgtggcctgcgtggaccgtaagggctctgggcgctacagcatctacatagccaactatgcctatggaaacgtcgggcctgacgccctcattgaaatggacccagaagcatccgacttgtcccgtgggatcttggcccttcgagacgtggctgcagaggctggggtgtcaaagtacactggaggtcgcggggtgagtgttgggcccatattgagctcctctgcaagcgacatattctgtgataacgaaaacggccctaactttctctttcataatagaggcgatgggacattcgtcgacgctgccgccagcgctggtgttgacgatccacaccaacatggacgaggggttgccttggcagactttaatcgggacggaaaagtggacattgtgtacggcaattggaacggcccacacagactgtatcttcagatgtcaactcacggtaaagtgagatttcgcgatatcgcaagccccaaattctccatgcccagtcctgtgaggacagtgatcacagcagactttgacaacgaccaggaactggaaatctttttcaataatatagcatacagatccagcagtgcgaacaggctattcagagtcatcagacgcgaacacggcgatccgctcatagaagaacttaaccccggagacgcactcgagcccgaaggcaggggcacgggaggcgttgtcaccgacttcgacggcgacggtatgctggatctgattctgagtcatggagagtcaatggcacaacccctgagcgtgtttcggggaaatcagggttttaataataactggctgcgagtggtgcctcgtactcggttcggagctttcgcccggggcgcaaaggtggtgctgtacactaagaaaagcggagcgcatctcaggatcatagatggagggagcggatatctgtgcgaaatggaacctgtggcccacttcgggctaggcaaggatgaagctagctcggtggaggtgacatggcctgacggcaaaatggtgtcaaggaacgtcgctagtggagaaatgaactctgtcctggagattctatatccccgagacgaagacactctccaagatcccgcacccctggaatgtggccagggattctcccagcaagaaaacgggcattgtatggataccaacgagtgcatccaatttcccttcgtgtgccctcgagacaagccagtgtgtgtgaatacatacggctcttataggtgccgaaccaacaagaagtgtagtcgtggctacgaacccaacgaagacggtaccgcctgtgtagctcaggtggcattcctgggcggttactcaagtgcagcgtctagaattagcgagcccttgagccgagccagttatctgtcactgggactgggcctgtgtctccagttgtacgccctgtag

SEQ ID NO: 82200 - DNA, 1938 bp, Artificial Sequence
  derived and/or modified sequence
atggccccatccgcggacccggggatgtcacgcatgctgccctttcttttactattgtggtttctgcctatcaccgagggttcccaacgtgctgagcctatgttcaccgccgtcaccaactccgtgctgccccctgattatgattccaatcctacacagctaaattatggcgtcgctgtgaccgatgtggatcacgacggggatttcgagattgtggttgccggatataatggccctaatttagtactgaagtatgatagagctcagaagcggctagtgaatatcgctgtagatgaacgctcaagcccttactacgccctgcgggatagacaaggtaatgccatcggggtcacagcttgcgacatcgatggcgatggaagagaagagatctatttcctgaacacaaacaatgctttcagtggcgtggccacttatactgataagctgtttaaattcagaaataatagatgggaagatatattgtcggacgaggtaaacgtggccagaggggtggcctctttatttgcaggtcggtcagttgcctgcgttgatcgcaaaggcagcggcagatatagcatctacatagctaactatgcttatggtaacgttggtcccgacgccctcatcgaaatggatccagaagccagcgatctatctcgcggcatcctagctctgcgagacgtggccgccgaggctggtgtcagcaagtacacgggtggcaggggcgtctccgtgggcccaatactgagtagtagcgcaagcgacattttttgtgataatgagaacggcccgaactttctgtttcataaccgcggagatggtacgttcgtggatgctgcagctagcgcaggcgtagacgatcctcaccagcacggccgtggtgtcgctctggcagattttaatcgagatgggaaggtcgatatagtctacgggaactggaacgggcctcacagactttatttgcagatgtccacccacgggaaagtgcgattccgagacatcgcgagtcccaaattctctatgccctccccagtccgcactgtcattacggctgatttcgacaacgatcaggagttagagatattttttaataacattgcataccgatcatccagcgcaaatagactcttccgcgtgatacgacgtgaacacggcgatcctttgatagaagagctgaatccaggagatgccctggagccagagggccggggcaccggcggggttgttaccgacttcgatggcgatgggatgcttgatctgattttaagtcacggcgagtctatggcgcagcccttgtcagtgttcagaggcaatcaggggtttaacaacaactggttgcgggtggtgccaagaacaagatttggggcctttgctcgaggtgcaaaggtggtgctgtacaccaaaaagtcaggcgcacatttgcggataatcgacggcgggtctggatacttgtgcgagatggagccagtagcccacttcggcctcggaaaggacgaagcctcgtcagttgaagttacttggcctgacggtaagatggtctctcggaacgtggctagtggtgagatgaatagtgttctggaaattctgtatccacgggatgaggatactttacaggaccccgcccctctcgaatgtggccaggggtttagtcaacaggagaatggccattgcatggatacaaatgaatgtatccaattcccattcgtgtgtccacgcgataagccggtctgcgttaatacctacggatcctatcgatgccggaccaataagaaatgcagtcgcggctacgaacctaatgaggacgggactgcctgtgttgcacaggtcgccttcttggggggctattcctccgcagccagcaggattagtgaaccgctgtctcgagcatcatatctgtcactgggtctggggctttgcttacaactctatgctctctag

SEQ ID NO: 82201 - DNA, 1914 bp, Artificial Sequence
  derived and/or modified sequence
atgtcaagaatgcttccattcctcctgctgctctggtttctccccatcaccgaaggctctcagcgcgctgaacctatgtttacagcggtgacaaacagcgttctaccacccgattacgacagtaatccaacacagctgaattacggcgtcgcagtgaccgatgtcgatcatgacggagatttcgaaattgtcgttgccggctataacggccccaacttagttctgaaatatgatagagcccagaaaaggttggtgaatatcgcagttgacgagcggtcctctccttactacgccctgagggacagacaaggtaatgccatcggagttacagcctgtgacattgatggagatggaagggaggaaatttactttttaaatactaataacgctttctcaggggtggctacatacacagataaactcttcaaatttcgcaataaccggtgggaagatatcttgtccgatgaagttaacgtcgcccgtggtgtagcctcactctttgctggtcggtctgtggcatgtgtagatagaaagggttcaggtcgttatagtatctatatcgccaactacgcttacggtaacgtcggtcccgacgcactcattgaaatggacccagaagcatccgacttgtcccgtgggatcttggcccttcgagacgtggctgcagaggctggggtgtcaaagtacactggaggtcgcggggtgagtgttgggcccatattgagctcctctgcaagcgacatattctgtgataacgaaaacggccctaactttctctttcataatagaggcgatgggacattcgtcgacgctgccgccagcgctggtgttgacgatccacaccaacatggacgaggggttgccttggcagactttaatcgggacggaaaagtggacattgtgtacggtaattggaatggaccacatcggctctaccttcagatgagtactcatggcaaggtgcgatttcgagacatagcttcccccaagttcagtatgcctagtccggtacgtactgtcattacagccgacttcgacaatgatcaggagctcgaaatcttctttaataatattgcttacaggtcttcaagcgccaatagattatttagggtgattcgtcgcgaacatggtgaccctttaatcgaggaactgaacccgggcgatgctcttgaaccagagggtcggggcaccggaggagtggtgacggatttcgatggcgatggaatgctcgatctgatcttaagtcacggcgaatcaatggcccagcccctctcagtgtttagggggaaccaaggatttaacaataactggctcagagtagtgccaagaacacgatttggcgcatttgcccgtggagcaaaggtagtattgtacacaaagaaatcgggagcacacctacgcatcatcgacggaggaagtggctatctctgcgagatggaacctgtcgctcacttcggcctggggaaagacgaagccagctcggtcgaagtgacctggccagatgggaagatggtctcaagaaatgtggcaagtggagaaatgaatagcgtgctcgagatcctctacccccgtgacgaagatactctgcaagaccccgcccctcttgaatgtggccaaggattcagtcagcaggaaaacggacattgtatggacactaacgaatgtatccaattcccctttgtctgcccaagagataagccagtttgtgtcaacacctatgggtcttaccgatgccgcaccaataagaaatgttcgcgtggctatgaaccaaacgaagacggaacagcatgcgtggctcaggttgcctttctcggaggttactccagcgctgcatctaggatatctgaacccctcagccgtgccagttatctttctcttggcttaggcctgtgcttacagctgtacgccctgtag

SEQ ID NO: 82202 - DNA, 1938 bp, Artificial Sequence
  derived and/or modified sequence
atggccccatctgccgaccccggaatgtcacgtatgctgccatttctgctgctcctctggtttctacctatcacggaaggctctcagcgcgccgagccaatgtttactgccgtcacaaattccgtactacctcctgattacgactcaaatcccacacaactgaactacggcgtggctgtcacagatgtcgaccacgatggcgactttgagatcgtggttgctggatataacggtccaaatctggtgctcaaatatgaccgcgcccaaaaaagattggtgaatatagctgtggatgaaaggtccagtccctattatgccttaagggatcgacaggggaatgctatcggagtcaccgcctgcgatatagacggagatggaagagaagaaatttacttcctcaacacgaacaacgcttttagcggtgtggcaacatatactgataaattattcaaatttaggaacaaccgatgggaggatattctaagcgatgaggttaacgtcgcacgaggagtcgcgagcttattcgcaggccggagcgttgcctgcgtagatagaaaagggagcggcagatattctatctatatcgccaattacgcatatggaaacgtaggaccagacgccctgatcgaaatggatccagaagcaagtgacctgtcacgaggcattctcgccctgcgtgatgtggcagcagaagcaggcgtgtcaaagtacacggggggccgtggcgtttccgtgggacctattctgagtagcagcgctagtgacattttttgcgacaacgagaacgggccgaactttttatttcacaataggggtgatggcacattcgttgacgccgccgcttcagctggtgtggatgatccacatcaacacgggagaggagtggcattagctgattttaatcgcgacgggaaagtcgacatcgtgtacggtaactggaacggaccacatcgcctatatctgcagatgtcaactcacggaaaagtccgatttagagacatcgctagcccaaagttttcaatgccatctccagtcaggaccgtgattaccgctgactttgataatgatcaggagcttgagatctttttcaacaatatagcctacagaagtagtagtgccaatcgactgtttagagtgatcagaagggagcacggagacccccttatagaggaactgaatcccggcgacgctctcgaacccgagggaagagggacaggaggtgtcgttaccgatttcgacggggatgggatgctggatttaattttatcacatggagagtcgatggcgcagcccctcagcgtcttccgcggcaatcagggatttaacaacaattggttgcgggtcgtgcctagaaccagattcggggcatttgctcggggtgcgaaggtcgtgctgtacactaaaaagtccggagcacacctaagaattatcgatggggggtcggggtacctgtgcgagatggagcctgtcgcccactttggcctgggaaaagacgaagcatcaagtgttgaagtgacttggcccgacggcaagatggtcagcagaaatgtcgcgtccggtgaaatgaactctgttctggagatcttatacccccgagatgaggacactttgcaggaccctgcacccttagagtgtggacaaggttttagtcagcaggagaatggtcactgcatggatacaaacgaatgtattcagtttcccttcgtgtgtcctagggacaagcccgtatgtgtgaatacctatggcagctaccggtgcagaaccaacaaaaagtgctctcgaggttacgaacccaatgaggacgggaccgcctgtgtagcccaggtcgcatttctcggcggatattcttctgcagcctcccggatttcagagccactgtcccgcgcctcatatctatctcttggtcttgggctctgtctgcagctctacgcactgtag

SEQ ID NO: 82203 - DNA, 1914 bp, Artificial Sequence
  derived and/or modified sequence
atgagcagaatgctgcccttcctgctgctgctgtggttcctgcccatcaccgagggcagccagagagccgagcccatgttcaccgccgtgaccaacagcgtgctgccccccgactacgacagcaaccccacccagctgaactacggcgtggccgtgaccgacgtggaccacgacggcgacttcgagatcgtggtggccggctacaacggccccaacctggtgctgaagtacgacagagcccagaagagactggtgaacatcgccgtggacgagagaagcagcccctactacgccctgagagacagacagggcaacgccatcggcgtgaccgcctgcgacatcgacggcgacggcagagaggagatctacttcctgaacaccaacaacgccttcagcggcgtggccacctacaccgacaagctgttcaagttcagaaacaacagatgggaggacatcctgagcgacgaggtgaacgtggccagaggcgtggccagcctgttcgccggcagaagcgtggcctgcgtggacagaaagggcagcggcagatacagcatctacatcgccaactacgcctacggcaacgtgggccccgacgccctgatcgagatggaccccgaggccagcgacctgagcagaggcatcctggccctgagagacgtggccgccgaggccggcgtgagcaagtacaccggcggcagaggcgtgagcgtgggccccatcctgagcagcagcgccagcgacatcttctgcgacaacgagaacggccccaacttcctgttccacaacagaggcgacggcaccttcgtggacgccgccgccagcgccggcgtggacgacccccaccagcacggcagaggcgtggccctggccgacttcaacagagacggcaaggtggacatcgtgtacggcaactggaacggcccccacagactgtacctgcagatgagcacccacggcaaggtgagattcagagacatcgccagccccaagttcagcatgcccagccccgtgagaaccgtgatcaccgccgacttcgacaacgaccaggagctggagatcttcttcaacaacatcgcctacagaagcagcagcgccaacagactgttcagagtgatcagaagagagcacggcgaccccctgatcgaggagctgaaccccggcgacgccctggagcccgagggcagaggcaccggcggcgtggtgaccgacttcgacggcgacggcatgctggacctgatcctgagccacggcgagagcatggcccagcccctgagcgtgttcagaggcaaccagggcttcaacaacaactggctgagagtggtgcccagaaccagattcggcgccttcgccagaggcgccaaggtggtgctgtacaccaagaagagcggcgcccacctgagaatcatcgacggcggcagcggctacctgtgcgagatggagcccgtggcccacttcggcctgggcaaggacgaggccagcagcgtggaggtgacctggcccgacggcaagatggtgagcagaaacgtggccagcggcgagatgaacagcgtgctggagatcctgtaccccagagacgaggacaccctgcaggaccccgcccccctggagtgcggccagggcttcagccagcaggagaacggccactgcatggacaccaacgagtgcatccagttccccttcgtgtgccccagagacaagcccgtgtgcgtgaacacctacggcagctacagatgcagaaccaacaagaagtgcagcagaggctacgagcccaacgaggacggcaccgcctgcgtggcccaggtggccttcctgggcggctacagcagcgccgccagcagaatcagcgagcccctgagcagagccagctacctgagcctgggcctgggcctgtgcctgcagctgtacgccctgtag

SEQ ID NO: 82204 - DNA, 1946 bp, Artificial Sequence
  derived and/or modified sequence
atgtccaggatgttaccgttcctgctgctgctctggtttctgcccatcactgaggggtcccagcgggctgaacccatgttcactgcagtcaccaactcagttctgcctcctgactatgacagtaatcccacccagctcaactatggtgtggcagttactgatgtggaccatgatggggactttgagatcgtcgtggcggggtacaatggacccaacctggttctgaagtatgaccgggcccagaagcggctggtgaacatcgcggtcgatgagcgcagctcaccctactacgcgctgcgggaccggcaggggaacgccatcggggtcacagcctgcgacatcgacggggacggccgggaggagatctacttcctcaacaccaataatgccttctcgggggtggccacgtacaccgacaagttgttcaagttccgcaataaccggtgggaagacatcctgagcgatgaggtcaacgtggcccgtggtgtggccagcctctttgccggacgctctgtggcctgtgtggacagaaagggctctggacgctactctatctacattgccaattacgcctacggtaatgtgggccctgatgccctcattgaaatggaccctgaggccagtgacctctcccggggcattctggcgctcagagatgtggctgctgaggctggggtcagcaaatatacagggggccgaggcgtcagcgtgggccccatcctcagcagcagtgcctcggatatcttctgcgacaatgagaatgggcctaacttccttttccacaaccggggcgatggcacctttgtggacgctgcggccagtgctggtgtggacgacccccaccagcatgggcgaggtgtcgccctggctgacttcaaccgtgatggcaaagtggacatcgtctatggcaactggaatggcccccaccgcctctatctgcaaatgagcacccatgggaaggtccgcttccgggacatcgcctcacccaagttctccatgccctcccctgtccgcacggtcatcaccgccgactttgacaatgaccaggagctggagatcttcttcaacaacattgcctaccgcagctcctcagccaaccgcctcttccgcgtcatccgtagagagcacggagaccccctcatcgaggagctcaatcccggcgacgccttggagcctgagggccggggcacagggggtgtggtgaccgacttcgacggagacgggatgctggacctcatcttgtcccatggagagtccatggctcagccgctgtccgtcttccggggcaatcagggcttcaacaacaactggctgcgagtggtgccacgcacccggtttggggcctttgccaggggagctaaggtcgtgctctacaccaagaagagtggggcccacctgaggatcatcgacgggggctcaggctacctgtgtgagatggagcccgtggcacactttggcctggggaaggatgaagccagcagtgtggaggtgacgtggccagatggcaagatggtgagccggaacgtggccagcggggagatgaactcagtgctggagatcctctacccccgggatgaggacacacttcaggacccagccccactggagtgtggccaaggattctcccagcaggaaaatggccattgcatggacaccaatgaatgcatccagttcccattcgtgtgccctcgagacaagcccgtatgtgtcaacacctatggaagctacaggtgccggaccaacaagaagtgcagtcggggctacgagcccaacgaggatggcacagcctgcgtggctcaagtggcctttttaggtgggtattcttcagccgcctctagaatctctgagcctctctctcgggcctcatatctttctctaggccttggactttgccttcagttatatgcactttaaatcccatcaataaaggaaaaaacaaaacaaaa

SEQ ID NO: 82205 - DNA, 1938 bp, Artificial Sequence
  derived and/or modified sequence
atggcccccagcgccgaccccggcatgagcagaatgctgcccttcctgctgctgctgtggttcctgcccatcaccgagggcagccagagagccgagcccatgttcaccgccgtgaccaacagcgtgctgccccccgactacgacagcaaccccacccagctgaactacggcgtggccgtgaccgacgtggaccacgacggcgacttcgagatcgtggtggccggctacaacggccccaacctggtgctgaagtacgacagagcccagaagagactggtgaacatcgccgtggacgagagaagcagcccctactacgccctgagagacagacagggcaacgccatcggcgtgaccgcctgcgacatcgacggcgacggcagagaggagatctacttcctgaacaccaacaacgccttcagcggcgtggccacctacaccgacaagctgttcaagttcagaaacaacagatgggaggacatcctgagcgacgaggtgaacgtggccagaggcgtggccagcctgttcgccggcagaagcgtggcctgcgtggacagaaagggcagcggcagatacagcatctacatcgccaactacgcctacggcaacgtgggccccgacgccctgatcgagatggaccccgaggccagcgacctgagcagaggcatcctggccctgagagacgtggccgccgaggccggcgtgagcaagtacaccggcggcagaggcgtgagcgtgggccccatcctgagcagcagcgccagcgacatcttctgcgacaacgagaacggccccaacttcctgttccacaacagaggcgacggcaccttcgtggacgccgccgccagcgccggcgtggacgacccccaccagcacggcagaggcgtggccctggccgacttcaacagagacggcaaggtggacatcgtgtacggcaactggaacggcccccacagactgtacctgcagatgagcacccacggcaaggtgagattcagagacatcgccagccccaagttcagcatgcccagccccgtgagaaccgtgatcaccgccgacttcgacaacgaccaggagctggagatcttcttcaacaacatcgcctacagaagcagcagcgccaacagactgttcagagtgatcagaagagagcacggcgaccccctgatcgaggagctgaaccccggcgacgccctggagcccgagggcagaggcaccggcggcgtggtgaccgacttcgacggcgacggcatgctggacctgatcctgagccacggcgagagcatggcccagcccctgagcgtgttcagaggcaaccagggcttcaacaacaactggctgagagtggtgcccagaaccagattcggcgccttcgccagaggcgccaaggtggtgctgtacaccaagaagagcggcgcccacctgagaatcatcgacggcggcagcggctacctgtgcgagatggagcccgtggcccacttcggcctgggcaaggacgaggccagcagcgtggaggtgacctggcccgacggcaagatggtgagcagaaacgtggccagcggcgagatgaacagcgtgctggagatcctgtaccccagagacgaggacaccctgcaggaccccgcccccctggagtgcggccagggcttcagccagcaggagaacggccactgcatggacaccaacgagtgcatccagttccccttcgtgtgccccagagacaagcccgtgtgcgtgaacacctacggcagctacagatgcagaaccaacaagaagtgcagcagaggctacgagcccaacgaggacggcaccgcctgcgtggcccaggtggccttcctgggcggctacagcagcgccgccagcagaatcagcgagcccctgagcagagccagctacctgagcctgggcctgggcctgtgcctgcagctgtacgccctgtag

SEQ ID NO: 82206 - DNA, 1914 bp, Artificial Sequence
  derived and/or modified sequence
atgagccgaatgttgcctttcctgctcttattgtggtttctgccgattacggaaggcagtcaaagagcggagccaatgtttacagcggttaccaattctgtcctgccccctgattacgatagcaacccaacacagctcaattacggtgtcgctgttacggatgtggatcatgatggcgattttgagattgtggtggcaggttacaatgggcccaatctggtgctcaaatacgatcgagcccagaagcgtctcgttaacatcgccgttgacgagagaagttcaccttattacgcattaagggatcggcaggggaacgccatcggggtaaccgcctgcgacattgacggagatggcagagaggagatctatttcctgaatacaaataacgccttttccggtgtcgccacgtacaccgacaagctgttcaaattccgaaacaatcgatgggaggatattctgtcagacgaggtgaatgtggcaaggggggtggcaagcctgtttgccggtagatcagtggcctgcgtcgacagaaagggcagcggccgctatagtatttacatcgcgaactacgcttatggcaatgtcgggccggacgccctcatagagatggacccagaggcctctgatctatcccgcggtatcttggctctacgggacgttgccgccgaagccggagtctcgaaatacacgggcgggcgcggcgtttctgtgggccctatcttatcatcatccgcttctgacatattttgcgacaacgagaatggtccgaactttttgttccataaccggggtgacgggacattcgtcgacgccgctgcctctgcaggtgtggacgatccacatcagcacggtcgcggtgtggccctggctgactttaacagagacgggaaggtggatattgtgtacggaaactggaatggcccccacaggctttatctgcagatgagcacgcatgggaaggttagattcagggatatcgcttctcccaagttcagcatgccttcccccgtacgcaccgtaatcacagccgacttcgataacgaccaggaactggaaattttctttaacaatatcgcatatcgatcttcctcagccaacaggctgtttcgcgtgataaggagagaacacggtgatccccttatagaggagctcaaccccggcgatgcgttggaacccgaggggcggggtacaggtggagtagtgacagatttcgacggtgacggaatgttagatctgatcctctctcatggtgaaagcatggcccaaccactctcggtgttcaggggaaatcaggggttcaacaacaattggctgagagtggtaccaaggacgcggttcggggccttcgcccgcggcgcgaaagtggtcctgtacacaaagaagagcggggcacatctgaggatcatcgacggtggtagcgggtatttatgcgagatggagcctgtcgcccatttcggactgggcaaagatgaggcctcatctgtggaggtgacatggcccgacggaaaaatggtgtctcgcaatgtggcctctggcgaaatgaactcagtgctcgagatcctctaccccagggacgaagatacacttcaggacccagcaccgcttgagtgtggccaaggcttttcacagcaagagaacggacattgcatggatacgaatgaatgtatccagttcccctttgtgtgtccccgcgataaaccggtatgtgtgaacacctatggctcataccgctgcagaacaaacaaaaaatgttcaaggggatatgaacctaatgaggatggaacagcctgtgtcgcccaagtcgcctttctcggcggttattcctcggcagcctctcgtattagcgagccactcagtcgggcaagctacttatccttggggttgggtctatgcctccagctgtacgctctctag

SEQ ID NO: 82207 - DNA, 1938 bp, Artificial Sequence
  derived and/or modified sequence
atggctccctctgctgaccccggcatgagtagaatgctcccattccttctgctcctgtggtttctgccgataacagagggctctcaacgcgccgaaccgatgttcaccgccgtaaccaacagtgtactcccaccagattatgatagcaatcccactcagcttaactatggggttgctgtgaccgacgttgaccacgacggcgatttcgaaatagttgtggccgggtacaacggacccaacctggtactcaaatatgatcgtgcccagaagagactggttaatattgctgtcgatgaacgtagcagtccctactacgccctcagggaccgccaggggaacgctatcggagttactgcctgcgacatcgatggtgatgggcgtgaagagatctactttctgaacactaataacgcttttagtggcgtcgccacatataccgacaaactctttaagttccgcaataaccggtgggaagatattctttcagacgaagtaaatgtcgcacgcggagttgctagcctgtttgctgggaggagcgtcgcctgtgtggaccgcaagggttccgggagatattcaatttacattgctaactacgcgtatggaaacgtgggtcccgacgcgctaatcgagatggatccagaggcatcggatctgtctcggggtatactggcactgagggatgttgccgctgaggctggtgtcagtaagtataccggtggccgtggagtctccgtgggacccatcctgtcttcatctgcctctgacattttttgcgacaatgaaaacggacccaactttctcttccacaatcgcggcgatggcacattcgtcgacgcggcggcctccgcaggggtcgacgaccctcatcaacacggccgcggggtggcgctggccgatttcaatcgtgacggaaaggtggacatcgtttacggaaattggaatgggccccaccgactgtatctccagatgtccacgcatggcaaggtccgatttagggacatagcttcgcccaaattttctatgcccagccccgtccggaccgtcattacagcggattttgataacgaccaggaactggagattttttttaataacatcgcttataggagttcctcggcaaataggttgttccgggttatcaggcgagagcatggcgatcctctgatcgaggaattgaatcccggtgatgctctggagccagaaggcaggggtacaggtggggtggtaacagatttcgacggcgacggcatgctcgatctcattctgtcccacggcgagagcatggcacagcccctcagtgtatttagaggaaaccagggcttcaacaataattggctgagagtggtgcctcggacgcgctttggggctttcgcgaggggagctaaggtggtcctgtacacaaagaaatctggggcacacctccgcatcatcgacggcggatccggatacctatgcgaaatggaacctgttgctcacttcggactgggtaaagacgaggcttcaagtgtggaagttacctggccagatgggaagatggtttccagaaacgtcgccagtggcgagatgaattctgtgttggagatcctttatcctagggacgaagacacccttcaggatccggctcctctcgagtgcggccaaggattcagtcagcaggagaacggccactgtatggacaccaacgaatgtatacagttcccgttcgtttgtccccgggataagccggtctgcgtgaatacctatggatcttatagatgccgtacaaacaaaaagtgttcccgcggatacgagccaaatgaggacggcaccgcatgtgtggcacaagtcgcattcctcggcggatatagctctgccgcatcgagaatcagtgaacccctctctcgggcttcatatctctctctaggtctcgggctatgtcttcagctgtatgccctatag

SEQ ID NO: 82208 - DNA, 1914 bp, Artificial Sequence
  derived and/or modified sequence
atgagcaggatgctgcccttcctgctgctgctgtggttcctgcccatcacagagggcagccagagagctgagcccatgttcaccgctgtgaccaacagcgtgctgcccccagactatgacagcaaccccacccagctgaactacggcgtggccgtgacagatgtggaccatgatggagactttgaaattgtggtggccggctacaacggccccaacctggtgctgaagtatgaccgggcccagaagaggctggtgaacattgctgtggatgagaggagcagcccctactatgccctgcgggaccggcagggcaatgccatcggcgtgacagcctgtgacattgatggagatggccgggaggagatctacttcctgaacaccaacaatgccttcagcggcgtggccacctacacagacaagctgttcaagttcaggaacaaccgctgggaggacatcctgagtgatgaggtgaatgtggcccggggcgtggccagcctgtttgctggccgctctgtggcctgtgtggacaggaagggcagcggccgctacagcatctacatcgccaactatgcctatggaaatgtgggcccagatgccctgattgagatggaccctgaggccagtgacctgagccggggcatcctggccctgagagatgtggccgctgaggccggcgtgtccaagtacacaggaggccggggcgtgtctgtgggccccatcctgagcagcagcgccagtgacatcttctgtgacaatgaaaatggccccaacttcctgttccacaacagaggagatggcacctttgtggatgctgctgccagcgctggggtggatgacccccaccagcacggccggggcgtggccctggccgacttcaacagagatggcaaggtggacatcgtgtatggcaactggaatggcccccaccggctgtacctgcagatgagcacccacggcaaggtgcgcttccgggacatcgccagccccaagttctccatgcccagccctgtgaggacagtcatcacagctgactttgacaatgaccaggagctggagatcttcttcaacaacatcgcctaccgcagcagcagcgccaacagactcttccgggtcatcagaagagagcacggggaccccctgattgaggagctgaaccctggagatgccctggagcctgagggccggggcactggaggagtggtgacagactttgatggagatggcatgctggacctgatcctgagccacggggagagcatggcccagcccctgtctgtgttccggggcaaccagggcttcaacaacaactggctgcgggtggtgcccaggaccaggtttggagcctttgcccggggggccaaggtggtgctgtacaccaagaagagcggggcccacctgcgcatcattgatggcggcagcggctacctgtgtgagatggagcctgtggcccacttcggcctgggcaaggatgaggccagctctgtggaggtgacctggccagatggcaagatggtgtccagaaatgtggccagcggggagatgaacagcgtgctggagatcctgtaccccagagatgaggacaccctgcaggaccctgcccccctggagtgtggccagggcttcagccagcaggagaatggccactgcatggacaccaatgaatgcatccagttcccctttgtgtgcccccgggacaagcctgtgtgtgtgaacacctacggcagctaccgctgcaggaccaacaagaagtgcagccggggctatgagcccaatgaagatggaacagcctgtgtggcccaggtggccttcctgggcggctacagcagcgctgccagccgcatcagcgagcccctgagccgggccagctacctgagcctgggcctgggcctgtgcctgcagctgtatgccctgtag

SEQ ID NO: 82209 - DNA, 2294 bp, Artificial Sequence
  derived and/or modified sequence
ctggctgccggctgctgccaccgcaatcccggctcctaaatcagcgcggggaggcgctccctccccacgcccggctctccgggctctcggggccgcgattggccgcgccggcgccccccaccccgggcccccggctccagctgccgcgccattggctgcgggcctccgccagcctttacataagaccgggcgcgctcgagtggagttgtataaagcgagcgcgcggcgtcggggcgggaggctcgaggccagcccgggaccggggctgggagcaagcaggcggcggcgccggcggcagaggcggcagcgagcgcccgcttcccacgcccctaggcggcggggccgagagcgggaggatggctccgagcgctgaccccggcatgtccaggatgttaccgttcctgctgctgctctggtttctgcccatcactgaggggtcccagcgggctgaacccatgttcactgcagtcaccaactcagttctgcctcctgactatgacagtaatcccacccagctcaactatggtgtggcagttactgatgtggaccatgatggggactttgagatcgtcgtggcggggtacaatggacccaacctggttctgaagtatgaccgggcccagaagcggctggtgaacatcgcggtcgatgagcgcagctcaccctactacgcgctgcgggaccggcaggggaacgccatcggggtcacagcctgcgacatcgacggggacggccgggaggagatctacttcctcaacaccaataatgccttctcgggggtggccacgtacaccgacaagttgttcaagttccgcaataaccggtgggaagacatcctgagcgatgaggtcaacgtggcccgtggtgtggccagcctctttgccggacgctctgtggcctgtgtggacagaaagggctctggacgctactctatctacattgccaattacgcctacggtaatgtgggccctgatgccctcattgaaatggaccctgaggccagtgacctctcccggggcattctggcgctcagagatgtggctgctgaggctggggtcagcaaatatacagggggccgaggcgtcagcgtgggccccatcctcagcagcagtgcctcggatatcttctgcgacaatgagaatgggcctaacttccttttccacaaccggggcgatggcacctttgtggacgctgcggccagtgctggtgtggacgacccccaccagcatgggcgaggtgtcgccctggctgacttcaaccgtgatggcaaagtggacatcgtctatggcaactggaatggcccccaccgcctctatctgcaaatgagcacccatgggaaggtccgcttccgggacatcgcctcacccaagttctccatgccctcccctgtccgcacggtcatcaccgccgactttgacaatgaccaggagctggagatcttcttcaacaacattgcctaccgcagctcctcagccaaccgcctcttccgcgtcatccgtagagagcacggagaccccctcatcgaggagctcaatcccggcgacgccttggagcctgagggccggggcacagggggtgtggtgaccgacttcgacggagacgggatgctggacctcatcttgtcccatggagagtccatggctcagccgctgtccgtcttccggggcaatcagggcttcaacaacaactggctgcgagtggtgccacgcacccggtttggggcctttgccaggggagctaaggtcgtgctctacaccaagaagagtggggcccacctgaggatcatcgacgggggctcaggctacctgtgtgagatggagcccgtggcacactttggcctggggaaggatgaagccagcagtgtggaggtgacgtggccagatggcaagatggtgagccggaacgtggccagcggggagatgaactcagtgctggagatcctctacccccgggatgaggacacacttcaggacccagccccactggagtgtggccaaggattctcccagcaggaaaatggccattgcatggacaccaatgaatgcatccagttcccattcgtgtgccctcgagacaagcccgtatgtgtcaacacctatggaagctacaggtgccggaccaacaagaagtgcagtcggggctacgagcccaacgaggatggcacagcctgcgtggctcaagtggcctttttaggtgggtattcttcagccgcctctagaatctctgagcctctctctcgggcctcatatctttctctaggccttggactttgccttcagttatatgcactttaa

SEQ ID NO: 82210 - DNA, 1938 bp, Artificial Sequence
  derived and/or modified sequence
atggcccccagcgctgaccccggcatgagcaggatgctgcccttcctgctgctgctgtggttcctgcccatcacagagggcagccagagagctgagcccatgttcaccgctgtgaccaacagcgtgctgcccccagactatgacagcaaccccacccagctgaactacggcgtggccgtgacagatgtggaccatgatggagactttgaaattgtggtggccggctacaacggccccaacctggtgctgaagtatgaccgggcccagaagaggctggtgaacattgctgtggatgagaggagcagcccctactatgccctgcgggaccggcagggcaatgccatcggcgtgacagcctgtgacattgatggagatggccgggaggagatctacttcctgaacaccaacaatgccttcagcggcgtggccacctacacagacaagctgttcaagttcaggaacaaccgctgggaggacatcctgagtgatgaggtgaatgtggcccggggcgtggccagcctgtttgctggccgctctgtggcctgtgtggacaggaagggcagcggccgctacagcatctacatcgccaactatgcctatggaaatgtgggcccagatgccctgattgagatggaccctgaggccagtgacctgagccggggcatcctggccctgagagatgtggccgctgaggccggcgtgtccaagtacacaggaggccggggcgtgtctgtgggccccatcctgagcagcagcgccagtgacatcttctgtgacaatgaaaatggccccaacttcctgttccacaacagaggagatggcacctttgtggatgctgctgccagcgctggggtggatgacccccaccagcacggccggggcgtggccctggccgacttcaacagagatggcaaggtggacatcgtgtatggcaactggaatggcccccaccggctgtacctgcagatgagcacccacggcaaggtgcgcttccgggacatcgccagccccaagttctccatgcccagccctgtgaggacagtcatcacagctgactttgacaatgaccaggagctggagatcttcttcaacaacatcgcctaccgcagcagcagcgccaacagactcttccgggtcatcagaagagagcacggggaccccctgattgaggagctgaaccctggagatgccctggagcctgagggccggggcactggaggagtggtgacagactttgatggagatggcatgctggacctgatcctgagccacggggagagcatggcccagcccctgtctgtgttccggggcaaccagggcttcaacaacaactggctgcgggtggtgcccaggaccaggtttggagcctttgcccggggggccaaggtggtgctgtacaccaagaagagcggggcccacctgcgcatcattgatggcggcagcggctacctgtgtgagatggagcctgtggcccacttcggcctgggcaaggatgaggccagctctgtggaggtgacctggccagatggcaagatggtgtccagaaatgtggccagcggggagatgaacagcgtgctggagatcctgtaccccagagatgaggacaccctgcaggaccctgcccccctggagtgtggccagggcttcagccagcaggagaatggccactgcatggacaccaatgaatgcatccagttcccctttgtgtgcccccgggacaagcctgtgtgtgtgaacacctacggcagctaccgctgcaggaccaacaagaagtgcagccggggctatgagcccaatgaagatggaacagcctgtgtggcccaggtggccttcctgggcggctacagcagcgctgccagccgcatcagcgagcccctgagccgggccagctacctgagcctgggcctgggcctgtgcctgcagctgtatgccctgtag

SEQ ID NO: 82211 - DNA, 1914 bp, Artificial Sequence
  derived and/or modified sequence
atgagccggatgctgcccttcctgctgctgctgtggttcctgcccattacggaggggtctcaacgcgctgagcctatgtttaccgccgtgaccaactccgtgctgcctcccgactacgattctaacccaacccagctcaactatggcgtcgctgtcaccgatgttgatcacgacggtgatttcgagatcgttgttgccgggtacaatggccccaatttggtgttaaaatatgatcgtgcccagaagagactcgttaatatcgctgtggacgaaaggtcctccccctattatgcactgagggaccgtcaggggaacgctattggagttacggcatgcgacattgacggagatgggcgcgaggagatctactttctcaatacaaataatgcgttctctggcgtggccacctatactgacaaactatttaaattccgtaacaatcggtgggaggacatcctgtccgatgaagtgaacgtggcgaggggcgtcgcgagcctcttcgccggtcgatcggttgcatgcgttgaccggaagggtagcggaaggtattccatctacatagcaaattacgcctatggcaatgtcggtccagacgccttgatcgagatggaccctgaagcctctgacctgtctcgtgggatcctggctctgcgggatgtggccgcggaggcaggcgtgtctaagtatacaggagggcgcggggtgtccgttggacctatcctttcctccagcgcctctgacatattctgcgacaatgagaatgggccaaatttcctcttccacaaccggggggacgggacctttgtcgatgccgccgccagcgctggcgtcgatgatcctcaccagcatggacggggtgtcgcactagcggattttaaccgggatggtaaggtggacattgtgtacggaaattggaacgggccacacagactgtacctccaaatgtccacccacggtaaagtcagattccgcgacatcgcttcaccgaaattttccatgcccagccccgttcgtacagttataaccgcagatttcgataacgatcaggaacttgagatttttttcaacaacattgcctaccgctcatcttctgccaataggctgtttagagtgatcagacgggaacacggcgatccactcattgaggagcttaaccccggagacgcactggagcccgaaggccgcggtactgggggcgtggtgacggactttgacggggacgggatgctggatctgatcctttctcatggagaatcgatggcacaaccacttagcgtctttaggggcaaccagggctttaacaacaactggttgcgggtggtcccccgcacacgcttcggagcgttcgctagaggcgcgaaggttgtcctgtacacaaaaaaaagcggagcccacctgcggatcattgatggtggttctggctatctatgcgagatggagccagtggcccacttcggcctggggaaagatgaggcttcctctgtagaggttacctggcccgatggcaagatggtgtctagaaatgtggcaagtggcgagatgaattccgtattggaaattttatatcctcgggatgaggacactctgcaggatcctgcaccattagagtgcggccaggggttttcccagcaggaaaacggtcattgcatggatactaatgagtgcattcagtttccatttgtgtgtccgcgcgataagcccgtgtgcgtaaacacctacggatcttaccggtgcaggactaacaagaagtgcagccgggggtatgaacccaacgaagacggcaccgcctgtgttgcccaagtcgcctttcttgggggatactcttcagccgcctcacgcatctccgaaccgctgtcgagggcttcctacctttccctaggactcggcctgtgcttgcagttgtatgccctttag

SEQ ID NO: 82212 - DNA, 1938 bp, Artificial Sequence
  derived and/or modified sequence
atggcccccagcgccgaccccggcatgagccggatgctgcccttcctgctgttgctgtggtttttacccatcaccgaggggtctcagagggccgaaccaatgtttactgccgtgaccaactcggtgctcccccctgattatgacagcaatcccactcaactcaactacggggtggccgtgaccgacgtagatcacgacggcgactttgaaatcgttgtggccggttacaatggccccaacctcgtgttgaaatacgatagagcccaaaagcgcctcgtgaacatcgcggtagatgagcggtccagcccttactacgccttgcgcgatagacagggcaatgcgattggagtgactgcgtgcgacatcgatggggatggccgggaagagatctacttcctgaatactaacaacgccttctcaggagtggctacttatacagataaattgttcaaattccggaacaatcgctgggaagacatcctgtcggatgaggttaacgttgctcggggcgtcgcctcactcttcgccggaaggtccgtggcatgtgtggatcgcaagggtagtggccgatactcgatctatattgccaactacgcttatggaaatgtgggtccagatgcccttattgagatggatcccgaggcatctgatctttccagggggattttagctctgcgcgatgtggcggctgaggctggcgtaagcaaatatacgggaggacgaggcgtctcagtcggtcctatcctgtcttcctctgcctcggacatcttttgtgacaacgaaaatgggccgaacttcctgtttcataatcggggtgacgggacgtttgtcgacgccgccgcctcagctggagtagacgatccacaccagcatggcagaggtgtggctctggcagattttaaccgtgacggcaaggtcgatatcgtgtatggtaattggaacggaccccacaggctgtatttacagatgagtacacatggaaaggtaagattccgcgatatagccagtcctaagttttcgatgccctcaccggtgcggactgtcattacggccgactttgacaatgaccaagaacttgaaatcttcttcaacaatatcgcatatagaagctctagcgcaaacaggctatttcgggtgatacgcagggagcacggtgatcctcttattgaagaactgaatcctggggatgcattggagcctgagggccggggaaccggcggagtggttactgactttgacggtgacggaatgcttgatctcattctctcccatggggaatccatggcccaacccctgtcagtgttccgcggcaaccagggcttcaataacaattggctccgggtagttccgaggacccgcttcggcgcctttgccagaggggcaaaggttgtgctgtatacaaaaaaaagtggagcccacctgagaatcatcgacggcgggtccggatatctttgtgagatggaacctgttgcacactttggactgggaaaggatgaagcatcaagtgtggaagtgacttggccagatggaaaaatggtttcacgcaacgtggccagtggagagatgaactccgttctagagattctttacccgcgcgatgaggacaccttgcaggatcccgctcctctggagtgcgggcagggcttttcccaacaggagaacggccactgcatggacactaatgaatgtatccagttcccgtttgtatgtcctagagacaaacccgtgtgcgttaatacatatggtagttaccgatgtcgcactaataaaaaatgctccaggggatacgagccgaacgaggacgggaccgcctgtgtcgctcaggtggcctttctgggcgggtactcatcagcggccagcaggatcagtgagcctttgtcgagagcctcttacttgagtctcgggcttggcctgtgcctgcagctctacgctctctag

SEQ ID NO: 82213 - RNA, 1914 nt, Artificial Sequence
  derived and/or modified sequence
augagccggaugcugccuuuccuuuuacuucucugguucuugccuauaaccgaggguucucagagagcggaaccgauguuuaccgcuguuacuaauagugugcuaccuccagauuacgauuccaaucccacccaguugaauuaugggguugcaguuaccgacgucgaucacgauggugauuuugaaaucgugguugcgggauacaauggaccaaaccuuguuuuaaaguacgacagagcucagaagcgccuugugaauauugcugucgaugagcgguccucuccauauuaugcccugagagaccgacaggggaacgccauaggaguaacagccugugauauugauggugacggcagggaagaaaucuacuucuuaaauacgaacaacgcuuucagugggguagccacguauaccgauaaauuguucaaauuucggaauaaccggugggaagacauacucucggacgaggucaaugucgcucgagguguggcuagccuguuugccggcaggucuguggccugcguggaccguaagggcucugggcgcuacagcaucuacauagccaacuaugccuauggaaacgucgggccugacgcccucauugaaauggacccagaagcauccgacuugucccgugggaucuuggcccuucgagacguggcugcagaggcuggggugucaaaguacacuggaggucgcggggugaguguugggcccauauugagcuccucugcaagcgacauauucugugauaacgaaaacggcccuaacuuucucuuucauaauagaggcgaugggacauucgucgacgcugccgccagcgcugguguugacgauccacaccaacauggacgagggguugccuuggcagacuuuaaucgggacggaaaaguggacauuguguacggcaauuggaacggcccacacagacuguaucuucagaugucaacucacgguaaagugagauuucgcgauaucgcaagccccaaauucuccaugcccaguccugugaggacagugaucacagcagacuuugacaacgaccaggaacuggaaaucuuuuucaauaauauagcauacagauccagcagugcgaacaggcuauucagagucaucagacgcgaacacggcgauccgcucauagaagaacuuaaccccggagacgcacucgagcccgaaggcaggggcacgggaggcguugucaccgacuucgacggcgacgguaugcuggaucugauucugagucauggagagucaauggcacaaccccugagcguguuucggggaaaucaggguuuuaauaauaacuggcugcgaguggugccucguacucgguucggagcuuucgcccggggcgcaaagguggugcuguacacuaagaaaagcggagcgcaucucaggaucauagauggagggagcggauaucugugcgaaauggaaccuguggcccacuucgggcuaggcaaggaugaagcuagcucgguggaggugacauggccugacggcaaaauggugucaaggaacgucgcuaguggagaaaugaacucuguccuggagauucuauauccccgagacgaagacacucuccaagaucccgcaccccuggaauguggccagggauucucccagcaagaaaacgggcauuguauggauaccaacgagugcauccaauuucccuucgugugcccucgagacaagccagugugugugaauacauacggcucuuauaggugccgaaccaacaagaaguguagucguggcuacgaacccaacgaagacgguaccgccuguguagcucagguggcauuccugggcgguuacucaagugcagcgucuagaauuagcgagcccuugagccgagccaguuaucugucacugggacugggccugugucuccaguuguacgcccuguag

SEQ ID NO: 82214 - RNA, 1938 nt, Artificial Sequence
  derived and/or modified sequence
auggccccauccgcggacccggggaugucacgcaugcugcccuuucuuuuacuauugugguuucugccuaucaccgaggguucccaacgugcugagccuauguucaccgccgucaccaacuccgugcugcccccugauuaugauuccaauccuacacagcuaaauuauggcgucgcugugaccgauguggaucacgacggggauuucgagauugugguugccggauauaauggcccuaauuuaguacugaaguaugauagagcucagaagcggcuagugaauaucgcuguagaugaacgcucaagcccuuacuacgcccugcgggauagacaagguaaugccaucggggucacagcuugcgacaucgauggcgauggaagagaagagaucuauuuccugaacacaaacaaugcuuucaguggcguggccacuuauacugauaagcuguuuaaauucagaaauaauagaugggaagauauauugucggacgagguaaacguggccagagggguggccucuuuauuugcaggucggucaguugccugcguugaucgcaaaggcagcggcagauauagcaucuacauagcuaacuaugcuuaugguaacguuggucccgacgcccucaucgaaauggauccagaagccagcgaucuaucucgcggcauccuagcucugcgagacguggccgccgaggcuggugucagcaaguacacggguggcaggggcgucuccgugggcccaauacugaguaguagcgcaagcgacauuuuuugugauaaugagaacggcccgaacuuucuguuucauaaccgcggagaugguacguucguggaugcugcagcuagcgcaggcguagacgauccucaccagcacggccguggugucgcucuggcagauuuuaaucgagaugggaaggucgauauagucuacgggaacuggaacgggccucacagacuuuauuugcagauguccacccacgggaaagugcgauuccgagacaucgcgagucccaaauucucuaugcccuccccaguccgcacugucauuacggcugauuucgacaacgaucaggaguuagagauauuuuuuaauaacauugcauaccgaucauccagcgcaaauagacucuuccgcgugauacgacgugaacacggcgauccuuugauagaagagcugaauccaggagaugcccuggagccagagggccggggcaccggcgggguuguuaccgacuucgauggcgaugggaugcuugaucugauuuuaagucacggcgagucuauggcgcagcccuugucaguguucagaggcaaucagggguuuaacaacaacugguugcggguggugccaagaacaagauuuggggccuuugcucgaggugcaaagguggugcuguacaccaaaaagucaggcgcacauuugcggauaaucgacggcgggucuggauacuugugcgagauggagccaguagcccacuucggccucggaaaggacgaagccucgucaguugaaguuacuuggccugacgguaagauggucucucggaacguggcuaguggugagaugaauaguguucuggaaauucuguauccacgggaugaggauacuuuacaggaccccgccccucucgaauguggccagggguuuagucaacaggagaauggccauugcauggauacaaaugaauguauccaauucccauucguguguccacgcgauaagccggucugcguuaauaccuacggauccuaucgaugccggaccaauaagaaaugcagucgcggcuacgaaccuaaugaggacgggacugccuguguugcacaggucgccuucuuggggggcuauuccuccgcagccagcaggauuagugaaccgcugucucgagcaucauaucugucacugggucuggggcuuugcuuacaacucuaugcucucuag

SEQ ID NO: 82215 - RNA, 1914 nt, Artificial Sequence
  derived and/or modified sequence
augucaagaaugcuuccauuccuccugcugcucugguuucuccccaucaccgaaggcucucagcgcgcugaaccuauguuuacagcggugacaaacagcguucuaccacccgauuacgacaguaauccaacacagcugaauuacggcgucgcagugaccgaugucgaucaugacggagauuucgaaauugucguugccggcuauaacggccccaacuuaguucugaaauaugauagagcccagaaaagguuggugaauaucgcaguugacgagcgguccucuccuuacuacgcccugagggacagacaagguaaugccaucggaguuacagccugugacauugauggagauggaagggaggaaauuuacuuuuuaaauacuaauaacgcuuucucagggguggcuacauacacagauaaacucuucaaauuucgcaauaaccggugggaagauaucuuguccgaugaaguuaacgucgcccgugguguagccucacucuuugcuggucggucuguggcauguguagauagaaaggguucaggucguuauaguaucuauaucgccaacuacgcuuacgguaacgucggucccgacgcacucauugaaauggacccagaagcauccgacuugucccgugggaucuuggcccuucgagacguggcugcagaggcuggggugucaaaguacacuggaggucgcggggugaguguugggcccauauugagcuccucugcaagcgacauauucugugauaacgaaaacggcccuaacuuucucuuucauaauagaggcgaugggacauucgucgacgcugccgccagcgcugguguugacgauccacaccaacauggacgagggguugccuuggcagacuuuaaucgggacggaaaaguggacauuguguacgguaauuggaauggaccacaucggcucuaccuucagaugaguacucauggcaaggugcgauuucgagacauagcuucccccaaguucaguaugccuaguccgguacguacugucauuacagccgacuucgacaaugaucaggagcucgaaaucuucuuuaauaauauugcuuacaggucuucaagcgccaauagauuauuuagggugauucgucgcgaacauggugacccuuuaaucgaggaacugaacccgggcgaugcucuugaaccagagggucggggcaccggaggaguggugacggauuucgauggcgauggaaugcucgaucugaucuuaagucacggcgaaucaauggcccagccccucucaguguuuagggggaaccaaggauuuaacaauaacuggcucagaguagugccaagaacacgauuuggcgcauuugcccguggagcaaagguaguauuguacacaaagaaaucgggagcacaccuacgcaucaucgacggaggaaguggcuaucucugcgagauggaaccugucgcucacuucggccuggggaaagacgaagccagcucggucgaagugaccuggccagaugggaagauggucucaagaaauguggcaaguggagaaaugaauagcgugcucgagauccucuacccccgugacgaagauacucugcaagaccccgccccucuugaauguggccaaggauucagucagcaggaaaacggacauuguauggacacuaacgaauguauccaauuccccuuugucugcccaagagauaagccaguuugugucaacaccuaugggucuuaccgaugccgcaccaauaagaaauguucgcguggcuaugaaccaaacgaagacggaacagcaugcguggcucagguugccuuucucggagguuacuccagcgcugcaucuaggauaucugaaccccucagccgugccaguuaucuuucucuuggcuuaggccugugcuuacagcuguacgcccuguag

SEQ ID NO: 82216 - RNA, 1938 nt, Artificial Sequence
  derived and/or modified sequence
auggccccaucugccgaccccggaaugucacguaugcugccauuucugcugcuccucugguuucuaccuaucacggaaggcucucagcgcgccgagccaauguuuacugccgucacaaauuccguacuaccuccugauuacgacucaaaucccacacaacugaacuacggcguggcugucacagaugucgaccacgauggcgacuuugagaucgugguugcuggauauaacgguccaaaucuggugcucaaauaugaccgcgcccaaaaaagauuggugaauauagcuguggaugaaagguccagucccuauuaugccuuaagggaucgacaggggaaugcuaucggagucaccgccugcgauauagacggagauggaagagaagaaauuuacuuccucaacacgaacaacgcuuuuagcgguguggcaacauauacugauaaauuauucaaauuuaggaacaaccgaugggaggauauucuaagcgaugagguuaacgucgcacgaggagucgcgagcuuauucgcaggccggagcguugccugcguagauagaaaagggagcggcagauauucuaucuauaucgccaauuacgcauauggaaacguaggaccagacgcccugaucgaaauggauccagaagcaagugaccugucacgaggcauucucgcccugcgugauguggcagcagaagcaggcgugucaaaguacacggggggccguggcguuuccgugggaccuauucugaguagcagcgcuagugacauuuuuugcgacaacgagaacgggccgaacuuuuuauuucacaauaggggugauggcacauucguugacgccgccgcuucagcugguguggaugauccacaucaacacgggagaggaguggcauuagcugauuuuaaucgcgacgggaaagucgacaucguguacgguaacuggaacggaccacaucgccuauaucugcagaugucaacucacggaaaaguccgauuuagagacaucgcuagcccaaaguuuucaaugccaucuccagucaggaccgugauuaccgcugacuuugauaaugaucaggagcuugagaucuuuuucaacaauauagccuacagaaguaguagugccaaucgacuguuuagagugaucagaagggagcacggagacccccuuauagaggaacugaaucccggcgacgcucucgaacccgagggaagagggacaggaggugucguuaccgauuucgacggggaugggaugcuggauuuaauuuuaucacauggagagucgauggcgcagccccucagcgucuuccgcggcaaucagggauuuaacaacaauugguugcgggucgugccuagaaccagauucggggcauuugcucggggugcgaaggucgugcuguacacuaaaaaguccggagcacaccuaagaauuaucgauggggggucgggguaccugugcgagauggagccugucgcccacuuuggccugggaaaagacgaagcaucaaguguugaagugacuuggcccgacggcaagauggucagcagaaaugucgcguccggugaaaugaacucuguucuggagaucuuauacccccgagaugaggacacuuugcaggacccugcacccuuagaguguggacaagguuuuagucagcaggagaauggucacugcauggauacaaacgaauguauucaguuucccuucguguguccuagggacaagcccguaugugugaauaccuauggcagcuaccggugcagaaccaacaaaaagugcucucgagguuacgaacccaaugaggacgggaccgccuguguagcccaggucgcauuucucggcggauauucuucugcagccucccggauuucagagccacugucccgcgccucauaucuaucucuuggucuugggcucugucugcagcucuacgcacuguag

SEQ ID NO: 82217 - protein, 478 aa, Artificial Sequence
  derived and/or modified sequence
MKSQGQHWYSSSDKNCKVSFREKLLIIDSNLGVQDVENLKFLCIGLVPNKKLEKSSSASDVFEHLLAEDLLSEEDPFFLAELLYIIRQKKLLQHLNCTKEEVERLLPTRQRVSLFRNLLYELSEGIDSENLKDMIFLLKDSLPKTEMTSLSFLAFLEKQGKIDEDNLTCLEDLCKTVVPKLLRNIEKYKREKAIQIVTPPVDKEAESYQGEEELVSQTDVKTFLEALPRAAVYRMNRNHRGLCVIVNNHSFTSLKDRQGTHKDAEILSHVFQWLGFTVHIHNNVTKVEMEMVLQKQKCNPAHADGDCFVFCILTHGRFGAVYSSDEALIPIREIMSHFTALQCPRLAEKPKLFFIQACQGEEIQPSVSIEADALNPEQAPTSLQDSIPAEADFLLGLATVPGYVSFRHVEEGSWYIQSLCNHLKKLVPRMLKFLEKTMEIRGRKRTVWGAKQISATSLPTAISAQTPRPPMRRWSSVS

SEQ ID NO: 82218 - DNA, 1437 bp, Artificial Sequence
  derived and/or modified sequence
atgaagtctcagggccaacactggtattcttcatcagacaagaactgcaaggtgagctttcgagagaaactgctgattatagatagtaacctgggcgtgcaggatgtcgagaatctgaaatttctatgtatcggactggtgccaaataagaagcttgagaaatccagcagcgcatccgacgtgttcgagcacttgctggctgaagatcttctgtccgaagaagatcccttcttcctggccgagctcctttacatcatcagacaaaagaagctgctccaacatctgaattgtacaaaagaagaggtggagcgtttactccccacgcgccaacgtgtcagcttatttagaaacctgctatatgaactctcggaggggattgattcggagaatcttaaagacatgatttttctcctgaaggacagtttgcctaaaactgaaatgacttctctgagcttccttgccttcctggagaagcagggcaaaatagacgaagataatctgacctgcctggaggacctgtgcaagacggtggtgcccaagctgctgagaaacattgagaaatataagcgagagaaggccattcaaattgtgactccccccgtagataaagaggccgaaagttatcagggagaagaagagctggtgtcacaaactgacgtaaagaccttcctcgaggcacttccgagagccgctgtctataggatgaatagaaatcaccggggtttgtgcgtaattgtgaacaatcatagcttcacgagcctcaaggatcgacagggaactcacaaggacgctgagatcctgtcacatgtgtttcagtggctgggcttcaccgtgcatatccacaataatgtgactaaagtcgagatggagatggtgttgcagaaacagaagtgcaaccccgcccacgctgatggggactgtttcgtgttctgcatcctgacacatggcagattcggagctgtgtattcgtcagatgaggccctcatccccattcgggagataatgtctcactttactgcactgcagtgcccaaggctggccgagaagcctaagctgttcttcattcaagcctgtcagggcgaggagatacagccaagcgtgagcatagaagcggacgccctgaaccccgaacaagcaccgaccagcctgcaggactctatcccagccgaggccgactttctgctcggcctggccactgtacctgggtacgtctcctttcggcatgtcgaagagggatcatggtacattcaatcactgtgcaatcacctgaaaaagttggtcccgcgaatgcttaagttcctggagaagaccatggagatacgcggccgaaagagaactgtgtggggcgccaagcagatctccgcaacttccctcccaacggccatcagtgcccagacacctaggccgcctatgcggcggtggagcagcgtttcttag

SEQ ID NO: 82219 - DNA, 1437 bp, Artificial Sequence
  derived and/or modified sequence
atgaagagccagggccagcactggtacagcagcagtgacaagaactgcaaggtgtccttccgggagaagctgctgatcatcgacagcaacctgggcgtgcaggatgtggagaacctgaagttcctgtgcatcggcctggtgcccaacaagaagctggagaagagcagcagcgccagtgatgtgtttgagcacctgctggccgaggacctgctgtctgaggaggaccccttcttcctggccgagctgctgtacatcatccggcagaagaagctgctgcagcacctgaactgcaccaaggaggaggtggagcggctgctgcccacccggcagagggtgtccctcttcaggaacctgctgtatgagctgtctgagggcatcgacagcgagaacctgaaggacatgatcttcctgctgaaggacagcctgcccaagacagagatgaccagcctgtccttcctggccttcctggagaagcagggcaagattgatgaggacaacctgacctgcctggaggacctgtgcaagacagtggtgcccaagctgctgagaaatattgagaagtacaagcgggagaaggccatccagatcgtgaccccacctgtggacaaggaggccgagagctaccagggcgaggaggagctggtgtcccagacagatgtgaagaccttcctggaggccctgcccagggctgctgtgtacaggatgaacagaaaccaccggggcctgtgtgtgattgtgaacaaccacagcttcaccagcctgaaggaccggcagggcacccacaaggatgctgagatcctgagccacgtgttccagtggctgggcttcaccgtgcacatccacaacaacgtgaccaaggtggagatggagatggtgctgcagaagcagaagtgcaacccagcccatgctgatggagactgctttgtgttctgcatcctgacccacggccgctttggagctgtgtacagcagtgatgaggccctgatccccatccgggagatcatgagccacttcaccgccctgcagtgcccccggctggccgagaagcccaagctgttcttcatccaggcctgccagggcgaggagatccagcccagcgtgtccattgaagcagatgccctgaaccctgagcaggcccccaccagcctgcaggacagcatcccagctgaggccgacttcctgctgggcctggccaccgtgcccggctacgtgtccttccgccacgtggaggagggctcctggtacatccagagcctgtgcaaccacctgaagaagctggtgcccaggatgctgaagttcctggagaagaccatggagatccggggcaggaagaggacagtgtggggcgccaagcagatcagcgccaccagcctgcccacagccatcagcgcccagacccccaggcctcccatgaggcgctggagctctgtgtcctag

SEQ ID NO: 82220 - DNA, 1437 bp, Artificial Sequence
  derived and/or modified sequence
atgaagagccagggccagcactggtacagcagcagcgacaagaactgcaaggtgagtttccgggagaagctccttattatcgatagcaatctgggcgttcaggatgtggaaaatctcaaatttctgtgcattgggctggtgcctaacaaaaaactggagaagagctcctcagcttctgatgtttttgagcacctgctcgccgaggacttgctgtcagaggaagacccgttctttcttgccgagctactttatatcatccggcaaaaaaagcttcttcaacatctgaattgcactaaagaagaggttgagcgtcttctgcccactaggcagcgcgtgagtttgttccggaatctattgtatgagctgtcagaggggatcgacagtgagaatctaaaagacatgatttttctgttgaaggattccctcccaaaaactgaaatgacctctctcagtttcttagcatttctagaaaaacagggaaaaatagacgaggacaacctgacttgcctcgaggacttatgtaaaacggttgtgcccaaactcctccgcaatatcgagaaatacaagcgggaaaaagctatccagatcgtgacaccaccagtggataaggaagccgagtcttaccagggggaagaagagctagtgtcgcagacagatgttaagacttttctggaggctctcccaagggccgctgtgtacaggatgaatagaaatcaccgcggcctgtgtgtcattgtgaacaatcatagttttacctcactaaaagatcggcagggaacacataaggacgccgagatcctctcccatgttttccaatggttggggttcaccgtgcacattcacaacaatgtgacgaaggtggagatggaaatggttctccaaaagcagaagtgcaaccccgcacacgccgacggggattgcttcgtcttctgtattctgacgcacggaagattcggcgccgtgtattctagcgatgaggctctaatcccgattcgagaaattatgtcgcatttcactgcccttcagtgcccacgcttagctgaaaagcctaagctgttcttcatccaggcttgccagggcgaagagattcagccgtccgtcagcattgaggcagacgccctgaaccctgagcaggctccaacatcattgcaggactccattccagcagaggctgacttcctgctgggacttgcaacagtccctggctacgtctcatttcgccatgtagaggaaggtagctggtatatccagtctctgtgtaaccatctgaagaagctggtccctcgcatgctgaaatttctagaaaagactatggaaatccggggtagaaaacgcaccgtatggggagctaagcagatctccgccacaagcctgcctactgccatcagtgctcagacccccagaccaccgatgcggaggtggtcctctgtaagctag

SEQ ID NO: 82221 - DNA, 1437 bp, Artificial Sequence
  derived and/or modified sequence
atgaagtcacagggacagcactggtactcctcgagtgataagaactgcaaggttagcttccgtgagaagctgttgattatagactcgaacctgggagttcaagatgtcgaaaacctgaaatttctgtgtattggcctggtgcccaacaaaaagttggagaagtcctcttcagctagtgatgttttcgaacatttgctcgccgaagacttgctgagcgaggaggaccccttcttcctggcggagctgctgtacataatccgacaaaagaagctgctccagcacctgaactgcactaaggaggaggtggaacgtctgctcccaacaagacagagagtgagcttgttccgcaatcttttatacgagctgagtgaaggaatcgactcagaaaatctgaaggacatgatcttcttacttaaggattccctgcctaaaacggaaatgactagccttagcttcttggcttttctcgaaaaacaaggaaaaattgacgaggacaatctgacgtgtttagaagatctttgcaagactgtcgttcctaaactgttgcggaacatcgagaaatataagcgggagaaagccattcagattgtcaccccacctgtggataaggaggcggagagttaccagggtgaggaagagctggtgtcccagaccgacgtgaaaacttttctcgaggccctgcctagagccgcagtttatagaatgaaccgaaaccaccggggtctgtgcgttatagtgaacaaccatagtttcactagtctgaaggatcgacaaggcacacacaaggacgctgaaattctgagccacgtgttccagtggcttggctttacagtccacatccataataacgtcactaaggtggaaatggagatggtccttcagaaacagaaatgcaatcctgctcatgccgatggagattgctttgtcttttgtatcctgacgcatggaaggttcggagccgtgtattcctccgacgaggcgttgataccaatccgcgaaataatgagccattttacggcgctacagtgtccacgtctcgctgagaaaccaaagctgtttttcatccaagcctgtcagggggaggaaatccaaccaagcgtgtctattgaagcagacgcgttgaaccccgaacaggcacccacaagtctccaggacagtataccggctgaggccgatttcctcctgggcctggctacagtgcccggatacgtttccttcaggcacgtggaggaaggaagctggtatattcagagtctgtgcaatcatctcaaaaagctggtgccacgcatgttaaaatttctcgaaaagaccatggagatccggggtcggaagaggacggtgtggggagcaaagcagatatcggccacgtcactgcccacagccatctctgctcagaccccccgacccccaatgagaaggtggtcttctgtgtcctag

SEQ ID NO: 82222 - DNA, 1603 bp, Artificial Sequence
  derived and/or modified sequence
gcttctttggaccttggagcacacagaggattctactttctttaaaactttgttttcaggcaatttccctgagaaccgtttacttccagaagattggtggagcttgatctgaaggctggccatgaaatctcaaggtcaacattggtattccagttcagataaaaactgtaaagtgagctttcgtgagaagcttctgattattgattcaaacctgggggtccaagatgtggagaacctcaagtttctctgcataggattggtccccaacaagaagctggagaagtccagctcagcctcagatgtttttgaacatctcttggcagaggatctgctgagtgaggaagaccctttcttcctggcagaactcctctatatcatacggcagaagaagctgctgcagcacctcaactgtaccaaagaggaagtggagcgactgctgcccacccgacaaagggtttctctgtttagaaacctgctctacgaactgtcagaaggcattgactcagagaacttaaaggacatgatcttccttctgaaagactcgcttcccaaaactgaaatgacctccctaagtttcctggcatttctagagaaacaaggtaaaatagatgaagataatctgacatgcctggaggacctctgcaaaacagttgtacctaaacttttgagaaacatagagaaatacaaaagagagaaagctatccagatagtgacacctcctgtagacaaggaagccgagtcgtatcaaggagaggaagaactagtttcccaaacagatgttaagacattcttggaagccttaccgagggcagctgtgtacaggatgaatcggaaccacagaggcctctgtgtcattgtcaacaaccacagctttacctccctgaaggacagacaaggaacccataaagatgctgagatcctgagtcatgtgttccagtggcttgggttcacagtgcatatacacaataatgtgacgaaagtggaaatggagatggtcctgcagaagcagaagtgcaatccagcccatgccgacggggactgcttcgtgttctgtattctgacccatgggagatttggagctgtctactcttcggatgaggccctcattcccattcgggagatcatgtctcacttcacagccctgcagtgccctagactggctgaaaaacctaaactctttttcatccaggcctgccaaggtgaagagatacagccttccgtatccatcgaagcagatgctctgaaccctgagcaggcacccacttccctgcaggacagtattcctgccgaggctgacttcctacttggtctggccactgtcccaggctatgtatcctttcggcatgtggaggaaggcagctggtatattcagtctctgtgtaatcatctgaagaaattggtcccaaggatgctgaaatttctggaaaagacaatggaaatcaggggcaggaagagaacagtgtggggtgctaaacagatctcagcaacctccctgcccacggccatctctgcgcagacacctcgaccccccatgcgcaggtggagcagcgtttcctagttctttccagaggcttccttctgcctgccttccagccacatcgcc

SEQ ID NO: 82223 - DNA, 1437 bp, Artificial Sequence
  derived and/or modified sequence
atgaagagccagggccagcactggtacagcagcagcgacaagaactgcaaggtgagcttcagagagaagctgctgatcatcgacagcaacctgggcgtgcaggacgtggagaacctgaagttcctgtgcatcggcctggtgcccaacaagaagctggagaagagcagcagcgccagcgacgtgttcgagcacctgctggccgaggacctgctgagcgaggaggaccccttcttcctggccgagctgctgtacatcatcagacagaagaagctgctgcagcacctgaactgcaccaaggaggaggtggagagactgctgcccaccagacagagagtgagcctgttcagaaacctgctgtacgagctgagcgagggcatcgacagcgagaacctgaaggacatgatcttcctgctgaaggacagcctgcccaagaccgagatgaccagcctgagcttcctggccttcctggagaagcagggcaagatcgacgaggacaacctgacctgcctggaggacctgtgcaagaccgtggtgcccaagctgctgagaaacatcgagaagtacaagagagagaaggccatccagatcgtgaccccccccgtggacaaggaggccgagagctaccagggcgaggaggagctggtgagccagaccgacgtgaagaccttcctggaggccctgcccagagccgccgtgtacagaatgaacagaaaccacagaggcctgtgcgtgatcgtgaacaaccacagcttcaccagcctgaaggacagacagggcacccacaaggacgccgagatcctgagccacgtgttccagtggctgggcttcaccgtgcacatccacaacaacgtgaccaaggtggagatggagatggtgctgcagaagcagaagtgcaaccccgcccacgccgacggcgactgcttcgtgttctgcatcctgacccacggcagattcggcgccgtgtacagcagcgacgaggccctgatccccatcagagagatcatgagccacttcaccgccctgcagtgccccagactggccgagaagcccaagctgttcttcatccaggcctgccagggcgaggagatccagcccagcgtgagcatcgaggccgacgccctgaaccccgagcaggcccccaccagcctgcaggacagcatccccgccgaggccgacttcctgctgggcctggccaccgtgcccggctacgtgagcttcagacacgtggaggagggcagctggtacatccagagcctgtgcaaccacctgaagaagctggtgcccagaatgctgaagttcctggagaagaccatggagatcagaggcagaaagagaaccgtgtggggcgccaagcagatcagcgccaccagcctgcccaccgccatcagcgcccagacccccagaccccccatgagaagatggagcagcgtgagctag

SEQ ID NO: 82224 - protein, 1307 aa, Artificial Sequence
  derived and/or modified sequence
MIAVSTANGYILFFHITSTRGDKYLYEPVYPKGSPQMKGTPHFKEEQCAPALNLEMRKILDLQAPIMSLQSVLEDLLVATSDGLLHLIHWEGMTNGRKAINLCTVPFSVDLQSSRVGSFLGFTDVHIRDMEYCATLDGFAVVFNDGKVGFITPVSSRFTAEQLHGVWPQDVVDGTCVAVNNKYRLMAFGCVSGSVQVYTIDNSTGAMLLSHKLELTAKQYPDIWNKTGAVKLMRWSPDNSVVIVTWEYGGLSLWSVFGAQLICTLGGDFAYRSDGTKKDPLKINSMSWGAEGYHLWVISGFGSQNTEIESDLRSVVKQPSILLFQFIKSVLTVNPCMSNQEQVLLQGEDRLYLNCGEASQTQNPRSSSTHSEHKPSREKSPFADGGLESQGLSTLLGHRHWHVVQISSTYLESNWPIREQNMIVTGGLAWWNDFMVLACYNINDRQEELRVYLRTSNLDNAFAHVTKAQAETLLLSVFQDMVIVFRADCSICLYSIERKSDGPNTTAGIQVLQEVSMSRYIPHPFLVVSVTLTSVSTENGITLKMPQQARGAESIMLNLAGQLIMMQRDRSGPQIREKDSNPNNQRKLLPFCPPVVLAQSVENVWTTCRANKQKRHLLEALWLSCGGAGMKVWLPLFPRDHRKPHSFLSQRIMLPFHINIYPLAVLFEDALVLGAVNDTLLYDSLYTRNNAREQLEVLFPFCVVERTSQIYLHHILRQLLVRNLGEQALLLAQSCATLPYFPHVLELMLHEVLEEEATSREPIPDPLLPTVAKFITEFPLFLQTVVHCARKTEYALWNYLFAAVGNPKDLFEECLMAQDLDTAASYLIILQNMEVPAVSRQHATLLFNTALEQGKWDLCRHMIRFLKAIGSGESETPPSTPTAQEPSSSGGFEFFRNRSISLSQSAENVPASKFSLQKTLSMPSGPSGKRWSKDSDCAENMYIDMMLWRHARRLLEDVRLKDLGCFAAQLGFELISWLCKERTRAARVDNFVIALKRLHKDFLWPLPIIPASSISSPFKNGKYRTVGEQLLKSQSADPFLNLEMDAGISNIQRSQSWLSNIGPTHHEIDTASSHGPQMQDAFLSPLSNKGDECSIGSATDLTESSSMVDGDWTMVDENFSTLSLTQSELEHISMELASKGPHKSQVQLRYLLHIFMEAGCLDWCIVIGLILRESSIINQILVITQSSEVDGEMLQNIKTGLHAVDRWASTDCPGYKPFLNIIKPQLQKLSEITEEQVQPDAFQPITMGKTPEQTSPRAEESRGSSSHGSIPQGEVGSSNMVSRKEEDTAQAEEEEPFQDGTYDCSVS

SEQ ID NO: 82225 - DNA, 3924 bp, Artificial Sequence
  derived and/or modified sequence
atgatcgccgtgagcaccgccaacggctacatcctgttcttccacatcaccagcaccagaggcgacaagtacctgtacgagcccgtgtaccccaagggcagcccccagatgaagggcaccccccacttcaaggaggagcagtgcgcccccgccctgaacctggagatgagaaagatcctggacctgcaggcccccatcatgagcctgcagagcgtgctggaggacctgctggtggccaccagcgacggcctgctgcacctgatccactgggagggcatgaccaacggcagaaaggccatcaacctgtgcaccgtgcccttcagcgtggacctgcagagcagcagagtgggcagcttcctgggcttcaccgacgtgcacatcagagacatggagtactgcgccaccctggacggcttcgccgtggtgttcaacgacggcaaggtgggcttcatcacccccgtgagcagcagattcaccgccgagcagctgcacggcgtgtggccccaggacgtggtggacggcacctgcgtggccgtgaacaacaagtacagactgatggccttcggctgcgtgagcggcagcgtgcaggtgtacaccatcgacaacagcaccggcgccatgctgctgagccacaagctggagctgaccgccaagcagtaccccgacatctggaacaagaccggcgccgtgaagctgatgagatggagccccgacaacagcgtggtgatcgtgacctgggagtacggcggcctgagcctgtggagcgtgttcggcgcccagctgatctgcaccctgggcggcgacttcgcctacagaagcgacggcaccaagaaggaccccctgaagatcaacagcatgagctggggcgccgagggctaccacctgtgggtgatcagcggcttcggcagccagaacaccgagatcgagagcgacctgagaagcgtggtgaagcagcccagcatcctgctgttccagttcatcaagagcgtgctgaccgtgaacccctgcatgagcaaccaggagcaggtgctgctgcagggcgaggacagactgtacctgaactgcggcgaggccagccagacccagaaccccagaagcagcagcacccacagcgagcacaagcccagcagagagaagagccccttcgccgacggcggcctggagagccagggcctgagcaccctgctgggccacagacactggcacgtggtgcagatcagcagcacctacctggagagcaactggcccatcagagagcagaacatgatcgtgaccggcggcctggcctggtggaacgacttcatggtgctggcctgctacaacatcaacgacagacaggaggagctgagagtgtacctgagaaccagcaacctggacaacgccttcgcccacgtgaccaaggcccaggccgagaccctgctgctgagcgtgttccaggacatggtgatcgtgttcagagccgactgcagcatctgcctgtacagcatcgagagaaagagcgacggccccaacaccaccgccggcatccaggtgctgcaggaggtgagcatgagcagatacatcccccaccccttcctggtggtgagcgtgaccctgaccagcgtgagcaccgagaacggcatcaccctgaagatgccccagcaggccagaggcgccgagagcatcatgctgaacctggccggccagctgatcatgatgcagagagacagaagcggcccccagatcagagagaaggacagcaaccccaacaaccagagaaagctgctgcccttctgcccccccgtggtgctggcccagagcgtggagaacgtgtggaccacctgcagagccaacaagcagaagagacacctgctggaggccctgtggctgagctgcggcggcgccggcatgaaggtgtggctgcccctgttccccagagaccacagaaagccccacagcttcctgagccagagaatcatgctgcccttccacatcaacatctaccccctggccgtgctgttcgaggacgccctggtgctgggcgccgtgaacgacaccctgctgtacgacagcctgtacaccagaaacaacgccagagagcagctggaggtgctgttccccttctgcgtggtggagagaaccagccagatctacctgcaccacatcctgagacagctgctggtgagaaacctgggcgagcaggccctgctgctggcccagagctgcgccaccctgccctacttcccccacgtgctggagctgatgctgcacgaggtgctggaggaggaggccaccagcagagagcccatccccgaccccctgctgcccaccgtggccaagttcatcaccgagttccccctgttcctgcagaccgtggtgcactgcgccagaaagaccgagtacgccctgtggaactacctgttcgccgccgtgggcaaccccaaggacctgttcgaggagtgcctgatggcccaggacctggacaccgccgccagctacctgatcatcctgcagaacatggaggtgcccgccgtgagcagacagcacgccaccctgctgttcaacaccgccctggagcagggcaagtgggacctgtgcagacacatgatcagattcctgaaggccatcggcagcggcgagagcgagaccccccccagcacccccaccgcccaggagcccagcagcagcggcggcttcgagttcttcagaaacagaagcatcagcctgagccagagcgccgagaacgtgcccgccagcaagttcagcctgcagaagaccctgagcatgcccagcggccccagcggcaagagatggagcaaggacagcgactgcgccgagaacatgtacatcgacatgatgctgtggagacacgccagaagactgctggaggacgtgagactgaaggacctgggctgcttcgccgcccagctgggcttcgagctgatcagctggctgtgcaaggagagaaccagagccgccagagtggacaacttcgtgatcgccctgaagagactgcacaaggacttcctgtggcccctgcccatcatccccgccagcagcatcagcagccccttcaagaacggcaagtacagaaccgtgggcgagcagctgctgaagagccagagcgccgaccccttcctgaacctggagatggacgccggcatcagcaacatccagagaagccagagctggctgagcaacatcggccccacccaccacgagatcgacaccgccagcagccacggcccccagatgcaggacgccttcctgagccccctgagcaacaagggcgacgagtgcagcatcggcagcgccaccgacctgaccgagagcagcagcatggtggacggcgactggaccatggtggacgagaacttcagcaccctgagcctgacccagagcgagctggagcacatcagcatggagctggccagcaagggcccccacaagagccaggtgcagctgagatacctgctgcacatcttcatggaggccggctgcctggactggtgcatcgtgatcggcctgatcctgagagagagcagcatcatcaaccagatcctggtgatcacccagagcagcgaggtggacggcgagatgctgcagaacatcaagaccggcctgcacgccgtggacagatgggccagcaccgactgccccggctacaagcccttcctgaacatcatcaagccccagctgcagaagctgagcgagatcaccgaggagcaggtgcagcccgacgccttccagcccatcaccatgggcaagacccccgagcagaccagccccagagccgaggagagcagaggcagcagcagccacggcagcatcccccagggcgaggtgggcagcagcaacatggtgagcagaaaggaggaggacaccgcccaggccgaggaggaggagcccttccaggacggcacctacgactgcagcgtgagctag

SEQ ID NO: 82226 - DNA, 3924 bp, Artificial Sequence
  derived and/or modified sequence
atgatcgccgtctctaccgccaacggctacatactattctttcacattaccagcacaaggggcgacaaatatctgtacgagcccgtgtatccgaaagggagcccacagatgaagggcacgccacactttaaagaagagcagtgcgcacccgccttgaacctggagatgcgcaagatactggatctgcaggctcctatcatgtctctgcagtcagtgctggaagaccttctggtggctacttccgacggtctccttcacctcattcactgggaggggatgaccaacggacgtaaagctattaatttatgcacggtccccttctctgtcgacctccagagcagccgcgtcggcagcttcctcgggttcacagacgtccatattagagatatggagtattgtgcgaccttagatggatttgcagtagtgtttaacgatggcaaagtgggatttattacgccagtctcctcacgctttaccgcagagcagctgcacggcgtgtggccacaggacgtagtggacggcacctgtgtcgccgtcaataacaaatatcggctgatggccttcggatgtgtctctggaagcgttcaggtgtacaccattgataactccactggggctatgctcctgagccataagttagagctcactgctaagcaatacccggacatttggaacaagaccggcgccgtaaagttgatgcgttggtctccagataattcagttgtgattgtgacgtgggagtacgggggactgagcttatggagcgtgttcggtgcccagttgatctgtaccttaggaggagatttcgcatataggtccgacggcactaagaaggatcctttgaagataaactctatgtcatggggcgctgaaggctaccatctgtgggtgattagtggttttggctcccagaatactgaaatcgaatccgatctgcgctccgtggttaaacagccaagtattctcctgtttcagtttatcaaaagtgtcctcactgtcaatccttgtatgagtaaccaggaacaggtgctccttcagggcgaagataggctctatctgaattgcggcgaagccagtcagactcaaaacccccgctcctcctctactcatagtgagcacaagccttcacgagagaagagcccattcgcagacggcggactcgagtcacagggcctttccaccctgctgggacatcggcactggcacgttgtacagatatcttcaacttaccttgaatctaactggcccattagagagcaaaatatgatcgtgacgggcggactggcatggtggaacgactttatggtgcttgcgtgttacaacatcaatgacagacaggaggagctcagagtctacctgagaacatccaacttagacaatgcattcgcacacgtgaccaaggcccaggccgaaactctactgttgtccgtttttcaagatatggttattgtgtttagggctgactgtagtatctgcctatatagtattgaaaggaagtcggacggtccaaataccactgccgggattcaggtgcttcaagaggtctcgatgtctcgctacattccacacccctttcttgtagttagcgtgacactgacaagcgtgtcgaccgaaaatggaatcacactgaagatgccgcaacaggcaagaggagctgaatctataatgctgaatctggccggacagctgattatgatgcaacgggacaggtcgggcccacagatacgcgagaaggactctaatcccaataaccaaagaaaattgctgcctttttgcccacccgtggtcttagcccagtcagtagagaacgtatggacaacctgcagagctaacaagcagaagaggcatctgctcgaagcattgtggctgtcctgcggtggggcaggtatgaaggtgtggctcccgctctttcctcgagaccacagaaagccacatagcttccttagccagcggatcatgctccctttccatatcaatatctatcccctggccgttctgtttgaagacgcactggtactgggcgccgtgaatgataccctactgtacgactccttgtatacgcgcaataacgcacgagagcaactagaagtcttgttccctttctgcgtggtggagcgaactagccaaatctaccttcaccacattctgcgtcaactgctggtgaggaaccttggtgagcaagctctcctgctggctcagtcatgtgctactttgccctactttccccacgtacttgagcttatgctccacgaggtcttggaggaagaggcgacatcccgcgaacccatccccgatcctcttcttccaaccgtagctaagtttatcacggagttcccattattcctgcaaactgtggtccactgtgctcgaaagacagaatatgccctgtggaattacctctttgcagcagtgggtaatccaaaggacctattcgaggaatgtcttatggcacaggatctggacactgctgctagttacctcattatcttacagaatatggaagtgcccgcggtatctcgccagcacgctaccctgctcttcaatacagccctcgaacaggggaagtgggatctttgtagacatatgatcaggtttctgaaagctataggcagcggcgagagcgagacacctcccagtacccccacagcacaggaaccttcttcctctggcgggttcgagtttttcagaaacaggagcatatcccttagccagtccgctgagaatgtccccgccagcaaattcagcttgcagaagactctgagcatgccttccgggccatccggcaaaaggtggtccaaagatagcgactgcgctgagaatatgtacatagatatgatgctgtggaggcacgccagaaggttactggaggatgtcaggttgaaagacctgggctgcttcgccgctcaactgggtttcgagttaattagctggctgtgcaaagagaggaccagagcagccagggtagataactttgttatagctctgaaacgcttacacaaagactttctgtggccgctgcctataatcccggcctcttctattagctcaccatttaagaacggcaagtaccggactgtgggcgagcagctgctaaagtcacagtctgcggacccattcctgaatctggagatggacgccggcatatccaacattcagcggagccagagctggttgtccaacatagggcccactcaccacgagatagacacagcctcgtcccatgggccacagatgcaggacgcatttttatcacctttgtctaataagggagatgagtgtagcataggctcagccacggatttgacagagagctcaagcatggtggacggggactggaccatggtggatgagaacttcagcacactgagcctgacccagtccgaactggaacacatttcaatggagctggcatctaagggacctcacaaatcccaggtgcaacttcgttatcttctgcatatatttatggaagctggctgccttgactggtgcatcgttatcggtctgattttgcgagaatctagcatcattaaccagattttggtgattacgcagagttccgaggtggacggagaaatgctgcagaacattaagactgggctgcacgccgtggaccggtgggcctccaccgattgtccaggctacaagcccttcctgaatattataaaacctcaacttcagaaactgtccgaaatcaccgaagagcaggtacagcccgacgccttccagcccatcaccatgggaaagactcccgagcaaacctccccaagggccgaagagagccgcgggtcttccagccatggctccattcctcagggtgaagtgggctcctcgaatatggtatcaagaaaggaagaagacaccgctcaggccgaagaggaggagccgtttcaggacggtacatacgactgtagcgtgtcctag

SEQ ID NO: 82227 - DNA, 3924 bp, Artificial Sequence
  derived and/or modified sequence
atgattgctgtgtccacagccaacggctacatcctcttcttccacatcaccagcaccaggggggacaagtacctgtatgagcctgtgtaccccaagggcagcccccagatgaagggcaccccccacttcaaggaggagcagtgtgccccagccctgaacctggagatgaggaagatcctggacctgcaggcccccatcatgagcctgcagagcgtgctggaggacctgctggtggccaccagtgatggcctgctgcacctgatccactgggagggcatgaccaatggaaggaaggccatcaacctgtgcaccgtgcccttctctgtggacctgcagagcagccgggtgggcagcttcctgggcttcacagatgtgcacatccgggacatggagtactgtgccaccctggatggctttgctgtggtgttcaatgatggcaaggtgggcttcatcacccctgtgagcagccgcttcaccgctgagcagctgcacggcgtgtggccccaggatgtggtggatggcacctgtgtggccgtgaacaacaagtaccgcctgatggccttcggctgtgtgtctggctctgtgcaggtgtacaccatcgacaacagcactggagccatgctgctgagccacaagctggagctgacagccaagcagtacccagacatctggaacaagacaggagctgtgaagctgatgcgctggagcccagacaacagcgtggtgattgtgacctgggagtatggaggcctgagcctgtggagcgtgtttggagcccagctgatctgcaccctgggcggggactttgcctacagaagtgatggcaccaagaaggaccccctgaagatcaacagcatgtcctggggcgctgagggctaccacctgtgggtgatcagcggcttcggcagccagaacacagaaattgaaagtgacctgcggtctgtggtgaagcagcccagcatcctgctcttccagttcatcaagtctgtgctgactgtgaacccctgcatgagcaaccaggagcaggtgctgctgcagggcgaggaccggctgtacctgaactgtggggaggccagccagacccagaaccccaggagcagcagcacccacagcgagcacaagcccagccgggagaagagcccctttgctgatggcggcctggagagccagggcctgagcaccctgctgggccaccgccactggcacgtggtgcagatcagcagcacctacctggagagcaactggcccatccgggagcagaacatgattgtgactggaggcctggcctggtggaatgacttcatggtgctggcctgctacaacatcaatgaccggcaggaggagctgcgggtgtacctgcggaccagcaacctggacaatgcctttgcccacgtgaccaaggcccaggccgagaccctgctgctgagcgtcttccaggacatggtgattgtgttccgggctgactgcagcatctgcctgtacagcattgaaaggaagagtgatggccccaacaccacagctggcatccaggtgctgcaggaggtgtccatgagccgctacatcccccaccccttcctggtggtgtctgtgaccctgacctctgtgtccacagaaaatggcatcaccctgaagatgccccagcaggcccggggagctgagagcatcatgctgaacctggccggccagctgatcatgatgcagagggacagaagtggcccccagatccgggagaaggacagcaaccccaacaaccagaggaagctgctgcccttctgcccccctgtggtgctggcccagagcgtggagaatgtgtggaccacctgccgggccaacaagcagaagaggcacctgctggaggccctgtggctgagctgtggcggggccggcatgaaggtgtggctgcccctcttcccccgggaccacaggaagccccacagcttcctgagccagaggatcatgctgcccttccacatcaacatctaccccctggccgtgctgtttgaagatgccctggtgctgggcgctgtgaatgacaccctgctgtatgacagcctgtacaccaggaacaatgcccgggagcagctggaggtgctcttccccttctgtgtggtggagaggaccagccagatctacctgcaccacatcctgcggcagctgctggtgaggaacctgggggagcaggccctgctgctggcccagagctgtgccaccctgccctacttcccccacgtgctggagctgatgctgcacgaggtgctggaggaggaggccaccagccgggagcccatcccagaccccctgctgcccaccgtggccaagttcatcacagagttccccctcttcctgcagacagtggtgcactgtgccaggaagacagaatatgccctgtggaactacctgtttgctgctgtgggcaaccccaaggacctgtttgaagaatgtctgatggcccaggacctggacacagctgccagctacctgatcatcctgcagaacatggaggtgcctgctgtgtcccggcagcacgccaccctgctcttcaacacagccctggagcagggcaagtgggacctgtgccgccacatgatccgcttcctgaaggccatcggcagcggggagagcgagaccccacccagcacccccacagcccaggagcccagcagcagcggcggctttgagttcttcaggaacagaagcatcagcctgagccagagcgcagaaaatgtgcctgccagcaagttcagcctgcagaagaccctgtccatgcccagcggccccagcggcaagcgctggagcaaggacagcgactgtgccgagaacatgtacatcgacatgatgctgtggaggcatgcccggcggctgctggaggatgtgcggctgaaggacctgggctgctttgctgcccagctgggctttgagctgatctcctggctgtgcaaggagaggaccagggctgcccgggtggacaactttgtgattgccctgaagaggctgcacaaggacttcctgtggcccctgcccatcatcccagccagcagcatcagcagccccttcaagaatggcaagtacagaacagtgggggagcagctgctgaagagccagagcgctgaccccttcctgaacctggagatggatgctggcatcagcaacatccagaggagccagagctggctgagcaacatcggccccacccaccacgagattgacacagccagcagccacggcccccagatgcaggatgccttcctgagccccctgagcaacaagggagatgagtgcagcatcggcagcgccacagacctgacagagagcagctccatggtggatggagactggaccatggtggatgagaacttcagcaccctgagcctgacccagagcgagctggagcacatctccatggagctggccagcaagggcccccacaagagccaggtgcagctgcgctacctgctgcacatcttcatggaggccggctgcctggactggtgcatcgtgattggcctcatcctgcgggagagcagcatcatcaaccagatcctggtgatcacccagagcagcgaggtggatggagagatgctgcagaacatcaagacaggcctgcatgctgtggaccgctgggccagcacagactgccccggctacaagcccttcctgaacatcatcaagccccagctgcagaagctgtctgagatcacagaggagcaggtgcagccagatgccttccagcccatcaccatgggcaagaccccagagcagaccagccccagggctgaggagagccggggcagcagcagccacggcagcatcccccagggcgaggtgggcagcagcaacatggtgtccaggaaggaggaggacacagcccaggccgaggaggaggagcccttccaggacggcacctatgactgcagcgtgtcctag

SEQ ID NO: 82228 - DNA, 3924 bp, Artificial Sequence
  derived and/or modified sequence
atgatcgccgtgagcaccgccaacggctacatcctgttcttccacataacttccacgcgaggagataaatacctctacgagccagtatacccaaaaggctcgccacagatgaaaggaaccccacatttcaaagaggagcagtgcgcccccgccctgaatctggagatgcgtaaaatcctggatctccaggctccaattatgtccctccagtccgtactagaggacttattggtagcgacaagtgatggtttgctgcacctcattcattgggagggtatgacaaatggaagaaaggcaatcaatctctgcactgtgccgttcagtgtggaccttcagtcatcccgggtagggtctttcctcggcttcacagacgtgcatattagggacatggaatattgcgcaaccctggatggctttgccgtggtgtttaatgacgggaaagttgggttcatcacacctgtctcgagtcggtttactgccgaacagctgcatggtgtttggccacaggacgtagtcgatggtacatgcgtagccgtcaacaacaagtacagactgatggcatttggttgcgtgagcggtagtgtgcaggtatacaccatagataacagcactggagccatgctgctatcccacaagctagagctgactgctaaacagtatcccgatatctggaacaagaccggggccgtgaagctgatgaggtggtctccggacaacagtgtcgtgatcgttacatgggagtacggcggactgagcttatggagcgttttcggggcacaactgatttgcactctgggtggggacttcgcctatcgctctgatggaaccaaaaaggacccactgaagatcaattccatgagttggggagccgaaggataccatttgtgggtcatctccggctttggcagccagaacactgaaatcgaatctgatctacgaagcgttgtgaagcagccttcaatactcctctttcaatttattaagagcgttttgacagtgaatccatgcatgagcaaccaggagcaggtcctactccagggagaggaccggctctacctgaattgtggtgaagcctctcagacccagaatcctcggtcctcgagtacccattctgagcataagccttccagggaaaagagccccttcgcagacggcggcctggagagccaaggcctgtcgaccctgctcggccatcgtcattggcatgtcgtgcaaatcagctccacctatctggaaagtaattggccaatcagagaacagaacatgattgttaccggcggcctcgcctggtggaatgacttcatggtgctcgcctgttacaacatcaacgatcgccaggaagaattgagagtttatctcagaactagcaacttggacaatgccttcgcccacgtcactaaggcgcaggcagagacgctgttgttatcggtattccaagatatggtgattgtgtttcgagctgactgcagcatttgcctctattccattgaacgcaagtctgatgggcccaacacaacagccggcatccaggttctccaggaggtgtcaatgtcccgatatatcccccatccctttcttgtagtgtcagtgactttgacctcggtatcgaccgaaaatgggattaccctcaaaatgcctcagcaggcccgtggcgccgagtcaattatgctaaatctggctggccagctgatcatgatgcagcgtgaccgcagcggcccacaaatccgcgaaaaggactccaacccgaataatcagcgcaaattgttgccattttgtcccccagttgttcttgctcagagcgtcgagaatgtgtggacgacctgtagggccaacaaacagaagcggcacctgctggaagctctttggctaagctgcggtggggccggcatgaaagtgtggttacccctatttcctagagaccacaggaaacctcactcgttcctgtcacagcgaataatgttgccgttccacatcaatatctacccccttgccgttctatttgaagatgcgttggtcttgggggccgtcaatgatactcttctgtacgatagtctctacacgaggaacaacgctagagagcagcttgaggtcctgttccctttttgcgtcgtggaacgcaccagccaaatctatctgcaccacatcctgagacagctgcttgtgagaaatctcggggagcaggcacttcttttggctcagagctgcgccacactaccttacttcccacacgtcctcgagctcatgctacatgaagtgctcgaagaagaagccacatcaagagagcctatccccgatcctctgctcccaacagttgcaaaatttatcaccgaatttcccctgtttctccagactgtcgtgcattgcgctaggaaaaccgagtatgcgttgtggaactacctgtttgctgcagtgggcaatccaaaggatttgttcgaggaatgtctcatggcacaggatctggacacggccgcaagttatctgatcatcctgcagaacatggaagtaccggctgtatcacgccagcacgccaccctactcttcaacaccgcactggagcagggaaaatgggacctgtgcaggcacatgatccgctttctgaaagccattggctctggggagagcgagacacctccaagtacacccaccgcccaagagccgtctagcagcggggggttcgagttctttcgcaaccggtcaatttcactgtcccaaagcgccgagaatgtcccggcaagtaagttttcactccaaaagactctctcgatgcccagcggcccatccggaaagaggtggagcaaagactcagactgtgcagaaaacatgtacatcgacatgatgctgtggcggcatgcccggcggctgcttgaagatgtccggctcaaggatttaggttgctttgccgcacagcttggcttcgagttgatttcttggctctgtaaagagcgaacgcgtgcagccagagtcgacaacttcgtcattgccctgaaacgcctacataaggatttcttatggccgctccccatcatccccgcttcatccattagctcacctttcaagaacggcaagtatcggaccgtcggagaacagctgctgaagagccaaagcgctgatccattcctcaatttagagatggatgcaggcatctctaacattcagcgatcacagtcgtggttatctaacatagggcccacccatcatgagatcgacacggctagttcccacggtccgcagatgcaggatgccttcttgtctcctctttctaacaagggcgatgagtgctccattgggagtgcaacagatttaaccgagtcttcttcaatggtggacggagattggactatggttgacgaaaactttagtacactgtccctaactcagtccgagctggaacatatctcaatggaactcgcgagcaagggcccccataagagtcaggtccagctgcggtacctgctacacatctttatggaggcaggatgcctggactggtgcattgttattggactgatactcagagaatcttcaataatcaaccaaattctcgtgatcactcaatcatctgaagtggatggagaaatgctccagaacatcaaaactggcctccatgccgtggaccgttgggcctccaccgactgtcctgggtacaagccgtttctgaatatcatcaaaccccagttacaaaagctgtccgaaattaccgaggaacaagtccagcctgacgccttccagccaatcacgatggggaagactccagaacagacctccccgcgtgcagaggaaagcaggggctcatcttcacatggaagtattcctcaaggcgaagttgggtcctctaacatggtgtcccggaaggaggaggatacggcccaagcagaggaggaagaacccttccaggacgggacctacgattgttctgttagttag

SEQ ID NO: 82229 - DNA, 3998 bp, Artificial Sequence
  derived and/or modified sequence
tgaatggaggccagatagtaccatgatagctgtatcaacggcaaatggatacatcttgttttttcatattacatctacaagaggggacaagtacctttatgaaccagtgtatcccaaaggaagtccacaaatgaaggggacaccccattttaaggaagaacagtgtgctccagcattaaatttggagatgaggaaaatactggatttacaagcacccatcatgagtttgcagtctgtgttggaagatctcctggttgctacttctgatggacttcttcatcttattcactgggaaggaatgacaaatggaaggaaagccattaatctttgcacagtacccttttcagtagacctgcagtcatctagagtaggttcattcctgggcttcacagacgtacacatcagagacatggaatactgtgccacacttgatgggtttgctgttgtatttaatgatggtaaagttggatttattacaccagtgtcaagtagatttactgcagagcagcttcatggagtttggccacaagatgttgttgacggaacgtgtgtagcagtaaataacaagtatcgactaatggcatttggctgtgtgagtggttctgtgcaggtctatacaatagataacagcactggagccatgctgctatctcataaattagagctaacagcaaaacagtatcctgacatttggaataaaacaggagctgttaaattgatgagatggtctcctgacaatagtgttgtaatagtgacctgggaatacggaggcctttctttatggagtgtttttggagcacagctgatttgtacacttggaggagattttgcttataggtctgatggcaccaaaaaagatccccttaagatcaactctatgagctggggtgcagaaggctatcacctatgggtaatcagcggatttggttctcaaaacactgaaattgagtctgacctcaggagtgtagttaaacagcccagcatcctgttatttcagtttattaagagtgtactcactgtaaacccttgtatgagtaaccaagagcaggtgttgcttcagggtgaggatcgcttgtacttgaactgtggagaggcttcacaaacccagaatcccaggagttcttcaacacactctgagcataagcccagtcgagaaaagagcccatttgcagatggaggtttagagtctcagggattaagcactttacttggacatcggcattggcatgttgtacagatttccagcacctatctagagagcaattggcctatacgggagcaaaatatgatcgtgacaggtggcttagcctggtggaatgattttatggtccttgcgtgttataacataaatgaccgtcaagaagagcttagagtatacttgcgaacatcaaatctggacaatgcctttgctcatgtcaccaaagcacaagcagaaacattactgcttagtgtcttccaggacatggtaatagtatttagagcagactgttcaatatgcctttacagtattgaaagaaaatctgatggtccaaatactactgctggtattcaagttcttcaggaggtttccatgtcacgctacattcctcaccctttcctggtggtatctgtcactctgacatcagtgagtacagagaatggaatcaccttgaaaatgccacagcaggctcgtggtgcagagagcattatgttaaacctggcaggacagctcatcatgatgcagagggacaggtcaggcccacagatccgggagaaggacagtaaccctaataaccaaaggaaacttctgccattctgtcctcctgttgtactagcccagtctgttgaaaatgtctggacaacgtgtcgagcaaataaacagaaacgtcaccttctggaggccctctggctgagctgtggtggtgcagggatgaaagtttggctccctctcttccctagggatcaccgcaagccccattccttcttgtcccagcggatcatgctgcctttccacatcaacatttacccgctagctgttctgtttgaagatgctttagtccttggtgctgtcaatgacactttgctctatgattctttatatactcggaacaatgctagagaacagctggaggtgctcttccctttctgtgttgtggagagaacctctcagatctacctccaccacattctacgtcaacttctggtcagaaaccttggggagcaagccttgctcttggcccagtcctgtgccacattaccttacttccctcatgtgctggagctcatgctccatgaagtactggaagaagaagctacctcacgggagcccattcccgaccctctgcttcccactgtggcaaaatttatcactgagttccccctcttcctgcagacagttgtccattgtgccaggaagaccgaatatgccctgtggaattacctttttgcagctgttggaaaccctaaggacttgtttgaggagtgtttgatggctcaggatttggacacagctgcctcttaccttattatcttacagaatatggaagtccctgcagtaagtaggcaacatgctacccttctattcaacacagcactagaacaaggcaagtgggacctttgtcgacacatgattcgatttcttaaagccattggctctggagaatctgagacacctccatccacacccacagctcaggaacccagttcaagtggtggatttgagttcttcaggaatcgaagcatcagtttatcccagtcagctgaaaatgttcctgccagtaaattcagtttacagaaaacactaagtatgccatctggtccctctggaaaaagatggagcaaagacagtgactgtgctgagaacatgtatattgacatgatgctctggagacatgctcggcgcctcttagaagatgtgaggttaaaggaccttggctgctttgcagcccagctgggctttgaactaattagttggctatgcaaggaacgtacccgagccgcccgggtagacaactttgtaatagccctgaagagactccacaaagatttcctgtggccacttccaatcatcccagcctcttctatcagttctcctttcaaaaatggaaaataccgaactgtgggagagcagctgttaaagtctcaatcagctgacccatttttgaaccttgagatggatgctggcatctccaacatccagcgaagtcagagctggctcagcaacattggccccacccatcatgagatagacacagcttcatcccatggaccacaaatgcaagatgccttcttgtcacctttatctaataaaggtgatgaatgcagtattggttcagccacagacttgactgaaagtagctccatggtggatggcgactggacaatggtggatgaaaatttctctacactcagtttaactcagtcagagctggagcacatttccatggagttggccagtaaagggcctcataaatcccaggtccagcttcggtatttgctacacattttcatggaggcagggtgcctagactggtgcatcgttataggcctgattcttagagaatcctcaataatcaatcagattttggttattacacagtcttcagaggtagatggagagatgttacagaacataaagacagggctccatgcagtggaccgatgggcctctacagactgtcctggatataagccatttttaaacatcattaagccacaactgcagaagctcagtgagataacagaagagcaggtccagccagatgccttccaaccaataactatgggtaagactccagaacagactagcccccgggcagaggagagcaggggctcctccagccatggaagcatcccccagggtgaagttggaagcagcaatatggtcagccggaaagaggaggacacagcccaagcagaggaggaagaaccttttcaggatgggacttacgactgttctgtgtcctaacagtgaggttccatcacaaaggggcagtattaattagcagcagcgtgcagct

SEQ ID NO: 82230 - DNA, 3924 bp, Artificial Sequence
  derived and/or modified sequence
atgatcgccgtgagtacagcaaacggctacattcttttctttcacattacctccaccagaggggacaaatacctgtatgagcctgtctacccgaaaggatctccccagatgaaaggaacgcctcacttcaaagaggaacagtgtgccccagctctcaatctagagatgcgaaaaatcttggatctgcaggcccctataatgtcactgcagtcagtcctcgaggatctgttggtggcaacttccgacggtctcttgcatttaatccactgggaggggatgaccaatgggagaaaggctataaatctctgcactgttccttttagcgtcgacctgcagtccagcagagtcggaagtttcttgggattcacagacgtgcacatacgcgacatggaatattgcgcaaccctcgatggctttgccgtggtgtttaacgacgggaaggtcggatttatcactccagttagtagtaggtttactgcagaacagctacacggtgtctggcctcaagacgttgtggacgggacttgtgtcgccgttaacaacaagtacaggctgatggcgttcggctgcgtctccggcagcgtacaggtttatacaatcgacaatagtaccggcgcaatgctgctgtcccataagctggagctgaccgccaaacagtatccagacatttggaataagaccggagctgtgaagctgatgagatggtctccggacaacagcgttgtgatcgtgacttgggaatacggcggtctaagcctctggtcagtgtttggcgcacaactgatatgcacgttagggggagactttgcctatcgctccgatggaactaagaaagatccactcaaaatcaattccatgtcatggggcgctgaagggtaccacctgtgggtcatcagcggctttggcagtcagaatactgagatcgaaagcgacttaaggtctgtcgtgaaacagccctccatcctactcttccaattcattaagtcggtcctgacggtgaatccttgcatgtctaaccaagagcaggtgctgctgcaaggagaggataggttgtacctgaactgcggagaggcatcacagacacagaaccccagatctagcagtactcattcagagcataagcccagtcgagaaaaatcacctttcgccgacggcggactagagtcacagggcctctcaacgttattggggcatagacattggcatgttgtgcagattagttccacctacctcgagagcaattggcccatcagagaacagaacatgattgtcacaggcggactggcttggtggaatgacttcatggtgctggcctgctacaatattaacgatcgccaggaagagttgagggtctatctacgaacctctaatctggacaatgcatttgctcacgtgacaaaggctcaggccgaaacattgcttctctcggtgtttcaagacatggtgatcgtgtttcgggctgattgttcaatttgtctctactccatcgaacgcaagtctgatggaccgaacaccaccgccggtattcaggtcctgcaggaagtgagtatgagcaggtatatcccgcacccatttctggtcgtgtccgttacacttacttccgtgagtaccgagaacgggattactcttaagatgccccaacaagctaggggcgcagaatcaatcatgctgaatctagccggtcagctcatcatgatgcagagagatcggagcggtccacagatccgggaaaaagatagcaatcccaataatcaacgtaagctgctccctttttgccctcccgtggttttggcgcaatccgttgaaaacgtctggacaacctgtagggccaataagcaaaagcggcacctgctggaggctctgtggctatcctgcggcggagctggaatgaaggtgtggttgccactgtttccgcgtgatcataggaagccacactcctttctcagccagcgcattatgctgccgttccacataaacatctatcccctggctgttctgttcgaagacgctcttgtcctgggtgctgtcaacgatactctgctctacgactccctctacacgaggaacaatgcaagggaacaacttgaggtgctcttccccttttgtgtcgtggaaaggacatcccagatttatcttcatcacatcctgcgccagttgttagtccgaaacctcggggagcaggcactcctactggcccagtcctgtgccaccctgccttactttccccatgtgctggagctgatgctgcatgaggtcttggaagaagaagccacgtccagagaaccaatcccagaccctttgctccctaccgtggcaaaattcataactgagttccccctgtttctgcaaacagtggttcactgcgcccgtaagacagagtatgcactctggaattatctgtttgcagcagtaggcaaccctaaggacctttttgaggagtgtctgatggctcaggacttggacactgccgcttcctatctgatcattcttcaaaacatggaggttcccgcagtgtcacgccagcacgccactctcctgttcaatactgcattggagcagggcaagtgggatctgtgtcggcacatgatcagattcctgaaagcaatcggatcaggggagtcggaaacgccaccaagtacccctaccgcccaggaacccagctcctcaggtggatttgagttttttagaaaccgcagcataagcctgagtcagagcgctgagaatgtacctgcttctaaattctctttacagaagacactttctatgccttccgggccttccgggaagagatggagcaaagactccgactgcgccgaaaacatgtacatagatatgatgttatggcggcatgccagaagactgcttgaggatgtacggctcaaagatctcggctgctttgcagcgcaactgggctttgagctgatcagctggctgtgcaaagagcgcacgcgcgcagcacgggttgataacttcgtcatcgccctcaagcggcttcataaggactttctctggccattgccaataattccagctagctccattagctcgcctttcaagaatgggaagtaccggactgtaggcgagcagttgcttaagtctcagagcgcggacccctttctgaacttggagatggatgctggtatttccaacatccagagatctcaatcttggcttagcaatattggacctacccatcacgagatagacaccgcttctagtcacggaccccagatgcaggacgccttcctgtcacccctatccaataagggcgacgaatgctctattggctctgctacagacttgacagagtcctcctcaatggtagatggggactggacaatggtagatgagaatttcagcaccctgtccctgacacaatcagaactggaacatatctcgatggagctcgccagtaaaggaccgcacaagagccaagtacaacttcggtatcttctgcacatctttatggaagctggctgcctggattggtgtattgtgatcggcttgattctgagggagtcctcaattattaatcagatcttggtaattacccagtcaagcgaagtggacggagagatgttacagaatatcaaaaccggactgcacgctgtagatcgatgggctagtacagactgccctgggtacaaaccattcctaaacattatcaaaccgcaactccagaaactttctgaaattaccgaggagcaagtacagcccgatgcttttcagcccatcacaatgggaaaaacgcccgagcagactagtcctcgagcagaagagagtagaggttcatcaagtcatggctcaatcccccaaggtgaggtaggcagcagcaatatggtgtctcggaaggaggaggatactgctcaggcagaggaggaggaaccatttcaagacggcacctacgactgtagtgtcagctag

SEQ ID NO: 82231 - protein, 733 aa, Artificial Sequence
  derived and/or modified sequence
MSVKMGKKYKNIVLLKGLEVINDYHFRMVKSLLSNDLKLNLKMREEYDKIQIADLMEEKFRGDAGLGKLIKIFEDIPTLEDLAETLKKEKLKVKGPALSRKRKKEVDATSPAPSTSSTVKTEGAEATPGAQNPKTVAKCQVTPRRNVLQKRPVIVKVLSTTKPFEYETPEMEKKIMFHATVATQTQFFHVKVLNTSLKEKFNGKKIIIISDYLEYDSLLEVNEESTVSEAGPNQTFEVPNKIINRAKETLKIDILHKQASGNIVYGVFMLHKKTVNQKTTIYEIQDDRGKMDVVGTGQCHNIPCEEGDKLQLFCFRLRKKNQMSKLISEMHSFIQIKKKTNPRNNDPKSMKLPQEQRQLPYPSEASTTFPESHLRTPQMPPTTPSSSFFTKKSEDTISKMNDFMRMQILKEGSHFPGPFMTSIGPAESHPHTPQMPPSTPSSSFLTTKSEDTISKMNDFMRMQILKEGSHFPGPFMTSIGPAESHPHTPQMPPSTPSSSFLTTLKPRLKTEPEEVSIEDSAQSDLKEVMVLNATESFVYEPKEQKKMFHATVATENEVFRVKVFNIDLKEKFTPKKIIAIANYVCRNGFLEVYPFTLVADVNADRNMEIPKGLIRSASVTPKINQLCSQTKGSFVNGVFEVHKKNVRGEFTYYEIQDNTGKMEVVVHGRLTTINCEEGDKLKLTCFELAPKSGNTGELRSVIHSHIKVIKTRKNKKDILNPDSSMETSPDFFF

SEQ ID NO: 82232 - DNA, 384 bp, Artificial Sequence
  derived and/or modified sequence
atgcccaccatgtggcggatgctgcaccaggccctgaagctgcggcggcggacagtgctggccgggcaggaaatctcttacgtcttacccgttatgttcgttgtgtccgaggaggattctaaccgtgatgtgtttctggtggccggctaccgacacctggagtttggggagcgtatcgcgatttggggctcttcaatgcagcacgttgaacgtcgtcgatggccattagacagcattcaaaaacggatgggtcagagctttacgggatgggcagaagaagcggccccaggtatgaagactaaaaaagaatacgccgagataggggtgaagccacgccaaaacgcctgtgaaatgtgccccgggatgatcctgagcaccacctag

SEQ ID NO: 82233 - DNA, 2202 bp, Artificial Sequence
  derived and/or modified sequence
atgagcgtgaaaatggggaaaaaatataagaacattgtgctcctcaagggactagaggttattaatgattaccactttagaatggtcaagagtctgttatctaatgacttgaagctgaacctaaagatgagggaagagtatgataagattcaaatagctgaccttatggaggaaaaattccgaggcgacgctggactgggcaagctgatcaagatttttgaggatatcccaacacttgaggacttggcagaaacccttaagaaggaaaagttgaaagtgaaagggcctgccctatcacggaaacgcaaaaaggaggtcgacgcaaccagccccgcccccagcacctcctctacagtgaaaacagaaggcgctgaagcaacaccaggggcgcagaaccctaagaccgttgcaaaatgtcaggtgacacctcgccgcaatgttctgcagaaacggcccgtgattgtgaaagtgctctccacgaccaagcctttcgagtacgaaacgccagagatggaaaaaaaaattatgtttcatgctacagtggctacacaaactcaatttttccacgtgaaagttctaaacaccagtcttaaggagaagttcaatggaaagaagatcattattatcagcgactatctggaatatgactctctcttggaagtgaacgaggagtcaaccgtatccgaagcgggcccaaatcagactttcgaggtgcctaacaagataatcaaccgggcaaaggagaccctgaaaatcgatattctgcataaacaggcttcgggtaacatcgtctatggagtgttcatgctgcataaaaagacagttaatcagaagacaacaatttatgagatacaggatgacaggggtaaaatggatgttgtgggaactggccaatgccacaacataccatgtgaggagggcgataaactgcagttgttctgctttaggctgcgaaagaaaaaccaaatgtctaagcttatctccgagatgcatagcttcatccagatcaaaaaaaaaacaaatcctcgcaataatgacccaaagtcaatgaagcttccccaggaacagaggcaattgccctatcccagcgaagctagcaccaccttcccggaatcacacctgcgcaccccccagatgccccctaccacacctagttcaagcttcttcactaaaaagagtgaagacaccatctccaaaatgaacgactttatgaggatgcagatcttaaaagaagggtcccactttccgggaccgtttatgacctcaattggcccagccgagtcccaccctcacacaccacaaatgccgccgtccacccctagctcaagttttttaaccaccaagtcagaagacacaatttccaaaatgaacgactttatgcgcatgcagatcctcaaagaaggcagccatttccctgggccattcatgactagcatcggccccgccgagagccatccccacactcctcagatgcctccatccacaccgagctcatcgtttctcaccactttaaagccaagactgaagaccgaacctgaggaagtttccatagaagattccgctcagtcagatctaaaggaggtgatggtgttgaacgctactgagtcttttgtgtacgagcccaaggaacaaaagaagatgtttcatgccacagtggcaaccgaaaacgaggtttttagagtgaaagtgttcaacatcgacttgaaggaaaagtttacacctaagaagatcatcgccatcgctaactacgtatgcagaaatgggtttttggaagtgtacccttttactctggtggctgacgttaacgcagacagaaacatggagatcccaaaaggcctcattagatctgcgtctgtaactccaaagatcaatcagctgtgtagccagacaaaagggtcgttcgtcaatggtgtattcgaagttcacaaaaaaaatgtgaggggcgagttcacatactacgagattcaggataacacaggcaaaatggaggttgtggttcacggacgtttaactactataaactgcgaggagggtgataaattgaaattgacctgctttgagctagcacccaagagcgggaacacaggagaattgcgaagcgtgatacactcccacatcaaagtcattaagactcgcaagaataagaaggacattctcaacccggatagctccatggagacgagtcccgattttttcttttag

SEQ ID NO: 82234 - DNA, 2609 bp, Artificial Sequence
  derived and/or modified sequence
attttcttagcgtttctggagattacaacatcctgcggttccgtttctgggaactttactgatttatctcccccctcacacaaataagcattgattcctgcatttctgaagatctcaagatctggactactgttgaaaaaatttccagtgaggctcacttatgtctgtaaagatgggaaaaaaatacaagaacattgttctactaaaaggattagaggtcatcaatgattatcattttagaatggttaagtccttactgagcaacgatttaaaacttaatttaaaaatgagagaagagtatgacaaaattcagattgctgacttgatggaagaaaagttccgaggtgatgctggtttgggcaaactaataaaaattttcgaagatataccaacgcttgaagacctggctgaaactcttaaaaaagaaaagttaaaagtaaaaggaccagccctatcaagaaagaggaagaaggaagtggatgctacttcacctgcaccctccacaagcagcactgtcaaaactgaaggagcagaggcaactcctggagctcagaacccgaaaacagtggccaaatgtcaggtaactcccagaagaaatgttctccaaaaacgcccagtgatagtgaaggtactgagtacaacaaagccatttgaatatgagaccccagaaatggagaaaaaaataatgtttcatgctacagtggctacacagacacagttcttccatgtgaaggttttaaacaccagcttgaaggagaaattcaatggaaagaaaatcatcatcatatcagattatttggaatatgatagtctcctagaggtcaatgaagaatctactgtatctgaagctggtcctaaccaaacgtttgaggttccaaataaaatcatcaacagagcaaaggaaactctgaagattgatattcttcacaaacaagcttcaggaaatattgtatatggggtatttatgctacataagaaaacagtaaatcagaagaccacaatctacgaaattcaggatgatagaggaaaaatggatgtagtggggacaggacaatgtcacaatatcccctgtgaagaaggagataagctccaacttttctgctttcgacttagaaaaaagaaccagatgtcaaaactgatttcagaaatgcatagttttatccagataaagaaaaaaacaaacccgagaaacaatgaccccaagagcatgaagctaccccaggaacagcgtcagcttccatatccttcagaggccagcacaaccttccctgagagccatcttcggactcctcagatgccaccaacaactccatccagcagtttcttcaccaagaaaagtgaagacacaatctccaaaatgaatgacttcatgaggatgcagatactgaaggaagggagtcattttccaggaccgttcatgaccagcataggcccagctgagagccatccccacactcctcagatgcctccatcaacaccaagcagcagtttcttaaccacgaaaagtgaagacacaatctccaaaatgaatgacttcatgaggatgcagatactgaaggaagggagtcattttccaggaccgttcatgaccagcataggcccagctgagagccatccccacactcctcagatgcctccatcaacaccaagcagcagtttcttaaccacgttgaaaccaagactgaagactgaacctgaagaagtttccatagaagacagtgcccagagtgacctcaaagaagtgatggtgctgaacgcaacagaatcatttgtatatgagcccaaagagcagaagaaaatgtttcatgccacagtggcaactgagaatgaagtcttccgagtgaaggtttttaatattgacctaaaggagaagttcaccccaaagaagatcattgccatagcaaattatgtttgccgcaatgggttcctggaggtatatcctttcacacttgtggctgatgtgaatgctgaccgaaacatggagatcccaaaaggattgattagaagtgccagcgtaactcctaaaatcaatcagctttgctcacaaactaaaggaagttttgtgaatggggtgtttgaggtacataagaaaaatgtaaggggtgaattcacttattatgaaatacaagataatacagggaagatggaagtggtggtgcatggacgactgaccacaatcaactgtgaggaaggagataaactgaaactcacctgctttgaattggcaccgaaaagtgggaataccggggagttgagatctgtaattcatagtcacatcaaggtcatcaagaccaggaaaaacaagaaagacatactcaatcctgattcaagtatggaaacttcaccagactttttcttctaaaatctggatgtcattgacgataatgtttatggagataaggtctaagtgcctaaaaaaatgtacatatacctggttgaaatacaacactatacatacacaccaccatatatactagctgttaatcctatggaatggggtattgggagtgcttttttaatttttcatagtttttttttaataaaatggcatattttgcatctacaacttctataatttgaaaaaataaataaacattatcttttttgtg

SEQ ID NO: 82235 - DNA, 2202 bp, Artificial Sequence
  derived and/or modified sequence
atgtctgtgaagatgggcaagaagtacaagaacatcgtgctgctgaagggcctggaggtgatcaatgactaccacttcaggatggtgaagagcctgctgagcaatgacctgaagctgaacctgaagatgagggaggagtatgacaagatccagattgctgacctgatggaggagaagttcagaggagatgctggcctgggcaagctgatcaagatctttgaggacatccccaccctggaggacctggccgagaccctgaagaaggagaagctgaaggtgaagggccctgccctgagcaggaagaggaagaaggaggtggatgccaccagccctgcccccagcaccagcagcacagtgaagacagaaggagctgaggccacccctggggcccagaaccccaagacagtggccaagtgccaggtgacccccaggagaaatgtgctgcagaagaggcctgtgattgtgaaggtgctgagcaccaccaagccctttgaatatgagaccccagagatggagaagaagatcatgttccacgccaccgtggccacccagacccagttcttccacgtgaaggtgctgaacaccagcctgaaggagaagttcaacgggaagaagatcatcatcatcagtgactacctggagtatgacagcctgctggaggtgaatgaggagagcacagtgtctgaggccggccccaaccagacctttgaggtgcccaacaagatcatcaacagagccaaggagaccctgaagattgacatcctgcacaagcaggccagcggcaacatcgtgtatggagtcttcatgctgcacaagaagacagtgaaccagaagaccaccatctatgagatccaggatgaccggggcaagatggatgtggtgggcaccggccagtgccacaacatcccctgtgaggagggggacaagctgcagctgttctgcttccggctgaggaagaagaaccagatgagcaagctgatcagcgagatgcacagcttcatccagatcaagaagaagaccaaccccagaaataatgaccccaagtccatgaagctgccccaggagcagaggcagctgccctaccccagcgaggccagcaccaccttccctgagagccacctgcggaccccccagatgccacccaccacccccagcagcagcttcttcaccaagaagtctgaggacaccatcagcaagatgaatgacttcatgaggatgcagatcctgaaggagggcagccacttccctggccccttcatgaccagcatcggccctgctgagagccacccccacaccccccagatgccacccagcacccccagcagcagcttcctgaccaccaagtctgaggacaccatcagcaagatgaatgacttcatgaggatgcagatcctgaaggagggcagccacttccctggccccttcatgaccagcatcggccctgctgagagccacccccacaccccccagatgccacccagcacccccagcagcagcttcctgaccaccctgaagccccggctgaagacagagcctgaggaggtgtccattgaggacagcgcccagagcgacctgaaggaggtgatggtgctgaatgccacagagagctttgtgtatgagcccaaggagcagaagaagatgtttcatgccaccgtggccacagaaaatgaggtgttccgggtgaaggtgttcaacatcgacctgaaggagaagttcacccccaagaagatcatcgccatcgccaactacgtgtgcagaaatggcttcctggaggtgtaccccttcaccctggtggctgatgtgaatgctgacaggaacatggagatccccaagggcctcatccgcagcgcctctgtgacccccaagatcaaccagctgtgcagccagaccaagggcagctttgtgaatggagtgtttgaggtgcacaagaagaatgtgcggggggagttcacctactatgagatccaggacaacacaggcaagatggaggtggtggtgcacggccgcctgaccaccatcaactgtgaggagggggacaagctgaagctgacctgctttgagctggcccccaagagcggcaacacaggagagctgcggagcgtcatccacagccacatcaaggtgatcaagaccaggaagaacaagaaggacatcctgaacccagacagctccatggagaccagcccagacttcttcttctag

SEQ ID NO: 82236 - DNA, 2202 bp, Artificial Sequence
  derived and/or modified sequence
atgagcgtgaagatgggcaagaagtacaagaacatcgtgctgctgaagggtctggaggttatcaacgattatcactttcggatggtgaagagcctgctgtccaatgatctgaaattgaacctgaagatgcgcgaagagtacgacaagattcagatagctgatctgatggaggaaaaatttcgcggggatgcaggcctgggcaaactaataaagatcttcgaagatatacctaccttggaggatcttgcagaaaccttaaaaaaagagaaattaaaagttaaaggcccagccctgagcagaaagagaaagaaagaggtggatgctaccagccccgcccccagtacgtcatctactgtgaagactgaaggtgccgaagccacccccggggctcagaatccgaagaccgtagctaagtgtcaagtcactccgaggagaaatgtgctgcagaaacgcccagtgattgtgaaggtgctttccacgaccaaacctttcgagtacgaaacccctgagatggaaaaaaagatcatgttccacgcgactgtcgccactcagactcagttctttcacgttaaagtgttgaacaccagtttgaaggagaagtttaacggaaaaaaaattattattattagcgactatctcgagtatgacagcctgctcgaagtcaacgaggaatctaccgtttccgaagccgggcccaatcagacatttgaagttccgaataaaataataaatagagccaaagaaacactgaaaatcgatattctccataagcaggctagtggtaatatcgtgtatggcgtttttatgctgcacaagaaaaccgtgaatcagaagacaacaatctatgaaatccaggatgatcgcggaaaaatggatgttgtaggaactgggcagtgccataacattccttgcgaggagggggataagttgcagttattctgctttcgactgcgaaagaaaaatcagatgagcaaacttatctccgaaatgcacagtttcatccaaattaaaaagaagactaacccccgaaacaatgatcccaagtctatgaagctccctcaggagcaaaggcagctcccatacccttcagaagcttccaccaccttccccgagtcacacctgcgcacccctcaaatgccaccgacgaccccttcctcaagctttttcactaaaaagtcagaagataccatctcaaaaatgaatgacttcatgaggatgcagatccttaaagaaggctctcactttcccgggccctttatgacaagcataggccccgcagagtcccaccctcacaccccccaaatgcccccatctaccccaagctcctcctttcttacaaccaaaagcgaagatacaatttctaagatgaacgactttatgcggatgcagatccttaaagagggcagccactttccaggaccatttatgactagtattgggccagctgagagccacccccacacgcctcagatgcctccttcgactccaagctcctctttcctgacaacactgaaaccaagactgaagactgagcccgaagaagtatcgattgaagactccgcccagtccgatctgaaagaggttatggtgctgaatgcaacagagtcttttgtgtacgaaccaaaagagcagaagaaaatgtttcatgctaccgtcgctactgagaatgaggtgtttagggtgaaggtgtttaacatcgacctgaaggaaaagttcacaccgaagaagataattgctattgctaactatgtgtgtcggaacggtttcttagaagtttatccatttacactggttgctgacgttaacgctgatcggaacatggaaatcccaaaaggtcttataagatcagccagtgtcacacccaagattaaccaactgtgcagccagactaaaggttccttcgtgaatggtgtgttcgaggtccacaaaaagaacgtgaggggtgaatttacctactacgaaatacaggataatacgggaaaaatggaggtggtagtccacggaagactcaccacaatcaattgtgaggagggcgacaagctgaaactgacttgttttgagctggccccaaagagcgggaacaccggggagctccggagtgtgatacactcccatattaaagtcattaagaccagaaaaaataaaaaagatattctgaatccagactcctcgatggagaccagtccggacttctttttttag

SEQ ID NO: 82237 - DNA, 2202 bp, Artificial Sequence
  derived and/or modified sequence
atgtccgtgaagatgggcaaaaagtataagaacatagttctgctgaagggtctggaggtgatcaacgattatcatttcaggatggtcaaaagccttctttctaatgacctgaaactcaaccttaagatgagggaggagtatgataaaatccagattgcagacctgatggaggagaaattcagaggcgacgccggactcgggaagctaattaagattttcgaagatatccccaccttggaggacctggcagaaactttgaagaaggaaaagctgaaagttaaaggtcccgctttaagtagaaagcgcaagaaagaagtagacgctacaagtccagcccctagtaccagctcaacggtaaagactgagggcgctgaggctactcccggtgcccagaacccgaaaaccgtcgctaagtgtcaggtgacacctcgcaggaacgtgctccaaaaacgtcccgtgatagtgaaggtgctctcaacgaccaaacctttcgagtatgagaccccagagatggaaaaaaagataatgtttcatgccacagtggctactcagactcagttctttcatgtgaaggtcctcaatacaagtcttaaagaaaagttcaatggcaagaaaattatcattatatcagactatctcgagtacgactcattgctcgaagtgaatgaagagtcgaccgtgtcagaagccggaccaaatcagaccttcgaggtgcctaataaaatcattaatcgggcaaaagagactctaaaaattgatatcctgcataagcaggcatctgggaatatcgtttatggagtctttatgctgcacaaaaaaactgttaaccagaagaccacaatttatgaaatccaggatgatcgcggaaagatggacgtcgtgggcaccgggcagtgccacaatatcccctgcgaagagggcgataagctacagttgttctgtttccgcttgaggaaaaaaaatcagatgtctaagctgatttcagagatgcatagttttattcagatcaagaaaaagaccaaccccagaaataatgatccaaaaagcatgaagctgcctcaggaacagagacagctcccctacccatccgaggcatccactacctttccggagagtcatctccgcactccccagatgccgcctaccacaccatccagctcgtttttcaccaagaagagcgaggatacgatctccaaaatgaacgactttatgagaatgcagatcctgaaagaggggtcccactttcctggccctttcatgacaagcataggccctgcagaaagccatccacatactcctcagatgccaccatctacaccctcgtccagcttcctcaccaccaagtctgaggatacaatatctaaaatgaacgactttatgaggatgcagattctgaaggagggctcccacttcccaggaccgttcatgacttccattgggccagcagagagccacccacacactcctcagatgccccctagcacccccagctccagctttttgaccacccttaagcccaggttgaagacagaaccagaggaagtaagcattgaggacagtgcacagtcggatctgaaagaagtgatggtcttgaatgccaccgagtcttttgtgtatgaacctaaggagcaaaagaagatgttccatgccaccgtggcgaccgagaacgaggtcttcagagtgaaagtttttaatatcgatctgaaagagaagttcacccctaagaaaattatcgccatcgcaaactacgtctgtcggaatggctttctcgaggtctacccatttaccctcgttgccgacgttaatgccgacagaaacatggagattccaaaggggctgattcgtagcgcgtctgtgaccccaaaaataaaccagctgtgtagccagactaagggatcctttgttaatggcgtttttgaggtacataagaagaacgtgcgcggagaatttacatactacgagattcaagacaatacagggaagatggaagtggtggtccatgggaggctaacaaccataaactgcgaggagggagataaactgaagctgacctgtttcgagctcgctccaaaatctggcaataccggggagctccggagtgttattcacagccacatcaaggtgatcaagacacgcaaaaataaaaaggatattctcaaccccgattcctctatggagacttctcctgacttctttttctag

SEQ ID NO: 82238 - DNA, 2202 bp, Artificial Sequence
  derived and/or modified sequence
atgagcgtgaagatgggcaagaagtacaagaacatcgtgctgctgaagggcctggaggtgatcaacgactaccacttcagaatggtgaagagcctgctgagcaacgacctgaagctgaacctgaagatgagagaggagtacgacaagatccagatcgccgacctgatggaggagaagttcagaggcgacgccggcctgggcaagctgatcaagatcttcgaggacatccccaccctggaggacctggccgagaccctgaagaaggagaagctgaaggtgaagggccccgccctgagcagaaagagaaagaaggaggtggacgccaccagccccgcccccagcaccagcagcaccgtgaagaccgagggcgccgaggccacccccggcgcccagaaccccaagaccgtggccaagtgccaggtgacccccagaagaaacgtgctgcagaagagacccgtgatcgtgaaggtgctgagcaccaccaagcccttcgagtacgagacccccgagatggagaagaagatcatgttccacgccaccgtggccacccagacccagttcttccacgtgaaggtgctgaacaccagcctgaaggagaagttcaacggcaagaagatcatcatcatcagcgactacctggagtacgacagcctgctggaggtgaacgaggagagcaccgtgagcgaggccggccccaaccagaccttcgaggtgcccaacaagatcatcaacagagccaaggagaccctgaagatcgacatcctgcacaagcaggccagcggcaacatcgtgtacggcgtgttcatgctgcacaagaagaccgtgaaccagaagaccaccatctacgagatccaggacgacagaggcaagatggacgtggtgggcaccggccagtgccacaacatcccctgcgaggagggcgacaagctgcagctgttctgcttcagactgagaaagaagaaccagatgagcaagctgatcagcgagatgcacagcttcatccagatcaagaagaagaccaaccccagaaacaacgaccccaagagcatgaagctgccccaggagcagagacagctgccctaccccagcgaggccagcaccaccttccccgagagccacctgagaaccccccagatgccccccaccacccccagcagcagcttcttcaccaagaagagcgaggacaccatcagcaagatgaacgacttcatgagaatgcagatcctgaaggagggcagccacttccccggccccttcatgaccagcatcggccccgccgagagccacccccacaccccccagatgccccccagcacccccagcagcagcttcctgaccaccaagagcgaggacaccatcagcaagatgaacgacttcatgagaatgcagatcctgaaggagggcagccacttccccggccccttcatgaccagcatcggccccgccgagagccacccccacaccccccagatgccccccagcacccccagcagcagcttcctgaccaccctgaagcccagactgaagaccgagcccgaggaggtgagcatcgaggacagcgcccagagcgacctgaaggaggtgatggtgctgaacgccaccgagagcttcgtgtacgagcccaaggagcagaagaagatgttccacgccaccgtggccaccgagaacgaggtgttcagagtgaaggtgttcaacatcgacctgaaggagaagttcacccccaagaagatcatcgccatcgccaactacgtgtgcagaaacggcttcctggaggtgtaccccttcaccctggtggccgacgtgaacgccgacagaaacatggagatccccaagggcctgatcagaagcgccagcgtgacccccaagatcaaccagctgtgcagccagaccaagggcagcttcgtgaacggcgtgttcgaggtgcacaagaagaacgtgagaggcgagttcacctactacgagatccaggacaacaccggcaagatggaggtggtggtgcacggcagactgaccaccatcaactgcgaggagggcgacaagctgaagctgacctgcttcgagctggcccccaagagcggcaacaccggcgagctgagaagcgtgatccacagccacatcaaggtgatcaagaccagaaagaacaagaaggacatcctgaaccccgacagcagcatggagaccagccccgacttcttcttctag

SEQ ID NO: 82239 - protein, 714 aa, Artificial Sequence
  derived and/or modified sequence
MIDLYEVAGIKGMFLANKKIDNQVKTFITYNKGRDWRLLQAPDTDLRGDPVHCLLPYCSLHLHLKVSENPYTSGIIASKDTAPSIIVASGNIGSELSDTDISMFVSSDAGNTWRQIFEEEHSVLYLDQGGVLVAMKHTSLPIRHLWLSFDEGRSWSKYSFTSIPLFVDGVLGEPGEETLIMTVFGHFSHRSEWQLVKVDYKSIFDRRCAEEDYRPWQLHSQGEACIMGAKRIYKKRKSERKCMQGKYAGAMESEPCVCTEADFDCDYGYERHSNGQCLPAFWFNPSSLSKDCSLGQSYLNSTGYRKVVSNNCTDGVREQYTAKPQKCPGKAPRGLRIVTADGKLTAEQGHNVTLMVQLEEGDVQRTLIQVDFGDGIAVSYVNLSSMEDGIKHVYQNVGIFRVTVQVDNSLGSDSAVLYLHVTCPLEHVHLSLPFVTTKNKEVNATAVLWPSQVGTLTYVWWYGNNTEPLITLEGSISFRFTSEGMNTITVQVSAGNAILQDTKTIAVYEEFRSLRLSFSPNLDDYNPDIPEWRRDIGRVIKKSLVEATGVPGQHILVAVLPGLPTTAELFVLPYQDPAGENKRSTDDLEQISELLIHTLNQNSVHFELKPGVRVLVHAAHLTAAPLVDLTPTHSGSAMLMLLSVVFVGLAVFVIYKFKRKIPGINVYAQMQNEKEQEMISPVSHSESRPNVPQTELRRPGQLIDEKVESQLIGE

SEQ ID NO: 82240 - DNA, 2145 bp, Artificial Sequence
  derived and/or modified sequence
atgatcgacctgtacgaggtggccggcatcaagggcatgttcctggccaacaagaagatcgacaaccaggtgaagaccttcatcacctacaacaagggcagagactggagactgctgcaggcccccgacaccgacctgagaggcgaccccgtgcactgcctgctgccctactgcagcctgcacctgcacctgaaggtgagcgagaacccctacaccagcggcatcatcgccagcaaggacaccgcccccagcatcatcgtggccagcggcaacatcggcagcgagctgagcgacaccgacatcagcatgttcgtgagcagcgacgccggcaacacctggagacagatcttcgaggaggagcacagcgtgctgtacctggaccagggcggcgtgctggtggccatgaagcacaccagcctgcccatcagacacctgtggctgagcttcgacgagggcagaagctggagcaagtacagcttcaccagcatccccctgttcgtggacggcgtgctgggcgagcccggcgaggagaccctgatcatgaccgtgttcggccacttcagccacagaagcgagtggcagctggtgaaggtggactacaagagcatcttcgacagaagatgcgccgaggaggactacagaccctggcagctgcacagccagggcgaggcctgcatcatgggcgccaagagaatctacaagaagagaaagagcgagagaaagtgcatgcagggcaagtacgccggcgccatggagagcgagccctgcgtgtgcaccgaggccgacttcgactgcgactacggctacgagagacacagcaacggccagtgcctgcccgccttctggttcaaccccagcagcctgagcaaggactgcagcctgggccagagctacctgaacagcaccggctacagaaaggtggtgagcaacaactgcaccgacggcgtgagagagcagtacaccgccaagccccagaagtgccccggcaaggcccccagaggcctgagaatcgtgaccgccgacggcaagctgaccgccgagcagggccacaacgtgaccctgatggtgcagctggaggagggcgacgtgcagagaaccctgatccaggtggacttcggcgacggcatcgccgtgagctacgtgaacctgagcagcatggaggacggcatcaagcacgtgtaccagaacgtgggcatcttcagagtgaccgtgcaggtggacaacagcctgggcagcgacagcgccgtgctgtacctgcacgtgacctgccccctggagcacgtgcacctgagcctgcccttcgtgaccaccaagaacaaggaggtgaacgccaccgccgtgctgtggcccagccaggtgggcaccctgacctacgtgtggtggtacggcaacaacaccgagcccctgatcaccctggagggcagcatcagcttcagattcaccagcgagggcatgaacaccatcaccgtgcaggtgagcgccggcaacgccatcctgcaggacaccaagaccatcgccgtgtacgaggagttcagaagcctgagactgagcttcagccccaacctggacgactacaaccccgacatccccgagtggagaagagacatcggcagagtgatcaagaagagcctggtggaggccaccggcgtgcccggccagcacatcctggtggccgtgctgcccggcctgcccaccaccgccgagctgttcgtgctgccctaccaggaccccgccggcgagaacaagagaagcaccgacgacctggagcagatcagcgagctgctgatccacaccctgaaccagaacagcgtgcacttcgagctgaagcccggcgtgagagtgctggtgcacgccgcccacctgaccgccgcccccctggtggacctgacccccacccacagcggcagcgccatgctgatgctgctgagcgtggtgttcgtgggcctggccgtgttcgtgatctacaagttcaagagaaagatccccggcatcaacgtgtacgcccagatgcagaacgagaaggagcaggagatgatcagccccgtgagccacagcgagagcagacccaacgtgccccagaccgagctgagaagacccggccagctgatcgacgagaaggtggagagccagctgatcggcgagtag

SEQ ID NO: 82241 - DNA, 2145 bp, Artificial Sequence
  derived and/or modified sequence
atgattgatttatacgaggtggctgggatcaaaggaatgttcctggcaaacaagaaaattgacaatcaagtcaaaaccttcataacttataacaagggaagagattggcgactgctacaggcccctgacaccgatctgcgtggggaccccgtccactgcctcttgccctactgctccctgcacctgcatcttaaggtcagcgaaaacccttacacatctggcatcatagcaagtaaggataccgccccatcgattatcgtagcatccggcaacattgggagcgagttgagtgatacagatatcagcatgttcgtgtctagcgacgctgggaacacatggcggcaaatattcgaagaggagcactccgttctttatcttgaccagggcggagtattagtcgccatgaaacatacctctctgccgatcaggcacctgtggctctcctttgacgagggcagatcatggagtaaatattcatttacctctattccactgtttgtggatggagttctcggagagccaggcgaagaaaccctgataatgacggtattcggccatttttcccaccggagcgagtggcagttggtcaaagtggattataagagcattttcgaccggagatgcgccgaagaggattacagaccttggcaactgcactcccaaggcgaagcttgcatcatgggagctaagcgcatttacaagaaacgtaagtctgagagaaaatgtatgcagggcaagtacgccggagcaatggagtccgagccatgcgtctgcactgaagccgacttcgactgcgattatggatacgagaggcactctaatggccagtgtcttcccgctttctggttcaatccttcatctctgagcaaggactgctcactgggtcagtcctacctcaattcaaccggctaccggaaggtcgtctccaataattgtaccgacggagttagagaacagtacaccgccaaacctcagaaatgccctggaaaggccccaagggggcttagaattgtgaccgccgatgggaagctgacggccgaacagggccacaacgtgaccctgatggtgcagctggaagagggagacgtgcagcgcacacttatccaggtcgactttggcgacggcattgccgtaagctatgtgaatctctcttcgatggaggacggtattaagcatgtctaccagaacgtgggcatctttcgcgtcaccgtgcaggtggacaattcgctcggcagcgacagtgccgttctgtatctccacgtgacttgccccctggagcacgtgcacctgagtttgccctttgtcacaactaaaaataaggaggttaacgctaccgccgtgctttggccctcccaggtgggcacattaacatacgtgtggtggtacggtaataacaccgaacctctgatcacgctggaagggtccatctccttccggttcacctccgagggcatgaacactattacagtgcaggtgagcgccggaaatgccattctgcaggacaccaagactattgctgtttatgaggaatttcggtctttgaggctctcattctcacctaacttagatgactataatcccgatatccccgaatggagacgggacattggaagggtcataaagaaatctcttgtggaagccaccggtgttcctggccagcacatcctcgtggcagttctgccgggcttacccactaccgctgagttgttcgtgctgccgtaccaggaccctgccggagaaaataagagatctactgacgatctagaacagatatccgagttgctcatccacaccctgaaccagaatagcgtgcactttgaactcaagccaggggtaagggtgctggtccacgctgctcacctgacagccgcacccctcgtagacctgacgcctacccacagtggttccgcaatgctgatgcttttgagtgtggtgttcgtggggctggcagttttcgttatctacaagtttaagcggaaaattccgggtatcaacgtttatgcccagatgcaaaacgagaaggaacaggagatgatcagcccagtcagccactctgagagcagacccaacgtgcctcagaccgagctgcgtcggcccggtcagctcatcgatgagaaggtggagtcacagctgatcggcgagtag

SEQ ID NO: 82242 - DNA, 2145 bp, Artificial Sequence
  derived and/or modified sequence
atgattgacctgtatgaggtggccggcatcaagggcatgttcctggccaacaagaagattgacaaccaggtgaagaccttcatcacctacaacaagggccgggactggaggctgctgcaggccccagacacagacctgcggggggaccctgtgcactgcctgctgccctactgcagcctgcacctgcacctgaaggtgtctgagaacccctacaccagcggcatcatcgccagcaaggacacagcccccagcatcatcgtggccagcggcaacatcggcagcgagctgagtgacacagacatctccatgtttgtgtccagtgatgctggcaacacctggaggcagatctttgaggaggagcacagcgtgctgtacctggaccagggcggcgtgctggtggccatgaagcacaccagcctgcccatccgccacctgtggctgagctttgatgagggccgctcctggagcaagtacagcttcaccagcatccccctgtttgtggatggagtgctgggggagcccggggaggagaccctcatcatgacagtgtttggccacttcagccacaggtctgagtggcagctggtgaaggtggactacaagagcatctttgaccggcgctgtgccgaggaggactaccggccctggcagctgcacagccagggcgaggcctgcatcatgggcgccaagaggatctacaagaagaggaagtctgagaggaagtgcatgcagggcaagtatgctggggccatggagagcgagccctgtgtgtgcacagaagctgactttgactgtgactatggctatgagcggcacagcaatggccagtgcctgcctgccttctggttcaaccccagcagcctgagcaaggactgcagcctgggccagagctacctgaacagcacaggctacaggaaggtggtgagcaacaactgcacagatggagtgcgggagcagtacacagccaagccccagaagtgccctgggaaggccccccggggcctgagaattgtgacagcagatggcaagctgacagctgagcagggccacaacgtgaccctgatggtgcagctggaggagggagatgtgcagaggaccctcatccaggtggactttggagatggcattgctgtgtcctatgtgaacctgagctccatggaggatggcatcaagcacgtgtaccagaatgtgggcatcttccgggtgacagtgcaggtggacaacagcctgggcagtgacagcgctgtgctgtacctgcacgtgacctgccccctggagcacgtgcacctgagcctgccctttgtgaccaccaagaacaaggaggtgaatgccacagctgtgctgtggcccagccaggtgggcaccctgacctacgtgtggtggtacggcaacaacacagagcccctcatcaccctggagggcagcatctccttccgcttcaccagcgagggcatgaacaccatcaccgtgcaggtgtctgctggaaatgccatcctgcaggacaccaagaccatcgctgtgtatgaggagttccgcagcctgcggctgtccttcagccccaacctggatgactacaacccagacatccctgagtggaggcgggacatcggccgggtcatcaagaagagcctggtggaggccaccggggtgcccggccagcacatcctggtggccgtgctgcccggcctgcccaccacagctgagctgtttgtgctgccctaccaggaccctgctggggagaacaagaggagcacagatgacctggagcagatcagcgagctgctgatccacaccctgaaccagaacagcgtgcactttgagctgaagccaggagtgcgggtgctggtgcacgccgcccacctgacagctgcccccctggtggacctgacccccacccacagcggcagcgccatgctgatgctgctgtctgtggtgtttgtgggcctggccgtgtttgtgatctacaagttcaagaggaagatccctggcatcaacgtgtatgcccagatgcagaatgagaaggagcaggagatgatcagccctgtgagccacagcgagagccggcccaacgtgccccagacagagctgcggcggcccggccagctgattgatgagaaggtggagagccagctgattggagagtag

SEQ ID NO: 82243 - DNA, 2145 bp, Artificial Sequence
  derived and/or modified sequence
atgatcgacctgtacgaggtggccggcatcaagggcatgttcctggcaaacaaaaagattgataaccaggttaaaacatttatcacttacaacaagggaagggactggaggctgctccaggcgcctgatactgatttgaggggggatcccgtgcactgcctgctgccatactgctccctgcatctccatctgaaagtttcagagaacccttacacgtcaggaatcatagcgtccaaagatacagccccctctattatcgtggctagtggaaatatcggatctgaattgtcggacaccgacatcagcatgttcgtgtccagtgacgcgggcaacacatggcggcagatcttcgaggaagagcatagcgtgctgtacctggatcagggtggcgttcttgtggctatgaagcatactagtctacccatcagacacctatggctgagctttgatgagggtagaagctggtctaagtatagctttacaagcatacctttgtttgtggatggcgtgcttggcgagcctggggaggagacactgataatgactgtatttggtcatttcagtcatagaagcgagtggcaattggtaaaggtcgactacaagtccatttttgaccggagatgcgcagaagaggactataggccgtggcagctccatagtcaaggggaggcctgcattatgggggctaaaaggatctataaaaagagaaaaagcgaacggaaatgcatgcaagggaagtacgccggggccatggagtctgaaccttgtgtctgcactgaggctgactttgactgcgactatggttatgagcggcacagcaacggtcagtgcctgccagcattttggttcaatccatcctcactgagcaaggactgctccctcggacaatcatatctgaacagcacggggtaccgcaaggtggtctccaataactgcaccgacggcgttagggagcagtacactgctaaaccacagaagtgtccagggaaggcacctaggggactgcggatcgtgacagcagatgggaaactcacggccgagcaaggtcataacgtgactctaatggttcagttagaggagggagacgtgcagcgaacactaatacaggtggacttcggggatggtattgctgtgtcgtacgtgaacctcagctccatggaggacgggatcaagcacgtttaccagaatgtaggcatcttcagagttaccgttcaggtggacaacagtttgggtagtgactccgctgtgctgtatctccacgttacctgccctctagaacacgttcacctctccttgccatttgtgacaactaagaataaagaagttaacgcaaccgcagttttatggccgtctcaggtgggcactctcacctacgtgtggtggtatggcaataacacagagcccctgatcactcttgagggcagcatctcgttcagatttacatcggagggcatgaacactattacagtccaggtcagtgctggcaacgcaatcctgcaggatacgaaaaccattgctgtctatgaggaattcaggtcactgcggttatctttctcaccaaatctggacgactacaaccctgatatcccagagtggagacgcgatatcggcagagtcatcaagaagagtctcgttgaggccaccggggtcccaggtcagcacatcttggtggccgttctcccaggactcccaactacagctgaattgttcgtgctaccataccaagaccctgccggcgagaacaaacggtctaccgatgacctggaacagatatctgagctgctgatccacaccttgaatcagaacagtgtgcacttcgagctgaaacccggcgtgcgagtgctggtgcacgccgcccatctaacagctgctccacttgttgatcttacaccaactcattccggctcagctatgttaatgcttctaagcgtggtttttgtcggtttagccgttttcgtgatttacaagttcaaacgcaaaattcctggtatcaatgtgtacgctcagatgcagaatgagaaggaacaggagatgatctctcccgtatcccactctgagtcccggcccaacgtgccacaaactgaactgcgccgccctggccaactgatagatgagaaggtggagtcacagctcatcggcgagtag

SEQ ID NO: 82244 - DNA, 2145 bp, Artificial Sequence
  derived and/or modified sequence
atgatcgacctttatgaggtcgctggaattaagggtatgttccttgcgaataaaaagatcgataaccaggttaagacgtttattacttacaataaaggaagggactggaggcttctgcaggctccagacacagatttacgaggggaccccgtgcattgtctgctaccctactgctccctgcacctccacctgaaagtgtctgagaatccttatacctcaggtatcatcgcctctaaggatactgctcctagcatcattgtggcctccggaaacattggatcggagctgtcagatacagacatcagcatgtttgtgagctccgatgccggtaatacatggcgccagatctttgaagaggaacacagcgtcttatatctggaccaaggtggagtgcttgtggcgatgaagcataccagtttgcccatcagacatctctggttatctttcgatgaaggcaggtcttggtctaagtacagttttacttcgatccccctttttgtagatggggtgctaggggaacccggagaggagactctgatcatgacagtattcgggcacttcagccatagatcggagtggcagctggtcaaggttgactacaagtctattttcgatcggaggtgtgcagaggaggactacaggccatggcaacttcactcacagggcgaagcgtgcattatgggggcaaaaaggatttataagaaacgcaaaagcgagagaaaatgcatgcagggaaagtatgcaggagccatggagagtgagccttgcgtgtgtacagaggccgactttgattgcgactacggctacgagcggcattcaaatggtcagtgtctgccagctttctggtttaaccccagcagtctttcaaaagactgcagtctcgggcagtcatatctgaacagcacaggttatcggaaagtggtgtccaacaattgtaccgatggggttcgtgagcaatacaccgcaaagcctcagaaatgtccaggaaaggcccctcggggtctccgcattgtgaccgccgacggcaagctgacagctgagcagggccacaatgttactttgatggtccagcttgaggagggagatgtacagcggacactcatccaggtggattttggcgatggaattgctgtgtcatatgttaacttgtcatctatggaggacggaatcaagcacgtgtaccagaacgttgggatcttccgcgtcaccgtgcaggtggacaactctctgggtagcgattcagcagtgttatacctgcacgtcacttgtcctctagaacatgttcacctgtctttgcccttcgtgactactaaaaataaggaggtcaacgccacagccgtcctctggccatctcaggtcggcactctgacttacgtatggtggtacgggaataacactgagcctttaataacccttgagggctccatttcattccggtttacatccgagggtatgaacacgattacggtccaagtgtcggcagggaacgctattttgcaggacactaagactattgctgtgtacgaagaattcagatcgctcaggctgtcatttagccccaacctggatgattataacccagatatcccagagtggcgcagggacatcgggagggttatcaagaaaagcctggtcgaggccacaggcgtacctggacaacatatccttgtcgccgttctgcccggtctgccaactacggccgagttgttcgtgcttccttaccaggaccccgctggggagaataagcgcagtacagacgacttagagcagatttccgaacttctgattcataccctcaaccagaacagcgtccacttcgaactgaaacctggagttcgcgttttggtccatgcagcccatctcacagccgctccgctagtggatctcacacccactcactcagggtccgctatgctgatgctcctgtccgttgtctttgtgggtttggccgtattcgtgatttacaagttcaaaaggaaaatccctggcatcaatgtgtacgcacagatgcaaaacgagaaggagcaggagatgatctcacccgttagccattctgaatctaggccaaacgtcccgcagactgaactgcggagacctgggcagctcatcgatgagaaagtcgagtctcagcttattggcgagtag

SEQ ID NO: 82245 - DNA, 2638 bp, Artificial Sequence
  derived and/or modified sequence
gttcgcagcggtccaagaatggaaccagaatgacacgtacaacctctacatctcagacacacgtggtgtctacttcaccctggccttggagaatgtccagagcagcagaggccctgagggcaacatcatgatcgacctctatgaggtagcagggataaagggaatgttcttggctaacaagaagattgacaaccaagtgaagactttcatcacatataacaaaggcagagactggcgtttgctgcaggcgccggacacggatctaaggggggaccccgtgcactgcttgctgccctattgctcactacaccttcacctgaaggtctctgagaatccctacacatcagggatcattgccagcaaagacacagctccaagcatcatagtggcatcaggtaatataggttctgaattgtcagacactgacatcagcatgtttgtctcttcagatgcagggaacacctggagacagatctttgaagaagagcacagtgttttgtacctggatcaaggtggagtcctggttgctatgaaacacacatctctcccaattcgacatctttggttgagttttgatgaagggagatcttggagcaaatacagtttcacatctattccactttttgtggatggggttctgggtgagcctggagaagagactctcatcatgacagtgtttggacacttcagccaccgctctgaatggcagctggtcaaagtagattacaagtccatttttgatagacggtgtgccgaagaggactacagaccttggcagctgcacagccagggggaagcatgtatcatgggagcaaaaaggatatataagaagcgaaaatcagagcggaagtgtatgcaaggaaaatatgcaggagctatggaatctgaaccctgtgtctgcactgaggctgattttgattgcgactatggttatgagcgacacagcaatggccagtgcctgccggcattttggttcaatccatcctctctgtcaaaggattgcagcttgggacagagttacctcaatagtactgggtacaggaaggtggtttccaataattgcactgatggcgtaagggaacagtacactgccaaaccgcagaagtgcccagggaaagccccgcgggggctgcggatagtcacggctgatggaaagctgacagcggaacaaggacacaacgtcactctcatggtgcaattagaagagggtgatgttcagcggacactcatccaagtggactttggcgatggtatcgcggtgtcttacgtcaatctcagctccatggaagatgggatcaaacacgtctatcagaacgtgggcattttccgtgtgaccgtgcaggtggacaacagtctgggttctgacagcgccgtcctgtacttacatgtaacttgtcccttggagcacgtgcacctgtctcttccctttgtcaccacaaagaacaaagaggtcaatgcgacggcagtgctgtggcccagccaagtgggcaccctcacttacgtgtggtggtacggaaacaacacggagcctttgatcaccttggagggaagcatatccttcagatttacttcagaaggaatgaataccatcacagtgcaggtctcagctgggaatgccatcctacaagacacaaagaccatcgcagtatatgaggaattccggtctcttcgcttgtccttttctccaaacctggatgactacaacccggacatccctgagtggaggagggacatcggtcgagtcatcaaaaaatccctggtggaagccacaggggttccaggccagcacatcctggtggcggtgctccctggcttacccaccactgctgaactctttgtcctaccctatcaggatccagctggagaaaacaaaaggtcaactgatgacctggagcagatatcagaattgctgatccacacgctcaaccaaaactcagtacacttcgagctgaagccaggagtccgagtccttgtccatgctgctcacttaacagcggcccccctggtggacctcactccaacccacagtggatctgccatgctgatgctgctctcagtggtgtttgtggggctggcagtgttcgtcatctacaagtttaaaaggaagatcccggggattaatgtttatgcccagatgcagaatgagaaagaacaagagatgatcagtccagtcagtcactctgaaagcaggcccaatgtccctcagactgaactaaggaggcctggccagcttatagatgagaaggtggaatcccagctcataggagagtagctttaccctcccctccctccccttctactcaacctggtgactcatctctccgattgcaaagagcaagacacgccactccgccttcaacgccaaagcggggatctgctggggcacagtatgcaatttaaggaaaacccccaaaggctacaggcgacctgctgatcaggaaagaatttcgctcttgtcaagtacatcatccttcatgaccactaactttgtgttttttttctttcctttgttgttctgtttcctattttgccaggaagtatttccatagttgctgagaatcaaagcacaaaagaaatccctacctatgtaaatgtttgaatggaggacgccagtaaaaaaacaaaaacaaaaacaaaa

SEQ ID NO: 82246 - protein, 334 aa, Artificial Sequence
  derived and/or modified sequence
MPSKESWSGRKTNRAAVHKSKQEGRQQDLLIAALGMKLGSPKSSVTIWQPLKLFAYSQLTSLVRRATLKENEQIPKYEKIHNFKVHTFRGPHWCEYCANFMWGLIAQGVKCADCGLNVHKQCSKMVPNDCKPDLKHVKKVYSCDLTTLVKAHTTKRPMVVDMCIREIESRGLNSEGLYRVSGFSDLIEDVKMAFDRDGEKADISVNMYEDINIITGALKLYFRDLPIPLITYDAYPKFIESAKIMDPDEQLETLHEALKLLPPAHCETLRYLMAHLKRVTLHEKENLMNAENLGIVFGPTLMRSPELDAMAALNDIRYQRLVVELLIKNEDILF

SEQ ID NO: 82247 - DNA, 1005 bp, Artificial Sequence
  derived and/or modified sequence
atgccgagcaaggaaagttggtctgggcgcaaaacgaatcgagctgctgtccataagtcaaagcaagaaggcaggcagcaggaccttttgattgcagccttaggtatgaaactggggtcacccaagtcttccgtgaccatctggcaacccttaaagctgtttgcatacagtcaactcacatcacttgtgaggcgggcaactctcaaggagaatgagcagattccaaaatatgaaaagattcacaacttcaaggtccacaccttcaggggtcctcattggtgcgagtactgcgcgaacttcatgtggggccttatagctcagggggtgaaatgcgccgattgcgggctcaacgtgcacaagcagtgtagcaagatggtgccaaatgactgtaaacctgacctgaaacacgtaaaaaaagtgtactcctgcgacttgacgacgctggtgaaggcacacactacaaaacgcccgatggtcgtggacatgtgcatcagggagatcgagagcagagggctcaattctgaggggctctaccgggtttccgggttctccgacctgatagaggacgtgaagatggcatttgatcgggatggcgagaaagcggacattagcgtgaatatgtatgaggatatcaacatcatcacgggagcgctcaagctctatttccgagacctgcccattccgctgattacttatgacgcatacccaaaattcatcgagtccgcgaagattatggatcccgatgagcagttggagactttgcatgaggcactaaagttgcttcccccagcccactgtgaaactctccgttacctgatggcccacctaaagagagtgaccctacacgagaaggagaatctcatgaacgccgaaaatttaggaatcgttttcggacccacgcttatgaggtccccggagttggacgctatggctgcattaaacgacattaggtatcaacgtcttgtggttgaactgctcataaagaacgaggatattcttttttag

SEQ ID NO: 82248 - DNA, 1005 bp, Artificial Sequence
  derived and/or modified sequence
atgcccagcaaggagagctggagcggcaggaagaccaacagagctgctgtgcacaagagcaagcaggagggccggcagcaggacctgctgattgctgccctgggcatgaagctgggcagccccaagagctctgtgaccatctggcagcccctgaagctgtttgcctacagccagctgaccagcctggtgcggcgggccaccctgaaggaaaatgagcagatccccaagtatgagaagatccacaacttcaaggtgcacaccttccggggcccccactggtgtgagtactgtgccaacttcatgtggggcctgattgcccagggcgtgaagtgtgccgactgtggcctgaatgtgcacaagcagtgcagcaagatggtgcccaatgactgcaagccagacctgaagcacgtgaagaaggtgtacagctgtgacctgaccaccctggtgaaggcccacaccaccaagaggcccatggtggtggacatgtgcatccgggagattgagagccggggcctgaacagcgagggcctgtacagagtgtctggcttcagtgacctgattgaagatgtgaagatggcctttgacagagatggagagaaggctgacatctctgtgaacatgtatgaggacatcaacatcatcactggagccctgaagctgtacttccgggacctgcccatccccctcatcacctatgatgcctaccccaagttcattgaaagtgccaagatcatggaccctgatgagcagctggagaccctgcacgaggccctgaagctgctgcccccagcccactgtgagaccctgcgctacctgatggcccacctgaagagggtgaccctgcacgagaaggagaacctgatgaatgctgagaacctgggcatcgtgtttggccccaccctgatgaggagccctgagctggatgccatggccgccctgaatgacatccgctaccagaggctggtggtggagctgctgatcaagaatgaagacatcctcttctag

SEQ ID NO: 82249 - DNA, 1005 bp, Artificial Sequence
  derived and/or modified sequence
atgcccagcaaggagagctggagcggccggaagaccaaccgggccgcagttcacaagtctaagcaggaaggtcgccagcaggacttattgatagctgccctcgggatgaaactggggagtccgaaatcttcagtcactatttggcagccattgaaactttttgcatatagccagcttacgtcgttggtgagaagggctacactcaaagaaaacgagcaaatcccaaagtatgagaagatacataatttcaaagtgcatacctttaggggtccccattggtgcgagtactgcgcaaatttcatgtggggactcatagctcagggcgtgaagtgtgctgactgtgggctgaatgtccataaacagtgttctaagatggtgcccaatgattgcaaacctgacttgaagcacgtcaaaaaggtatacagctgcgatctcaccaccctggttaaggcccataccaccaaacgtcctatggtggtggacatgtgcatccgtgagatcgaatccaggggcttgaattccgaaggactctatagagtgagcggcttctcagatctgatagaagacgtcaagatggcgttcgatcgggacggcgaaaaggcggacatttcggtgaacatgtacgaggacataaatattattaccggagctctcaaactctatttccgtgatctccccattcccctgattacctacgatgcatacccaaagtttatagagtctgccaagattatggatcccgacgagcaactcgaaacactgcacgaagccctaaagctgctgccgcccgctcactgcgaaaccttgcgctatctgatggcgcatctgaagagggtgacactgcatgagaaggagaacttaatgaacgcagaaaacctgggcatcgtgttcggcccaacactgatgcgatcccccgagctcgatgccatggcagcgctcaacgatatcagataccagagactggtcgttgaactgcttattaagaatgaggacatcttattttag

SEQ ID NO: 82250 - DNA, 1005 bp, Artificial Sequence
  derived and/or modified sequence
atgccttcaaaggaatcctggtctgggaggaagacaaaccgtgccgcagttcataaatcaaagcaggaaggcagacagcaggatctgctaattgctgcactgggaatgaaacttggcagccccaaaagctccgtgacgatatggcagccactgaagctattcgcctacagccagctgacaagcctcgtgcgacgtgctaccctgaaagaaaatgaacaaatccctaagtacgaaaaaatccacaactttaaggtgcacacatttagaggcccacactggtgcgagtactgtgctaactttatgtggggtcttatcgcccaaggggtcaaatgtgcggattgcggtctgaatgttcataagcagtgcagcaagatggtgccgaatgattgtaaacctgatctgaaacatgtgaagaaagtttattcctgcgatcttactaccctggtaaaggcccacactaccaagcggcctatggtggttgatatgtgtattcgggagatagaatctagaggacttaatagcgaaggcctttacagagtttcaggtttctccgatctgatcgaagacgttaaaatggcctttgatcgcgacggtgagaaggcagacatctctgtcaatatgtatgaggatatcaacattatcaccggcgcactgaagctgtatttccgggacctccctattcctcttataacatatgacgcttatcctaagttcatcgaatctgcgaagatcatggacccagacgagcaactggagaccctacacgaagcactgaagctgcttcctcccgctcactgtgagaccttgagatatctaatggctcacttgaagagggtgactctgcacgagaaggagaaccttatgaatgcagaaaatttgggcatcgtgtttggtcctaccttgatgcgttccccggagctcgacgcaatggcagctctcaacgatatccgctaccagcggctggtcgttgagttgttaatcaaaaatgaggacatactgttttag

SEQ ID NO: 82251 - DNA, 2047 bp, Artificial Sequence
  derived and/or modified sequence
agtatgtaggcatctttcattcagaatggacattaatatcttgaatagagaagaaagcttttagaaatgtatcatttgtcaaaattgcatgccttttaaaaaatgataaagagagatgctgagtgttttgtatgttagcatcgactctttctttttatttctgttcagactcaagtttttagaagctagaatatagatccctttaagaaaaaaaaaggaagaaagaagaatttgctggttagtcgacctctgtttaagaagtgcttcatcctcctcctccacctctccgtggtgtttctctgcagctctctgtaggttagggttctgtgctgcctggcagaatgctcatgtgttagctgaatagatatcatcgacagacatagaccactataggttttctttccttgtgaattccaaaatgccatccaaagagtcttggtcagggaggaaaactaatagggctgcagttcacaaatcaaaacaagagggccgtcagcaagatttattgatagcagccttgggaatgaaactgggttctccaaagtcgtctgtgacaatctggcaacctctgaaactctttgcttattcgcagttgacatcacttgttagaagagcaactctgaaagaaaacgagcaaattccaaaatatgaaaagattcacaatttcaaggtgcatacattcagagggccacactggtgtgaatactgtgccaactttatgtggggtctcattgctcagggagtgaaatgtgcagattgtggtttgaatgttcataagcagtgttccaagatggtcccaaatgactgtaagccagacttgaagcatgtcaaaaaggtgtacagctgtgaccttacgacgctcgtgaaagcacataccactaagcggccaatggtggtagacatgtgcatcagggagattgagtctagaggtcttaattctgaaggactataccgagtatcaggatttagtgacctaattgaagatgtcaagatggctttcgacagagatggtgagaaggcagatatttctgtgaacatgtatgaagatatcaacattatcactggtgcacttaaactgtacttcagggatttgccaattccactcattacatatgatgcctaccctaagtttatagaatctgccaaaattatggatccggatgagcaattggaaacccttcatgaagcactgaaactactgccacctgctcactgcgaaaccctccggtacctcatggcacatctaaagagagtgaccctccacgaaaaggagaatcttatgaatgcagagaaccttggaatcgtctttggacccacccttatgagatctccagaactagacgccatggctgcattgaatgatatacggtatcagagactggtggtggagctgcttatcaaaaacgaagacattttattttaaatttttaatttgaggggaaaagaaatgttttacagatgaaggaatgttttatagtaatttaatttgctcctgtagctgcattatttcttgattagaggtttgggcatataaccagattaaagtgaaggaactttctgttgtttttgtagcaccgctcagctgtcttgtaaaacagtgaacacacgctttctggttctagtaatcctgggtgtttatcacgttcagagaaactcaagctattgcatgattagccccctatctggcaaggaaaccccatacagaagaaacaacaaacctgcgcctgcaccgcctctgcgtcctgggtagtctgtgcttgtaatccagcatgtttcacagagtaagcctgttgtgactttgcttttggggtctatgtcattggtttctgatgcttgtacaaacacgcacacacaaatggataaaacagcacctctggctgttacattaccataaaccatatcacatgcctacattttacaaatgatttctggtttctcttagttcttctctaacatagtactttctttccagcaaaagcaaaatgtgttttcagatttgttactttaataaaggttatccataccaataaaaagtgtacaacacagc

SEQ ID NO: 82252 - DNA, 1005 bp, Artificial Sequence
  derived and/or modified sequence
atgcccagcaaggagagctggagcggcagaaagaccaacagagccgccgtgcacaagagcaagcaggagggcagacagcaggacctgctgatcgccgccctgggcatgaagctgggcagccccaagagcagcgtgaccatctggcagcccctgaagctgttcgcctacagccagctgaccagcctggtgagaagagccaccctgaaggagaacgagcagatccccaagtacgagaagatccacaacttcaaggtgcacaccttcagaggcccccactggtgcgagtactgcgccaacttcatgtggggcctgatcgcccagggcgtgaagtgcgccgactgcggcctgaacgtgcacaagcagtgcagcaagatggtgcccaacgactgcaagcccgacctgaagcacgtgaagaaggtgtacagctgcgacctgaccaccctggtgaaggcccacaccaccaagagacccatggtggtggacatgtgcatcagagagatcgagagcagaggcctgaacagcgagggcctgtacagagtgagcggcttcagcgacctgatcgaggacgtgaagatggccttcgacagagacggcgagaaggccgacatcagcgtgaacatgtacgaggacatcaacatcatcaccggcgccctgaagctgtacttcagagacctgcccatccccctgatcacctacgacgcctaccccaagttcatcgagagcgccaagatcatggaccccgacgagcagctggagaccctgcacgaggccctgaagctgctgccccccgcccactgcgagaccctgagatacctgatggcccacctgaagagagtgaccctgcacgagaaggagaacctgatgaacgccgagaacctgggcatcgtgttcggccccaccctgatgagaagccccgagctggacgccatggccgccctgaacgacatcagataccagagactggtggtggagctgctgatcaagaacgaggacatcctgttctag

SEQ ID NO: 82253 - protein, 428 aa, Artificial Sequence
  derived and/or modified sequence
MAVGASGLEGDKMAGAMPLQLLLLLILLGPGNSLQLWDTWADEAEKALGPLLARDRRQATEYEYLDYDFLPETEPPEMLRNSTDTTPLTGPGTPESTTVEPAARRSTGLDAGGAVTELTTELANMGNLSTDSAAMEIQTTQPAATEAQTTQPVPTEAQTTPLAATEAQTTRLTATEAQTTPLAATEAQTTPPAATEAQTTQPTGLEAQTTAPAAMEAQTTAPAAMEAQTTPPAAMEAQTTQTTAMEAQTTAPEATEAQTTQPTATEAQTTPLAAMEALSTEPSATEALSMEPTTKRGLFIPFSVSSVTHKGIPMAASNLSVNYPVGAPDHISVKQCLLAILILALVATIFFVCTVVLAVRLSRKGHMYPVRNYSPTEMVCISSLLPDGGEGPSATANGGLSKAKSPGLTPEPREDREGDDLTLHSFLP

SEQ ID NO: 82254 - protein, 412 aa, Artificial Sequence
  derived and/or modified sequence
MPLQLLLLLILLGPGNSLQLWDTWADEAEKALGPLLARDRRQATEYEYLDYDFLPETEPPEMLRNSTDTTPLTGPGTPESTTVEPAARRSTGLDAGGAVTELTTELANMGNLSTDSAAMEIQTTQPAATEAQTTQPVPTEAQTTPLAATEAQTTRLTATEAQTTPLAATEAQTTPPAATEAQTTQPTGLEAQTTAPAAMEAQTTAPAAMEAQTTPPAAMEAQTTQTTAMEAQTTAPEATEAQTTQPTATEAQTTPLAAMEALSTEPSATEALSMEPTTKRGLFIPFSVSSVTHKGIPMAASNLSVNYPVGAPDHISVKQCLLAILILALVATIFFVCTVVLAVRLSRKGHMYPVRNYSPTEMVCISSLLPDGGEGPSATANGGLSKAKSPGLTPEPREDREGDDLTLHSFLP

SEQ ID NO: 82255 - protein, 101 aa, Artificial Sequence
  derived and/or modified sequence
MQQQQQLASARNRRLAQQMENRPSVQAALKLKQKSLKQRLGKSNIQARLGRPIGALARGAIGGRGLPIIQRGLPRGGLRGGRATRTLLRGGMSLRGQCCVP

SEQ ID NO: 82256 - protein, 300 aa, Artificial Sequence
  derived and/or modified sequence
MILEGGGVMNLNPGNNLLHQPPAWTDSYSTCNVSSGFFGGQWHEIHPQYWTKYQVWEWLQHLLDTNQLDANCIPFQEFDINGEHLCSMSLQEFTRAAGTAGQLLYSNLQHLKWNGQCSSDLFQSTHNVIVKTEQTEPSIMNTWKDENYLYDTNYGSTVDLLDSKTFCRAQISMTTTSHLPVAESPDMKKEQDPPAKCHTKKHNPRGTHLWEFIRDILLNPDKNPGLIKWEDRSEGVFRFLKSEAVAQLWGKKKNNSSMTYEKLSRAMRYYYKREILERVDGRRLVYKFGKNARGWRENEN

SEQ ID NO: 82257 - protein, 322 aa, Artificial Sequence
  derived and/or modified sequence
MGLPERRGLVLLLSLAEILFKIMILEGGGVMNLNPGNNLLHQPPAWTDSYSTCNVSSGFFGGQWHEIHPQYWTKYQVWEWLQHLLDTNQLDANCIPFQEFDINGEHLCSMSLQEFTRAAGTAGQLLYSNLQHLKWNGQCSSDLFQSTHNVIVKTEQTEPSIMNTWKDENYLYDTNYGSTVDLLDSKTFCRAQISMTTTSHLPVAESPDMKKEQDPPAKCHTKKHNPRGTHLWEFIRDILLNPDKNPGLIKWEDRSEGVFRFLKSEAVAQLWGKKKNNSSMTYEKLSRAMRYYYKREILERVDGRRLVYKFGKNARGWRENEN

SEQ ID NO: 82258 - DNA, 969 bp, Artificial Sequence
  derived and/or modified sequence
atgggtttgcccgagcgtcggggtctcgttctcttgttgtccctggcagagatactgttcaagattatgatcctggaaggaggcggcgtaatgaatctgaatccaggcaataatctgttgcaccagccaccagcctggaccgactcctattcaacatgcaatgtgagctcgggattttttggtgggcagtggcacgaaatccatccccagtactggacgaagtatcaagtctgggagtggctgcagcacctattagacaccaaccagctggatgctaattgcatcccatttcaggagtttgacattaacggggagcacctgtgtagcatgtcgctgcaggaattcacccgggccgcgggaaccgcgggacaactcttgtactccaacctgcagcatctgaagtggaatggacagtgttccagcgatctattccagtctactcacaacgtgatcgtgaaaacagagcaaacggagccaagcattatgaatacttggaaggacgagaattatctttacgacaccaactacgggtccactgtggatcttctcgatagcaaaacattctgtagggcacagattagcatgactacgactagtcacttgccagtggctgagagccctgatatgaaaaaagagcaggatcctccagctaagtgccacaccaagaagcataatccccgggggacccacctctgggagttcatcagggatattctgcttaacccagacaagaatcctggactgattaagtgggaagatcggagcgaaggagtgttccgttttctgaagtcagaggcggtggctcagctgtggggtaagaagaagaataattcaagcatgacttacgagaagttatcgagagccatgagatattactacaaacgggagatccttgaacgggtcgatggacgtcgcctcgtgtataagttcggcaagaatgccaggggatggagagagaacgagaattag

SEQ ID NO: 82259 - DNA, 969 bp, Artificial Sequence
  derived and/or modified sequence
atgggcctgcctgagcggcggggcctggtgctgctgctgagcctggccgagatcctcttcaagatcatgatcctggagggcggcggcgtgatgaacctgaaccctggcaacaacctgctgcaccagcccccagcctggacagacagctacagcacctgcaatgtgagcagcggcttcttcggcggccagtggcatgagatccacccccagtactggaccaagtaccaggtgtgggagtggctgcagcacctgctggacaccaaccagctggatgccaactgcatccccttccaggagtttgacatcaatggagagcacctgtgcagcatgagcctgcaggagttcaccagggctgctggaacagctggccagctgctgtacagcaacctgcagcacctgaagtggaatggccagtgcagcagtgacctcttccagagcacccacaacgtgattgtgaagacagagcagacagagcccagcatcatgaacacctggaaggatgagaactacctgtatgacaccaactacggcagcacagtggacctgctggacagcaagaccttctgccgggcccagatctccatgaccaccaccagccacctgcctgtggccgagagcccagacatgaagaaggagcaggaccccccagccaagtgccacaccaagaagcacaacccccggggcacccacctgtgggagttcatccgggacatcctgctgaacccagacaagaaccctggcctcatcaagtgggaggacagaagtgaaggagtcttccgcttcctgaagtctgaggccgtggcccagctgtggggcaagaagaagaacaacagctccatgacctatgagaagctgagccgggccatgagatactactacaagcgggagatcctggagcgggtggatggccggcggctggtgtacaagtttgggaagaatgcccggggctggagagaaaatgaaaattag

SEQ ID NO: 82260 - DNA, 969 bp, Artificial Sequence
  derived and/or modified sequence
atgggcctgcccgagcggcggggcctggtgctgctgctgagcctggctgaaattttgttcaaaataatgatattagaagggggaggggtgatgaatctcaatcccggtaacaatctgttgcatcaaccgcccgcttggaccgactcttacagcacttgtaatgtgtcttccggattctttggggggcagtggcacgagatccaccctcagtattggaccaagtaccaggtgtgggagtggctgcagcatctgctggacacaaatcagctcgatgcaaactgcatcccatttcaagagttcgacattaacggtgagcacctttgctcgatgagcctccaagaattcactagagctgcagggactgctggccagctgctgtacagcaatctccagcacttgaagtggaacggccagtgttcatccgacctttttcagtccacccataacgttattgtaaagaccgaacagactgagcctagtatcatgaacacctggaaagatgagaattatctttatgacacgaattatggcagtactgtggacctacttgattctaaaaccttctgcagagcacaaatttccatgacaactacctcccacttacccgtcgccgaatctccagacatgaagaaagaacaagatccacctgctaagtgtcacacgaaaaagcataaccctcggggtacccacttgtgggagttcatcagggacattcttcttaaccccgacaagaatcctggcctgatcaaatgggaagatagatctgagggcgtgttccggttcctgaaaagtgaggctgtggcacagttatggggaaagaagaagaacaactcatcgatgacctacgagaaattgagccgggcaatgaggtactattataagagagagatcttagagcgcgtggacggcaggcgtctggtgtacaaatttggcaagaatgcgcgcggctggagagagaatgaaaattag

SEQ ID NO: 82261 - DNA, 969 bp, Artificial Sequence
  derived and/or modified sequence
atgggtctgcccgagaggaggggcctggtgctgctcctgtctttggccgagatacttttcaaaattatgatactcgaaggaggtggcgtcatgaatctgaaccctgggaataaccttctgcaccagcccccagcctggactgattcctatagcacgtgcaatgtgtcatccggattctttggcggacagtggcatgagatccatccacagtattggaccaagtaccaggtgtgggaatggctccagcatctcctggacaccaaccagctcgacgccaattgcatcccattccaagaattcgatataaacggagagcacctttgcagtatgtcactgcaggaatttactcgcgctgctggaactgccggacagcttttgtattccaatttgcagcatctgaagtggaacggacaatgtagtagtgatctgtttcagtccacacataatgtaattgtgaagacagaacagacggaaccatcgatcatgaatacttggaaagacgaaaactatttatacgacaccaactacggaagtacggtggatctgcttgactctaagaccttttgccgagctcagatctcaatgactactacatctcaccttcccgtggcggaatccccagacatgaaaaaggaacaggacccacctgccaaatgccatactaaaaaacacaacccgcgagggacccacctgtgggagtttatacgagacattttgctaaacccagataagaatcctggactgatcaagtgggaagatcgatcagaaggtgtgtttcgatttcttaagtcagaagccgtcgcccagctgtggggtaagaaaaagaacaactctagcatgacatatgaaaagctctcacgagccatgcggtattattataaacgggagatccttgaaagagtggatggacggagactggtgtataagtttgggaagaacgccagaggctggcgggagaatgagaactag

SEQ ID NO: 82262 - DNA, 969 bp, Artificial Sequence
  derived and/or modified sequence
atgggcctgcccgagagaagaggcctggtgctgctgctgagcctggccgagatcctgttcaagatcatgatcctggagggcggcggcgtgatgaacctgaaccccggcaacaacctgctgcaccagccccccgcctggaccgacagctacagcacctgcaacgtgagcagcggcttcttcggcggccagtggcacgagatccacccccagtactggaccaagtaccaggtgtgggagtggctgcagcacctgctggacaccaaccagctggacgccaactgcatccccttccaggagttcgacatcaacggcgagcacctgtgcagcatgagcctgcaggagttcaccagagccgccggcaccgccggccagctgctgtacagcaacctgcagcacctgaagtggaacggccagtgcagcagcgacctgttccagagcacccacaacgtgatcgtgaagaccgagcagaccgagcccagcatcatgaacacctggaaggacgagaactacctgtacgacaccaactacggcagcaccgtggacctgctggacagcaagaccttctgcagagcccagatcagcatgaccaccaccagccacctgcccgtggccgagagccccgacatgaagaaggagcaggacccccccgccaagtgccacaccaagaagcacaaccccagaggcacccacctgtgggagttcatcagagacatcctgctgaaccccgacaagaaccccggcctgatcaagtgggaggacagaagcgagggcgtgttcagattcctgaagagcgaggccgtggcccagctgtggggcaagaagaagaacaacagcagcatgacctacgagaagctgagcagagccatgagatactactacaagagagagatcctggagagagtggacggcagaagactggtgtacaagttcggcaagaacgccagaggctggagagagaacgagaactag

SEQ ID NO: 82263 - DNA, 1481 bp, Artificial Sequence
  derived and/or modified sequence
aacccactgctttattctgccctgagtggagattggttttggctcaggctgctttgtgaaactcagaagcattatcctctctgccaactccacgtcctagtcagagttttctgtgaaggcaagggcatggggttgccggagagaagaggattggtcctgcttttaagcctagctgaaattcttttcaagatcatgattctggaaggaggtggtgtaatgaatctcaaccccggcaacaacctccttcaccagccgccagcctggacagacagctactccacgtgcaatgtttccagtgggttttttggaggccagtggcatgaaattcatcctcagtactggaccaagtaccaggtgtgggagtggctccagcacctcctggacaccaaccagctggatgccaattgtatccctttccaagagttcgacatcaacggcgagcacctctgcagcatgagtttgcaggagttcacccgggcggcagggacggcggggcagctcctctacagcaacttgcagcatctgaagtggaacggccagtgcagtagtgacctgttccagtccacacacaatgtcattgtcaagactgaacaaactgagccttccatcatgaacacctggaaagacgagaactatttatatgacaccaactatggtagcacagtagatttgttggacagcaaaactttctgccgggctcagatctccatgacaaccaccagtcaccttcctgttgcagagtcacctgatatgaaaaaggagcaagacccccctgccaagtgccacaccaaaaagcacaacccgagagggactcacttatgggaattcatccgcgacatcctcttgaacccagacaagaacccaggattaataaaatgggaagaccgatctgagggcgtcttcaggttcttgaaatcagaggcagtggctcagctatggggtaaaaagaagaacaacagcagcatgacctatgaaaagctcagccgagctatgagatattactacaaaagagaaattctggagcgtgtggatggacgaagactggtatataaatttgggaagaatgcccgaggatggagagaaaatgaaaactgaagctgccaatactttggacacaaaccaaaacacacaccaaataatcagaaacaaagaactcctggacgtaaatatttcaaagactacttttctctgatatttatgtaccatgaggggaacaagaaactacttctaacgggaagaagaaacactacggtcgattaaaaaaattattttgttacttcgaagtatgtcctatatggggaaaaaacgtacacagttttctgtgaaatatgatgctgtatgtggttgtgattttttttcacctctattgtgaattctttttcactgcaagagtaacaggatttgtagccttgtgcttcttgctaagagaaagaaaaacaaaatcagagggcattaaatgttttgtatgtgacatgatttag

SEQ ID NO: 82264 - protein, 183 aa, Artificial Sequence
  derived and/or modified sequence
MDNCLAAAALNGVDRRSLQRSARLALEVLERAKRRAVDWHALERPKGCMGVLAREAPHLEKQPAAGPQRVLPGEKYYSSVPEEGGATHVYRYHRGESKLHMCLDIGNGQRKDRKKTSLGPGGSYQISEHAPEASQPAENISKDLYIEVYPGTYSVTVGSNDLTKKTHVVAVDSGQSVDLVFPV

SEQ ID NO: 82265 - DNA, 552 bp, Artificial Sequence
  derived and/or modified sequence
atggataattgtctggctgccgccgcattgaacggcgttgatcgaaggagccttcagcggtcggcacgcctcgcactcgaggtcctcgaacgcgccaaacgccgcgccgtggattggcatgcgctggagagacctaagggatgcatgggggtgctggcacgggaggcgccacacctggagaagcaacctgccgccggtccccagcgagttctgccaggcgaaaagtactactcctccgtgcccgaggagggaggggccacccacgtctacaggtaccatagaggggaaagcaagctacacatgtgtctggatatcgggaatgggcagagaaaagatcggaagaagacttctttaggtccaggcggaagttaccagatatctgagcatgcacccgaagcgtcacagcccgccgagaatatctccaaggacctctatatcgaggtctacccgggcacgtattccgtgactgtaggtagtaatgacctcaccaagaagacacacgttgtggccgtcgacagcggccaatctgtggatcttgtgttccccgtgtag

SEQ ID NO: 82266 - DNA, 552 bp, Artificial Sequence
  derived and/or modified sequence
atggataattgtttagccgccgcagccctcaacggtgtggaccggcgttcattgcagagatcagccagactggccctcgaggtgctcgaacgcgctaagaggcgcgctgtcgattggcacgctttggagaggcccaaggggtgtatgggcgtcctggctcgggaggcacctcatttagaaaagcagcccgctgccgggcctcagagagtactgccaggggaaaagtactactcctcagttcctgaggaggggggggcgacgcatgtgtacagatatcatagaggagagagcaagctgcacatgtgcctagacattggcaatggccaacgaaaagacaggaaaaaaacatcccttgggcccggtggttcttaccagatttcagaacatgctcctgaggcctcacagccagccgaaaacattagcaaggatctgtacatcgaggtttacccaggcacctattctgtgactgtggggtctaatgatctcaccaaaaagacacatgtggtggccgtggactctggccaaagcgtggatctggtgtttcccgtctag

SEQ ID NO: 82267 - DNA, 552 bp, Artificial Sequence
  derived and/or modified sequence
atggacaactgcctggccgccgccgccctgaatggagtggacagaagaagcctgcagaggtctgcccggctggccctggaggtgctggagcgggccaagagaagagctgtggactggcacgccctggagcggcccaagggctgcatgggcgtgctggcccgggaggccccccacctggagaagcagcctgctgctggcccccagagggtgctgcccggggagaagtactacagctctgtgcctgaggagggcggggccacccacgtgtaccgctaccacagaggagagagcaagctgcacatgtgcctggacattggaaatggccagaggaaggacaggaagaagaccagcctgggccctgggggcagctaccagatcagcgagcacgcccctgaggccagccagcctgctgagaacatcagcaaggacctgtacatcgaggtgtacccaggcacctacagcgtgacagtgggcagcaatgacctgaccaagaagacccacgtggtggccgtggacagcggccagagcgtggacctggtgtttcctgtgtag

SEQ ID NO: 82268 - DNA, 552 bp, Artificial Sequence
  derived and/or modified sequence
atggacaactgcctggccgccgccgccctgaacggcgtggaccggcgatcactccagaggtcggccagactcgccttagaagtgctcgagcgagctaaacggcgcgcggtggactggcacgctttggagcggcctaaaggatgcatgggggtgctggctcgagaggcaccgcatctggagaagcagcctgccgccggtccccagcgcgttctgcctggggagaaatattatagcagcgtccccgaggagggcggtgcgacccatgtgtataggtatcaccgcggggagtccaaacttcacatgtgcttggatatcggaaatgggcagcgaaaggacaggaaaaagacgtctctcggtcctggcgggtcttaccagatctccgagcacgccccagaagcatctcagccagccgagaatatctcgaaggacctgtacatcgaggtttacccaggcacatattccgttaccgtaggctccaatgacctgacaaaaaaaacacacgtagtggcagtcgacagcgggcaatcagtggaccttgtatttcccgtgtag

SEQ ID NO: 82269 - DNA, 552 bp, Artificial Sequence
  derived and/or modified sequence
atggacaactgcctggccgccgccgccctgaacggcgtggaccggaggtcgttacaaagaagtgcccggctggctctcgaagtgcttgagagagccaagagaagggctgtcgactggcacgccctggagcgcccgaagggctgtatgggcgtgctggccagggaggcccctcacctggagaaacagccagccgcagggcctcaaagggttctccctggcgaaaagtactactcatctgtgccagaggaaggcggggccacccacgtgtatcgttaccatcgcggagagtcaaaactccatatgtgcttggatatcggtaacggtcagcgcaaagaccgcaagaagacttcactcggccctggtggtagctaccaaatctctgaacatgctcctgaggcatcccagccagccgaaaatatttctaaggacttgtacattgaggtctacccgggtacctattcagtgaccgtgggtagtaacgatctcaccaaaaaaacacacgtggtggcagtggattctggtcagtcagtggacctggtgtttcccgtgtag

SEQ ID NO: 82270 - DNA, 552 bp, Artificial Sequence
  derived and/or modified sequence
atggacaactgcctggcagctgctgctttaaacggcgttgataggcgttctctgcagagatctgctcggctggccctggaggtcctggagcgcgctaagaggagagctgtggactggcatgcgctcgagaggcccaaggggtgcatgggcgtgctggccagagaggcgcctcacctcgaaaagcagccagccgcaggcccacaaagagtgctgcccggagaaaagtactatagttctgtgcccgaggaaggaggagcaactcacgtgtacagatatcaccggggtgagtccaagctgcacatgtgtctggacatcggcaacgggcagcggaaagacaggaagaagacctcactcggcccaggcggatcttatcaaattagcgagcatgcgccagaggctagtcaaccagccgagaacatctctaaggacttgtatattgaggtgtaccccggaacttattccgtaacagtaggtagcaacgatttgacaaaaaaaactcacgtggtggccgtggactccggccagtcagtggacctcgtgtttcccgtgtag

SEQ ID NO: 82271 - DNA, 552 bp, Artificial Sequence
  derived and/or modified sequence
atggacaattgtctcgccgcagccgcactgaatggggtggatagacgcagcctacagcggtcggccaggctggcgcttgaggtcctggagcgtgcaaagcgcagagcggtggattggcatgcactggagcgcccaaagggatgtatgggcgtgctagccagagaggccccacatttggagaaacaacctgccgcaggtccccagcgtgtattgcccggagaaaagtactatagctccgtgccagaggagggcggagccacacacgtctacaggtaccatcgcggagaatcaaagcttcacatgtgcctggatatcggcaacggtcagcgcaaggatagaaaaaaaacaagtcttgggcctggcggtagctatcagatcagtgaacatgccccagaggcctcccaaccagccgaaaacatcagcaaggacctgtacatagaagtgtatccaggcacctattccgtcaccgtgggcagcaacgacctgactaaaaagacgcatgtggtcgccgtcgacagtgggcaatctgtcgatctggtgttcccagtgtag

SEQ ID NO: 82272 - DNA, 1247 bp, Artificial Sequence
  derived and/or modified sequence
gctgcgccggcgccgccgggagcgctaggcctggtccctcttcctagaatagcgttgcgcgcatgcgccttgacgagtgagccggggagccatggacaactgtttggcggccgcagcgctgaatggggtggaccgacgttccctgcagcgttcagcaaggctggctctagaagtgctggagagggccaagaggagggcggtggactggcatgccctggagcgtcccaaaggctgcatgggggtccttgcccgggaggcgccccacctagagaaacagccggcagccggcccgcagcgcgttctcccgggagagaaatattattcatctgtgccagaggaaggaggggcaacccatgtctatcgttatcacagaggcgagtcgaagctgcacatgtgcttggacatagggaatggtcagagaaaagacagaaaaaagacatcccttggtcctggaggcagctatcaaatatcagagcatgctccagaggcatcccagcctgctgagaacatctctaaggacctctacatagaagtatatccagggacctattctgtcactgtgggctcaaatgacttaaccaagaagactcatgtggtagcagttgattctggacaaagcgtggacctggtcttccctgtgtgatgttgaccatcactgccatcacatcacctttttttaagtagtaagaataaagccactgtatgattctcttaatagctatacattaatcctgtttttagtgctgactgggtcagccttccgggaactggagtctgtctctttcagtgcttttttgtttgtttggttggtttttttttgagacagtctcactctgttgcccaggctggagtgcagtggcgtgatctcggctcactgcaagttccgcctcccgggttcacaccattctcctgcctcagcctcccgagtagctggcactacaggcacccgccaccatgcccggctattttttttgtatttttagtagagacggggtttcaccatgttggccaggatggtctcgatctcttgacctcgtgatccacccaccttggcctcccaaagtgttgggattacaggcgtgagccaccgcgcccggcctcagtgccttttttaacttgagggtgtagaggtcctccacgcttgtttgcctgaaagtaatataatgatgctgtctgaacaggttttactgcttgctttccaagtaaaggttaattatgataataaagagatttggaaatgaagagaa

SEQ ID NO: 82273 - DNA, 1084 bp, Artificial Sequence
  derived and/or modified sequence
cggtggtctccagggaggtcgaggctggggctcccacccggatttggagcagggtcgccgcggcccagctgacccgccggcgtttgtacgttgtgtgcccactcagggagccatggacaactgtttggcggccgcagcgctgaatggggtggaccgacgttccctgcagcgttcagcaaggctggctctagaagtgctggagagggccaagaggagggcggtggactggcatgccctggagcgtcccaaaggctgcatgggggtccttgcccgggaggcgccccacctagagaaacagccggcagccggcccgcagcgcgttctcccgggagagaaatattattcatctgtgccagaggaaggaggggcaacccatgtctatcgttatcacagaggcgagtcgaagctgcacatgtgcttggacatagggaatggtcagagaaaagacagaaaaaagacatcccttggtcctggaggcagctatcaaatatcagagcatgctccagaggcatcccagcctgctgagaacatctctaaggacctctacatagaagtatatccagggacctattctgtcactgtgggctcaaatgacttaaccaagaagactcatgtggtagcagttgattctggacaaagcgtggacctggtcttccctgtgtgatgttgaccatcactgccatcacatcacctttttttaagtagtaagaataaagccactgtatgattctcttaatagctatacattaatcctgtttttagtgctgactgggtcagccttccgggaactggagtctgtctctttcagtgcttttttgtttgtttggttggtttttttttgagacagtctcactctgttgcccaggctggagtgcagtggcgtgatctcggctcactgcaagttccgcctcccgggttcacaccattctcctgcctcagcctcccgagtagctggcactacaggcacccgccaccatgcccggctattttttttgtatttttagtagagacggggtttcaccatgttggccaggatggtctcgatctcttgacctcgtgatccacccaccttggcctcccaaag

SEQ ID NO: 82274 - DNA, 552 bp, Artificial Sequence
  derived and/or modified sequence
atggacaactgcctggccgccgccgccctgaacggcgtggacagaagaagcctgcagagaagcgccagactggccctggaggtgctggagagagccaagagaagagccgtggactggcacgccctggagagacccaagggctgcatgggcgtgctggccagagaggccccccacctggagaagcagcccgccgccggcccccagagagtgctgcccggcgagaagtactacagcagcgtgcccgaggagggcggcgccacccacgtgtacagataccacagaggcgagagcaagctgcacatgtgcctggacatcggcaacggccagagaaaggacagaaagaagaccagcctgggccccggcggcagctaccagatcagcgagcacgcccccgaggccagccagcccgccgagaacatcagcaaggacctgtacatcgaggtgtaccccggcacctacagcgtgaccgtgggcagcaacgacctgaccaagaagacccacgtggtggccgtggacagcggccagagcgtggacctggtgttccccgtgtag

SEQ ID NO: 82275 - protein, 183 aa, Artificial Sequence
  derived and/or modified sequence
MDNCLAAAALNGVDRRSLQRSARLALEVLERAKRRAVDWHALERPKGCMGVLAREAPHLEKQPAAGPQRVLPGEREERPPTLSASFRTMAEFMDYTSSQCGKYYSSVPEEGGATHVYRYHRGESKLHMCLDIGNGQAENISKDLYIEVYPGTYSVTVGSNDLTKKTHVVAVDSGQSVDLVFPV

SEQ ID NO: 82276 - DNA, 552 bp, Artificial Sequence
  derived and/or modified sequence
atggataactgtctcgctgctgcagcactgaacggtgttgatcgcagatccctgcagaggtctgcgagacttgccctagaggtgttagagcgggctaaaaggcgcgccgtagactggcatgctctggaaagacctaaaggctgtatgggtgtactggcacgggaagccccccatctggaaaaacaacccgccgctggaccacaacgtgtgctgcccggggaaagggaggaacgcccgccaactctgagcgctagctttcgcacaatggctgaattcatggattatacttcctcccaatgcgggaaatattactcttccgtccccgaggagggaggagcaacacacgtgtaccggtatcacagaggagagtcgaaactacacatgtgcctagatatcggaaatggacaggccgagaacatctctaaagacctgtacatcgaggtgtacccaggcacttactccgttaccgtcggttctaacgacctgactaagaaaactcacgtggtggctgttgacagcggccagagtgttgacctggtttttccagtgtag

SEQ ID NO: 82277 - DNA, 552 bp, Artificial Sequence
  derived and/or modified sequence
atggacaactgcctggccgccgccgccctgaatggagtggacagaagaagcctgcagaggtctgcccggctggccctggaggtgctggagcgggccaagagaagagctgtggactggcacgccctggagcggcccaagggctgcatgggcgtgctggcccgggaggccccccacctggagaagcagcctgctgctggcccccagagggtgctgcccggggagcgggaggagaggcctcccaccctgagcgccagcttccgcaccatggccgagttcatggactacaccagcagccagtgtgggaagtactacagctctgtgcctgaggagggcggggccacccacgtgtaccgctaccacagaggagagagcaagctgcacatgtgcctggacattggaaatggccaggccgagaacatcagcaaggacctgtacatcgaggtgtacccaggcacctacagcgtgacagtgggcagcaatgacctgaccaagaagacccacgtggtggccgtggacagcggccagagcgtggacctggtgtttcctgtgtag

SEQ ID NO: 82278 - DNA, 552 bp, Artificial Sequence
  derived and/or modified sequence
atggacaactgcctggccgccgccgccctgaacggcgtggaccggcggagtcttcagcgttcagcgcggctggcactggaggtgctcgaaagggcaaaaaggcgagcggtcgattggcacgctttggaacggcctaaagggtgcatgggagtgcttgcacgcgaggcaccccacctggagaaacagcctgccgctggaccacagagggtgctgccaggcgaacgtgaagagagaccccctaccttatcggcttcatttcgcacaatggctgagttcatggactacacaagctcacaatgtggcaaatattactcatccgtccctgaagagggcggcgctacccatgtctatcggtaccatcgcggggaaagcaagctacacatgtgcttggatattgggaacggacaagctgaaaacatatccaaagacctatatatcgaggtttatccaggcacgtattcggtgacagttggaagtaatgacctgaccaaaaaaacacacgtggtagcagtcgactcgggtcagtcagtagatctggtctttccagtgtag

SEQ ID NO: 82279 - DNA, 552 bp, Artificial Sequence
  derived and/or modified sequence
atggacaactgtttggccgctgcagccctgaacggtgtggatcggaggagccttcagagatccgctagactggcccttgaggtgttagagcgcgcaaagagaagagctgtcgattggcacgcacttgagcggccaaagggctgcatgggcgtgttagcgagggaagcgccacatctggaaaaacagccagccgcaggacctcaacgagtgctccctggagagcgtgaggagcgaccacccacacttagtgcatcttttcgtacaatggccgagtttatggactatacatcctcacagtgcggcaagtattatagtagtgtccccgaggaaggtggcgctactcacgtgtatcgatatcaccggggagagtctaaattgcatatgtgcctggatattggaaatgggcaggccgaaaacataagtaaggatctgtatatcgaagtttacccaggaacatacagcgtgactgtaggctcgaacgacctgaccaaaaagacacacgttgtcgctgtcgattcaggacagagtgtagatctcgttttccctgtgtag

SEQ ID NO: 82280 - DNA, 1232 bp, Artificial Sequence
  derived and/or modified sequence
ccgggagcgctaggcctggtccctcttcctagaatagcgttgcgcgcatgcgccttgacgagtgagccggggagccatggacaactgtttggcggccgcagcgctgaatggggtggaccgacgttccctgcagcgttcagcaaggctggctctagaagtgctggagagggccaagaggagggcggtggactggcatgccctggagcgtcccaaaggctgcatgggggtccttgcccgggaggcgccccacctagagaaacagccggcagccggcccgcagcgcgttctcccgggagagagagaagagagacccccaacccttagtgcttccttcagaacaatggctgaattcatggactatacttcaagtcagtgtgggaaatattattcatctgtgccagaggaaggaggggcaacccatgtctatcgttatcacagaggcgagtcgaagctgcacatgtgcttggacatagggaatggtcaggctgagaacatctctaaggacctctacatagaagtatatccagggacctattctgtcactgtgggctcaaatgacttaaccaagaagactcatgtggtagcagttgattctggacaaagcgtggacctggtcttccctgtgtgatgttgaccatcactgccatcacatcacctttttttaagtagtaagaataaagccactgtatgattctcttaatagctatacattaatcctgtttttagtgctgactgggtcagccttccgggaactggagtctgtctctttcagtgcttttttgtttgtttggttggtttttttttgagacagtctcactctgttgcccaggctggagtgcagtggcgtgatctcggctcactgcaagttccgcctcccgggttcacaccattctcctgcctcagcctcccgagtagctggcactacaggcacccgccaccatgcccggctattttttttgtatttttagtagagacggggtttcaccatgttggccaggatggtctcgatctcttgacctcgtgatccacccaccttggcctcccaaagtgttgggattacaggcgtgagccaccgcgcccggcctcagtgccttttttaacttgagggtgtagaggtcctccacgcttgtttgcctgaaagtaatataatgatgctgtctgaacaggttttactgcttgctttccaagtaaaggttaattatgataataaagagatttggaaatgaagagaa

SEQ ID NO: 82281 - DNA, 552 bp, Artificial Sequence
  derived and/or modified sequence
atggacaactgcctggccgccgccgccctgaacggcgtggacagaagaagcctgcagagaagcgccagactggccctggaggtgctggagagagccaagagaagagccgtggactggcacgccctggagagacccaagggctgcatgggcgtgctggccagagaggccccccacctggagaagcagcccgccgccggcccccagagagtgctgcccggcgagagagaggagagaccccccaccctgagcgccagcttcagaaccatggccgagttcatggactacaccagcagccagtgcggcaagtactacagcagcgtgcccgaggagggcggcgccacccacgtgtacagataccacagaggcgagagcaagctgcacatgtgcctggacatcggcaacggccaggccgagaacatcagcaaggacctgtacatcgaggtgtaccccggcacctacagcgtgaccgtgggcagcaacgacctgaccaagaagacccacgtggtggccgtggacagcggccagagcgtggacctggtgttccccgtgtag

SEQ ID NO: 82282 - protein, 2075 aa, Artificial Sequence
  derived and/or modified sequence
MWSEQEKETFREKFMQHPKNFGLIASFLERKTVAECVLYYYLTKKNENYKSLVRRSYRRRGKSQQQQQQQQQQQQQQQQQPMPRSSQEEKDEKEKEKEAEKEEEKPEVENDKEDLLKEKTDDTSGEDNDEKEAVASKGRKTANSQGRRKGRITRSMANEANSEEAITPQQSAELASMELNESSRWTEEEMETAKKGLLEHGRNWSAIARMVGSKTVSQCKNFYFNYKKRQNLDEILQQHKLKMEKERNARRKKKKAPAAASEEAAFPPVVEDEEMEASGVSGNEEEMVEEAEATVNNSSDTESIPSPHTEAAKDTGQNGPKPPATLGADGPPPGPPTPPPEDIPAPTEPTPASEATGAPTPPPAPPSPSAPPPVVPKEEKEEETAAAPPVEEGEEQKPPAAEELAVDTGKAEEPVKSECTEEAEEGPAKGKDAEAAEATAEGALKAEKKEGGSGRATTAKSSGAPQDSDSSATCSADEVDEAEGGDKNRLLSPRPSLLTPTGDPRANASPQKPLDLKQLKQRAAAIPPIQVTKVHEPPREDAAPTKPAPPAPPPPQNLQPESDAPQQPGSSPRGKSRSPAPPADKEAEKPVFFPAFAAEAQKLPGDPPCWTSGLPFPVPPREVIKASPHAPDPSAFSYAPPGHPLPLGLHDTARPVLPRPPTISNPPPLISSAKHPSVLERQIGAISQGMSVQLHVPYSEHAKAPVGPVTMGLPLPMDPKKLAPFSGVKQEQLSPRGQAGPPESLGVPTAQEASVLRGTALGSVPGGSITKGIPSTRVPSDSAITYRGSITHGTPADVLYKGTITRIIGEDSPSRLDRGREDSLPKGHVIYEGKKGHVLSYEGGMSVTQCSKEDGRSSSGPPHETAAPKRTYDMMEGRVGRAISSASIEGLMGRAIPPERHSPHHLKEQHHIRGSITQGIPRSYVEAQEDYLRREAKLLKREGTPPPPPPSRDLTEAYKTQALGPLKLKPAHEGLVATVKEAGRSIHEIPREELRHTPELPLAPRPLKEGSITQGTPLKYDTGASTTGSKKHDVRSLIGSPGRTFPPVHPLDVMADARALERACYEESLKSRPGTASSSGGSIARGAPVIVPELGKPRQSPLTYEDHGAPFAGHLPRGSPVTTREPTPRLQEGSLSSSKASQDRKLTSTPREIAKSPHSTVPEHHPHPISPYEHLLRGVSGVDLYRSHIPLAFDPTSIPRGIPLDAAAAYYLPRHLAPNPTYPHLYPPYLIRGYPDTAALENRQTIINDYITSQQMHHNAATAMAQRADMLRGLSPRESSLALNYAAGPRGIIDLSQVPHLPVLVPPTPGTPATAMDRLAYLPTAPQPFSSRHSSSPLSPGGPTHLTKPTTTSSSERERDRDRERDRDREREKSILTSTTTVEHAPIWRPGTEQSSGSSGGGGGSSSRPASHSHAHQHSPISPRTQDALQQRPSVLHNTGMKGIITAVEPSTPTVLRSTSTSSPVRPAATFPPATHCPLGGTLDGVYPTLMEPVLLPKEAPRVARPERPRADTGHAFLAKPPARSGLEPASSPSKGSEPRPLVPPVSGHATIARTPAKNLAPHHASPDPPAPPASASDPHREKTQSKPFSIQELELRSLGYHGSSYSPEGVEPVSPVSSPSLTHDKGLPKHLEELDKSHLEGELRPKQPGPVKLGGEAAHLPHLRPLPESQPSSSPLLQTAPGVKGHQRVVTLAQHISEVITQDYTRHHPQQLSAPLPAPLYSFPGASCPVLDLRRPPSDLYLPPPDHGAPARGSPHSEGGKRSPEPNKTSVLGGGEDGIEPVSPPEGMTEPGHSRSAVYPLLYRDGEQTEPSRMGSKSPGNTSQPPAFFSKLTESNSAMVKSKKQEINKKLNTHNRNEPEYNISQPGTEIFNMPAITGTGLMTYRSQAVQEHASTNMGLEAIIRKALMGKYDQWEESPPLSANAFNPLNASASLPAAMPITAADGRSDHTLTSPGGGGKAKVSGRPSSRKAKSPAPGLASGDRPPSVSSVHSEGDCNRRTPLTNRVWEDRPSSAGSTPFPYNPLIMRLQAGVMASPPPPGLPAGSGPLAGPHHAWDEEPKPLLCSQYETLSDSE

SEQ ID NO: 82283 - protein, 2504 aa, Artificial Sequence
  derived and/or modified sequence
MSGSTQPVAQTWRATEPRYPPHSLSYPVQIARTHTDVGLLEYQHHSRDYASHLSPGSIIQPQRRRPSLLSEFQPGNERSQELHLRPESHSYLPELGKSEMEFIESKRPRLELLPDPLLRPSPLLATGQPAGSEDLTKDRSLTGKLEPVSPPSPPHTDPELELVPPRLSKEELIQNMDRVDREITMVEQQISKLKKKQQQLEEEAAKPPEPEKPVSPPPIESKHRSLVQIIYDENRKKAEAAHRILEGLGPQVELPLYNQPSDTRQYHENIKINQAMRKKLILYFKRRNHARKQWEQKFCQRYDQLMEAWEKKVERIENNPRRRAKESKVREYYEKQFPEIRKQRELQERMQRVGQRGSGLSMSAARSEHEVSEIIDGLSEQENLEKQMRQLAVIPPMLYDADQQRIKFINMNGLMADPMKVYKDRQVMNMWSEQEKETFREKFMQHPKNFGLIASFLERKTVAECVLYYYLTKKNENYKSLVRRSYRRRGKSQQQQQQQQQQQQQQQQQPMPRSSQEEKDEKEKEKEAEKEEEKPEVENDKEDLLKEKTDDTSGEDNDEKEAVASKGRKTANSQGRRKGRITRSMANEANSEEAITPQQSAELASMELNESSRWTEEEMETAKKGLLEHGRNWSAIARMVGSKTVSQCKNFYFNYKKRQNLDEILQQHKLKMEKERNARRKKKKAPAAASEEAAFPPVVEDEEMEASGVSGNEEEMVEEAEATVNNSSDTESIPSPHTEAAKDTGQNGPKPPATLGADGPPPGPPTPPPEDIPAPTEPTPASEATGAPTPPPAPPSPSAPPPVVPKEEKEEETAAAPPVEEGEEQKPPAAEELAVDTGKAEEPVKSECTEEAEEGPAKGKDAEAAEATAEGALKAEKKEGGSGRATTAKSSGAPQDSDSSATCSADEVDEAEGGDKNRLLSPRPSLLTPTGDPRANASPQKPLDLKQLKQRAAAIPPIQVTKVHEPPREDAAPTKPAPPAPPPPQNLQPESDAPQQPGSSPRGKSRSPAPPADKEAEKPVFFPAFAAEAQKLPGDPPCWTSGLPFPVPPREVIKASPHAPDPSAFSYAPPGHPLPLGLHDTARPVLPRPPTISNPPPLISSAKHPSVLERQIGAISQGMSVQLHVPYSEHAKAPVGPVTMGLPLPMDPKKLAPFSGVKQEQLSPRGQAGPPESLGVPTAQEASVLRGTALGSVPGGSITKGIPSTRVPSDSAITYRGSITHGTPADVLYKGTITRIIGEDSPSRLDRGREDSLPKGHVIYEGKKGHVLSYEGGMSVTQCSKEDGRSSSGPPHETAAPKRTYDMMEGRVGRAISSASIEGLMGRAIPPERHSPHHLKEQHHIRGSITQGIPRSYVEAQEDYLRREAKLLKREGTPPPPPPSRDLTEAYKTQALGPLKLKPAHEGLVATVKEAGRSIHEIPREELRHTPELPLAPRPLKEGSITQGTPLKYDTGASTTGSKKHDVRSLIGSPGRTFPPVHPLDVMADARALERACYEESLKSRPGTASSSGGSIARGAPVIVPELGKPRQSPLTYEDHGAPFAGHLPRGSPVTTREPTPRLQEGSLSSSKASQDRKLTSTPREIAKSPHSTVPEHHPHPISPYEHLLRGVSGVDLYRSHIPLAFDPTSIPRGIPLDAAAAYYLPRHLAPNPTYPHLYPPYLIRGYPDTAALENRQTIINDYITSQQMHHNAATAMAQRADMLRGLSPRESSLALNYAAGPRGIIDLSQVPHLPVLVPPTPGTPATAMDRLAYLPTAPQPFSSRHSSSPLSPGGPTHLTKPTTTSSSERERDRDRERDRDREREKSILTSTTTVEHAPIWRPGTEQSSGSSGGGGGSSSRPASHSHAHQHSPISPRTQDALQQRPSVLHNTGMKGIITAVEPSTPTVLRSTSTSSPVRPAATFPPATHCPLGGTLDGVYPTLMEPVLLPKEAPRVARPERPRADTGHAFLAKPPARSGLEPASSPSKGSEPRPLVPPVSGHATIARTPAKNLAPHHASPDPPAPPASASDPHREKTQSKPFSIQELELRSLGYHGSSYSPEGVEPVSPVSSPSLTHDKGLPKHLEELDKSHLEGELRPKQPGPVKLGGEAAHLPHLRPLPESQPSSSPLLQTAPGVKGHQRVVTLAQHISEVITQDYTRHHPQQLSAPLPAPLYSFPGASCPVLDLRRPPSDLYLPPPDHGAPARGSPHSEGGKRSPEPNKTSVLGGGEDGIEPVSPPEGMTEPGHSRSAVYPLLYRDGEQTEPSRMGSKSPGNTSQPPAFFSKLTESNSAMVKSKKQEINKKLNTHNRNEPEYNISQPGTEIFNMPAITGTGLMTYRSQAVQEHASTNMGLEAIIRKALMGKYDQWEESPPLSANAFNPLNASASLPAAMPITAADGRSDHTLTSPGGGGKAKVSGRPSSRKAKSPAPGLASGDRPPSVSSVHSEGDCNRRTPLTNRVWEDRPSSAGSTPFPYNPLIMRLQAGVMASPPPPGLPAGSGPLAGPHHAWDEEPKPLLCSQYETLSDSE

SEQ ID NO: 82284 - protein, 606 aa, Artificial Sequence
  derived and/or modified sequence
LQSGATHCPLGGTLDGVYPTLMEPVLLPKEAPRVARPERPRADTGHAFLAKPPARSGLEPASSPSKGSEPRPLVPPVSGHATIARTPAKNLAPHHASPDPPAPPASASDPHREKTQSKPFSIQELELRSLGYHGSSYSPEGVEPVSPVSSPSLTHDKGLPKHLEELDKSHLEGELRPKQPGPVKLGGEAAHLPHLRPLPESQPSSSPLLQTAPGVKGHQRVVTLAQHISEVITQDYTRHHPQQLSAPLPAPLYSFPGASCPVLDLRRPPSDLYLPPPDHGAPARGSPHSEGGKRSPEPNKTSVLGGGEDGIEPVSPPEGMTEPGHSRSAVYPLLYRDGEQTEPSRMGSKSPGNTSQPPAFFSKLTESNSAMVKSKKQEINKKLNTHNRNEPEYNISQPGTEIFNMPAITGTGLMTYRSQAVQEHASTNMGLEAIIRKALMGKYDQWEESPPLSANAFNPLNASASLPAAMPITAADGRSDHTLTSPGGGGKAKVSGRPSSRKAKSPAPGLASGDRPPSVSSVHSEGDCNRRTPLTNRVWEDRPSSAGSTPFPYNPLIMRLQAGVMASPPPPGLPAGSGPLAGPHHAWDEEPKPLLCSQYETLSDSE

SEQ ID NO: 82285 - DNA, 7566 bp, Artificial Sequence
  derived and/or modified sequence
atgagtgggtcaacccaacccgtggcccagacttggagagcgactgagccgagatacccacctcactccctgagttatccggtgcaaatcgcgcgtacccacactgacgtaggacttttggagtatcagcatcattccagggattatgcatctcacctgtcccctggctcaataatccaaccccagcgcagacgaccatccctactttccgagttccagcctggaaacgagcggtcacaggaactgcacttgaggccggagtcacattcatatctacccgaacttgggaaatcagagatggagtttattgagagcaagcggccacgcctagagctgctacccgaccccctcctccgcccatctccgcttctggccactgggcagccggcaggaagcgaagatctcaccaaagaccgctcattgactggaaagctggagcctgtgagccctccctcgcctcctcacacggatccagagctggagctcgtgccccccagactttccaaagaggagctcatccagaacatggatagggtggaccgggaaataactatggtcgagcagcagataagtaaattaaagaaaaagcagcagcaacttgaggaggaagccgccaaacctcctgagccagagaaacccgtctccccccctcctatagaaagcaaacacaggagcctggtgcagatcatctacgacgagaacagaaaaaaggccgaggctgcccacagaattcttgagggcctcggaccacaggtcgagcttcccctgtataatcagccctccgacacccgacagtaccacgagaacatcaaaattaaccaggccatgcgaaagaagttgatcctatatttcaagcgaaggaatcacgcccgtaagcagtgggagcaaaaattctgtcaacgatatgatcagctcatggaggcgtgggagaaaaaggtggagcgaatcgaaaacaacccccgacgaagagccaaggagtctaaagtgcgcgagtactacgagaagcagtttccggagattcgcaaacagagagaactccaggagcgcatgcaatcgcgagtggggcagaggggatcggggttgtctatgtcagcagctaggagtgagcacgaggttagcgaaatcatagacggcctgtctgaacaggaaaatcttgagaaacaaatgcgccagctcgccgtaattccccctatgctgtacgacgcagaccagcagaggataaagttcattaacatgaatggattaatggctgatcctatgaaggtttacaaggacagacaggtgatgaatatgtggtccgaacaggagaaagagacgtttcgggagaagttcatgcagcatcccaagaatttcgggctgatcgccagctttttagaaagaaagaccgtagccgagtgtgttctctattactacctaaccaaaaagaacgaaaactacaaatctctggtaaggaggagttacaggcggcggggtaagtctcagcagcagcagcaacagcaacagcagcagcaacagcagcaacagcagcaacctatgcccaggagtagtcaggaggagaaggacgaaaaagaaaaagaaaaggaagccgagaaggaagaagagaagcccgaggtggagaacgacaaggaggacctgctgaaagagaagacagatgatacctcaggagaagataatgatgagaaagaggcagttgcctcgaaaggacggaaaacagccaattcacaaggtaggaggaaaggccgaattacacgcagcatggccaacgaggctaactccgaggaagcgattaccccccagcagtcagccgaactggcctcgatggagctgaacgagtcatcgcgatggacggaagaagagatggaaactgctaagaaggggctcctggagcacgggaggaactggagcgctatagcacggatggttggctcaaaaactgtgagccagtgtaagaacttctattttaactataaaaaaagacagaatttggatgagattctacaacagcacaagctgaagatggagaaggaaagaaacgcacgaaggaaaaagaagaaggctcccgcagccgcctctgaggaggcggcgttcccacccgttgtggaggatgaagaaatggaggcttctggcgttagtgggaatgaggaggaaatggtggaagaggctgaggcgctccatgccagtggcaacgaagtcccacggggtgagtgcagcgggccagccacagtgaacaattcaagcgataccgaatcaattcctagtcctcataccgaggccgctaaagataccgggcagaatggccctaagccgccagctaccctgggtgcggatggaccgccacccggacctcccactccacccccagaagatattccggcccctaccgaaccgacacccgccagtgaagcgaccggcgcgcccacaccgcctccggctcctccctctccttccgcccccccccccgttgtgccaaaggaagaaaaagaggaggagaccgctgctgcaccaccggtggaagaaggggaagagcaaaaacctccagcagcagaagagctggcggttgacaccgggaaggccgaggaaccggtgaagagcgaatgcactgaagaggccgaagagggacccgcaaaggggaaggatgctgaggccgctgaggccactgccgaaggagccctcaaggcagaaaaaaaagaaggaggttccggccgcgctaccactgcgaaaagctcaggcgctccacaggacagcgatagcagcgctacatgtagtgccgatgaggtggatgaagcagaaggtggtgataaaaatcgccttcttagtcctcgaccctcacttctgaccccaactggggacccacgggcgaacgcaagcccccaaaaacccctggacctcaaacagctgaagcagcgtgccgccgcaatcccacccatcgtaacaaaagtccatgagccgccgcgggaggatgcagcacccactaaacctgctcccccagcaccgcccccaccacagaacctccagcccgagtccgatgccccccagcaacctggcagctccccacgaggtaagtctcgatcaccggccccacccgcagacaaagaggctgagaagcccgtgttctttccagccttcgctgcagaggcccagaaattgcctggcgacccgccttgttggacttccggcctcccctttcctgtccccccacgcgaggtgataaaggctagtcctcacgcccctgatccttcagcatttagctacgctccacctggtcaccccctgccactgggcttgcacgacacagcccggccggtcctgccaagacccccaaccatctccaacccaccgcccctcatcagctctgccaagcatccctcggtcctggaaaggcagataggtgctatcagccagggcatgagtgttcaactgcatgtgccttactctgaacacgccaaggcgccagtggggcctgtaactatggggctacctctccccatggacccgaaaaaactcgcgccattcagcggcgtgaaacaagagcagttgagtccgagaggacaggctggcccccctgagagtctgggcgtgccaacggctcaggaggcttccgttctgcgtgggacagcgttgggctctgtgccgggaggctccatcactaaagggatccccagcactagggtgccatcagattcagcaattacataccgcgggtctattacccacggcaccccggccgatgtcctgtacaaaggtactatcacccgaattatcggcgaggacagccctagtcgcttggaccgcggccgggaagatagccttccgaaaggtcatgttatttatgagggcaaaaagggtcatgtgttgtcctacgagggagggatgtcagtaacccagtgttcaaaagaagatggcaggtcatcaagtggtcccccacatgagaccgcagctccaaaacgtacctatgatatgatggagggtagggtcggcagggcaatttcgagcgcgtccattgaaggtctgatgggccgagccatccctccagagcgacactcgcctcatcacctgaaagagcaacatcatatcagagggtcaattacgcaagggattccacgctcttatgtcgaggcccaggaggactacttgcgccgggaggcaaagctgctgaagcgtgaaggaacgccccctcctcctcccccttccagggacctgactgaagcttacaagacacaggccctggggcccctgaagctgaaaccagctcacgaaggactcgtcgccactgttaaagaggctggtagatccatccacgagatcccccgagaagagctccgccatacaccagaactcccccttgcaccccgacctctgaaagagggttccattacccagggaacgccgctgaaatatgacacaggtgccagcactaccggatctaaaaagcacgatgttagatcgctgatcggatcccctggacgtacatttcctcccgtgcaccctctagatgtgatggctgacgcccgggcactggaacgggcttgttatgaagagagtttaaagtccagacccgggacggcttcctcctctggtggatccatcgcgcgcggggccccagtaatcgtgccagaactaggtaaacccagacagagccctctcacttacgaggaccacggcgcacctttcgctggtcatctccccagaggctccccagttaccacacgggagccaacgcctcggctgcaggagggatcgttgagctccagcaaggcctcacaagaccggaaattgaccagcacccccagggaaatcgcaaagagtccccactcgacagttccggaacatcacccgcatcccatcagcccctatgagcatctattaagaggtgtatcgggggtggacctttatagaagccacatcccattggcgtttgatcccacttccatcccacgcgggataccgctggacgcagcagcagcttactatcttccgagacacctggctccaaatccgacatacccccatctctatcctccatacctgatccgaggctaccccgatactgccgcactggagaatcggcaaacaattatcaacgattatatcacctcgcagcagatgcaccacaatgcggccacggcgatggcccaaagggccgatatgctgcggggcctatctcctcgggaatcttccctggccctcaattacgccgctggtcccagaggcatcatagacctgtctcaggtgccacatctgcccgtcctcgtgccacccacccccgggacacccgccaccgctatggaccggctggcttacttaccgactgcgccccagccattcagttcaaggcactcctcttcacccttgagccccggcggaccaacacacctgaccaagccaaccacaacaagctctagcgaaagggaacgcgacagagaccgcgagagggatcgcgatagggaacgggagaaatccatactgacgagcactacaacagttgagcacgccccaatatggcgtccgggcactgagcagagcagcggaagctctggcggcgggggcggctcttcgagccgccctgctagtcattctcacgcacatcagcacagccctatctctccacgcacacaggatgcacttcagcaaagaccttccgtgctgcataacaccggaatgaagggaattattaccgccgtggagcctagcacacccacagttctccgaagtaccagcacttcatccccagtgagacctgcagccacattcccgcccgccacgcactgcccgctgggaggaaccctcgacggggtgtacccgactctgatggagcctgtgctgctgcccaaggaggccccgagggtggcccgcccagagagacctcgggccgatacaggccacgcctttctcgccaaaccccctgcacgttctgggttggaacccgctagctccccttccaaggggtctgagcctcgccccctggtacctccagtgagcggtcatgctacaattgcacggacccccgcgaagaacctggcccctcatcacgcctctcccgacccacctgcccctcctgctagcgccagtgaccctcatagagaaaagacccagagtaaaccattttccattcaggaactcgaattgcgaagcttggggtatcacggcagctcgtatagtcctgagggtgtcgagcccgtgagccccgtgagctctccctcgctgactcacgacaagggacttccaaaacaccttgaggagctcgacaaaagtcacctggagggggagctacggcccaagcagccggggccagtgaaactggggggagaggctgcacaccttccacaccttcggcctctcccagaatcacagccatcttcatcccctctgctgcagactgccccaggcgtgaaggggcatcaacgggtcgtaaccctggcccagcacattagtgaagtcatcactcaagactacactcgtcatcatccacagcagttgtcagcccccttgcccgcaccgctttatagttttcccggtgcttcatgccctgtgctggatctgaggaggccccccagtgatctatacctgccccctccggaccatggcgcccctgctaggggctcaccccattctgaaggtgggaagagatctcccgagcccaataaaaccagcgtgctgggcggaggcgaagatggcatcgagccagtttccccccctgaaggcatgactgaaccaggacactcgcggtcagccgtgtaccctctgctgtacagagacggtgagcagactgaaccctcccgcatgggcagcaagtcacctggaaacacttctcagccaccagcattcttcagtaagttgacagagtcaaactctgcaatggtaaaaagcaagaagcaggagattaataagaagttgaatacccacaacaggaatgagcctgagtacaacatcagtcaacctggcaccgagatcttcaatatgccggccatcaccgggactgggcttatgacataccgttcacaggccgtgcaagagcatgcctcaaccaacatggggctggaggcaataattcgcaaagcgttgatgggcaagtatgatcaatgggaggagagcccaccccttagcgccaatgcgttcaatcccctcaacgcgagcgcttcccttccggccgcaatgcccatcacggccgctgatggcagatcagaccataccctgacctcacctggaggcggcggaaaagcgaaagtgagcgggaggcccagttccaggaaagctaaatcccctgcacctgggctcgcctccggcgaccgaccacccagcgtgtcgagcgtgcactcagagggtgactgtaacagacgcacccccctaacaaacagagtatgggaagacagaccttccagtgccggctcgacgcctttcccctataatcccctgattatgcgcctgcaggcaggagttatggcgagccccccccctccgggacttccagctggttctggaccactggccggcccccaccacgcctgggacgaggagcctaaacctcttctatgtagccagtacgagacactcagcgatagcgaatag

SEQ ID NO: 82286 - DNA, 6228 bp, Artificial Sequence
  derived and/or modified sequence
atgtggtctgagcaggaaaaggagacttttcgggagaagttcatgcagcaccctaagaattttgggctgatcgcctcttttctggagaggaagactgttgcagagtgtgtgctctactactacttgacgaaaaagaacgagaattataagagtctagtgaggcggtcttacaggcgtcgaggcaaatcccagcagcagcaacagcagcaacagcagcaacaacagcagcagcagcagcagcccatgcctcgatcatcccaggaggagaaggacgagaaggaaaaggagaaagaggctgaaaaagaggaggagaagcctgaagtggaaaacgacaaagaggacctgttaaaggaaaaaacagacgataccagtggcgaggacaatgacgagaaggaggccgtggcatccaagggtcgaaaaacagctaacagtcagggacgcaggaaaggccggattacacgctctatggcaaatgaggcaaattctgaggaagccatcaccccccaacagtcagctgagctagcctctatggaactcaacgagagcagccgttggaccgaggaagagatggaaacggccaagaaaggcctcttggaacacggaagaaactggtccgccatcgcacggatggttgggagtaagactgtgtctcagtgtaaaaatttttacttcaattataagaagagacagaatttagatgaaatcttgcagcagcataagttaaagatggaaaaggaaagaaacgccaggagaaaaaagaagaaggctcccgctgcagcaagcgaagaagcggccttcccacctgttgtggaggacgaagagatggaagcttcaggtgtgagtggcaatgaggaggaaatggtggaggaggctgaagctactgtcaataattcctcagacaccgaaagcatcccctcccctcacaccgaagccgcaaaggacactgggcaaaatggtcccaagcccccggctacactcggtgcagatggaccaccccccgggcctccgactccacctcccgaagacataccagctcccaccgaacccactccagcttctgaggcgacgggcgcaccaacacccccgccagcccccccttctccatccgctccccctccagtagtccctaaggaggagaaggaagaggaaactgctgcagcccctccagtggaagaaggagaggagcagaaaccaccagccgccgaggagcttgctgtggacacaggcaaagcggaagagcccgtgaagtccgaatgcactgaggaagccgaggagggtcctgccaaaggcaaggatgcagaggcggcagaggccacagctgagggtgcgttaaaggccgagaagaaggaaggggggtctggcagggcaaccacagcgaagtcgtcaggagcccctcaggattctgacagttccgcgacgtgttcggctgacgaagtggacgaagccgagggcggagataagaaccgcctcctctctcctcgtccatctctgctcaccccgaccggcgacccccgggcgaatgcaagccctcagaaacccctcgatctgaaacaattgaaacaacgtgccgccgctattccaccaatccaggtcactaaggttcacgagcccccccgtgaggatgccgctcctaccaaaccggctcctcccgcgccccctcctccccaaaaccttcagccagagagtgacgctccccagcagccagggagtagcccccgtggcaaatcccgttcacctgcccctcccgcagacaaggaagcagagaagcctgttttcttccccgcctttgccgctgaagcacagaaattgcccggagatccaccttgttggaccagtggcctgccatttcctgtgccaccaagagaagtgatcaaggccagtccccatgcgccagatccgtcagcctttagttatgccccaccgggacaccccctgcccctcgggttacacgacacagccagacctgtgctccctcgtcccccaacaatcagcaaccctcccccactgataagcagcgctaagcatcctagcgtattggagaggcagataggcgctattagccagggcatgagcgtgcagctccacgtcccctactcagagcacgcaaaagccccagtcggaccagtcacaatgggactgccactcccgatggacccgaaaaaactggcgcccttttccggtgtcaagcaggagcagctaagcccacgcggccaggctgggcctcctgagagtctaggggtgccaactgcccaggaggcttctgtgcttcgcggtacggctttagggtcggtgcctggaggatccatcactaaggggattccctctacgagggttccttcggatagcgccatcacttatagaggttcaattacacacggcacccctgcggatgtgttgtacaaaggtactattaccagaatcatcggtgaagatagtccaagtcgcctggatagaggtcgtgaagactctctgccgaaagggcacgtgatctatgagggcaaaaaaggacacgtcctgagctacgaaggggggatgagcgtgacccagtgcagcaaggaggatggacgttcaagttctggacctccccacgagacagctgccccaaagaggacatacgacatgatggaaggcagggtgggccgcgccatcagcagtgctagtatagaaggcctaatgggcagagccatcccccccgaaaggcatagtcctcatcacctgaaggagcagcaccatattaggggctccattactcaggggattccccgtagctatgtggaagcgcaggaggattacttacgacgggaagccaagctactgaagcgagagggtactcccccaccaccccctccaagtcgggatcttactgaagcctacaaaacacaggctttaggtcctctgaagttaaaacctgctcacgagggtctggtggcaacggtgaaggaggcagggcggtcgatccacgagatcccgagggaggagttacggcatacacccgagttgcctctggccccaaggccacttaaggaagggtctatcacacagggaactccccttaagtacgacacaggggctagtactacagggagtaaaaaacacgacgtcagatccctcataggctctcccggcagaacatttccaccagtgcacccattggatgtgatggcagacgccagagctctggagcgcgcatgttatgaggagtcattgaaatccaggcctggtaccgcttcctcaagtggtggtagtatcgcacgtggtgcgcctgtgatcgtgccagagctgggtaagcccagacagtcccctcttacatatgaggatcatggcgctccctttgcaggacaccttccacgaggatcacccgtgacaacccgcgaaccgactccacgtctgcaggagggctcactgtcctcctccaaagcctcacaggaccggaaactgacatcaacccctcgggaaattgcgaagtcaccacattccaccgtgcctgagcaccatccccatccaatctctccatatgagcatctgctaagaggtgtttctggagtggatctgtaccgtagccatataccactcgcctttgaccccacaagtattccccggggtatccctctggacgccgcggctgcttactacttgcccagacacctggcgccgaaccctacctacccccacctatatcctccctatctgattcgcggctaccccgacacagccgccctagaaaatagacagactattatcaatgattacatcacaagtcagcaaatgcatcacaatgctgcgaccgccatggcccagcgggccgatatgctgcgcggactctccccacgagagtcaagccttgcactcaattatgcagctgggccgagagggattattgacttgtctcaagtcccgcatttgcccgtcctcgtgccaccaactcccgggacccctgctaccgctatggatcggctggcttatttgccgacggcccctcaaccattcagctctcgtcacagctctagtccactgtcccctggtggtccaacgcacctgaccaagcctaccacgacaagctcttccgaacgcgaaagggaccgcgacagagagagggatcgcgatagggaacgcgaaaaatccatactcacaagtaccacaacggttgaacacgccccaatctggcggcctggtaccgagcagtcttcgggttcttctggcgggggtggtggcagctcatctaggcccgcctcccattcccacgcccatcagcacagtcccatatccccaagaactcaagatgccctccaacagcgaccctcagttcttcacaataccgggatgaagggtattatcactgctgtcgaaccttcaactccaaccgtgctcagaagcacaagcaccagctcgcccgttcggcccgccgccacttttccacccgctacccactgcccactagggggtaccctagatggagtgtatcccactctcatggagcccgtcctgcttcctaaggaagcccccagggttgcgaggcctgagcgtccacgtgccgacacaggtcatgcatttttggctaagccacccgctagatctggcctggaaccagcctcatctccttcaaagggctccgagccacggccgctggtcccaccagtatccggccacgctacaattgcacggacaccggccaaaaatctcgcccctcaccacgcgagcccagacccacccgctccccccgcttccgcatcggacccccatagagaaaaaacccagagtaaaccatttagcattcaggagctagagctgcgcagtctgggctaccacggctcaagttactcccccgagggcgtggaaccagtttctccggtgtcgagtccttcgctcacccatgacaagggattacctaagcacctcgaggagcttgacaagtcacacctcgagggcgagcttcgcccaaagcagcccggcccggttaaactcggcggggaagccgcacatttacctcacctgaggcctctacccgaatcgcagccgagcagctctccactcctccagaccgcccccggggtgaaaggccaccagagagtcgttacgcttgctcaacacatttccgaagtgataacccaggattatactagacaccaccctcagcagctgagtgccccattacctgctcctctttatagctttcccggtgcctcatgtcctgtgctagatctgcgccgccctccctccgacctgtacttgcctccccctgaccacggggcgccagcacggggtagccctcactccgaagggggcaagaggagccctgaacctaataagacatcggtgctgggtgggggcgaggacgggatcgagcccgtgtcgccacccgagggtatgaccgaacccggacattcccggagtgccgtttacccactcttatacagagacggggaacagaccgagccaagccgcatggggtcaaaaagcccaggaaatacttctcagccacccgcatttttctctaaactgactgagtcgaactccgcaatggtgaagtccaagaagcaggagataaacaagaagctgaatacacacaatcgtaacgaaccagagtataatatctctcagcccggaaccgaaatttttaacatgccggccatcactggcaccggcctgatgacgtaccggagtcaggctgtccaggaacacgctagcactaatatgggtttggaggcaatcatccgcaaagctctcatgggaaagtacgatcagtgggaggagagtccccctctgtccgctaacgcattcaatccgctgaacgcatccgccagcctgcccgctgccatgcctattaccgcagccgatggccggtcagatcacaccctgacgtcacctggaggaggtggcaaggccaaagtcagcgggagaccatcatcccggaaggcaaaatcgccagcccccggtctggcctctggcgacagacctccttcagtttcctcagtgcatagcgaaggcgactgcaaccgccggacaccccttaccaaccgggtgtgggaagatcgcccaagttcagccggatccacccccttcccatataacccacttataatgagactacaggccggtgtgatggcctctccaccaccaccgggtctgcctgcggggagtgggcctctggctgggccccatcacgcttgggacgaggaacctaagccgctcttgtgctcacagtacgagacgctgtctgatagcgagtag

SEQ ID NO: 82287 - DNA, 7515 bp, Artificial Sequence
  derived and/or modified sequence
atgtccggcagcactcagcccgttgcacagacatggcgcgccaccgagcctagatatcctccacattcactatcataccccgtgcagattgctcggacccacactgacgtgggcctgttagaatatcaacatcacagccgggattacgccagtcatttaagccctggctcaatcatccaacctcagagaaggagacccagtcttctatccgagttccagccaggcaacgagcgttcacaggaactgcatttgcgccctgaatcccacagttacctcccggaactgggcaagtccgagatggagttcatagagagcaagcggccccggctggaactgttgccagacccccttttacggccttctcccctgttggccactggtcagcccgccggcagcgaggatctcacgaaggaccggtccctgaccggcaagctagaacctgttagtccacctagcccaccccatacagaccctgaactggagttggttccgccccgcttatcgaaggaggagctcatacagaacatggacagagtcgacagggaaatcacgatggtggagcagcagatcagcaagctgaaaaaaaagcagcagcaacttgaggaggaagctgcaaagcctcctgagccagagaaaccagtgtcaccccctccgattgagagtaaacatcggtctttggtgcaaataatttacgatgagaaccggaagaaggctgaagcagcccatcgtattttagagggactgggccctcaagttgagctgccgctgtataatcagccatccgatactcgtcagtatcacgagaacatcaagataaatcaagctatgcggaaaaagctcatactgtactttaagagaaggaaccacgcaagaaagcagtgggagcagaagttctgtcagcgatatgatcagctcatggaagcctgggaaaagaaggtcgagcgaatcgaaaacaatcctcgtagaagggccaaagagtccaaagtccgcgaatactatgaaaagcaattccccgaaattcgaaagcagcgcgagctccaggagaggatgcagcgcgtggggcagcgcggctcaggcctttctatgtctgctgcccgcagcgaacacgaagtgtccgaaataatcgacggtctttctgagcaggaaaacttggaaaagcagatgcgccagcttgctgttatcccaccaatgctgtatgatgcagaccagcagaggatcaagtttatcaacatgaacgggcttatggcagatccgatgaaagtttacaaagatcggcaggtgatgaatatgtggagcgagcaagagaaggagacattccgagaaaagttcatgcagcaccctaagaacttcggtctgatcgcctcttttttggagagaaagacagttgccgagtgtgtgctgtactactatttgaccaagaagaacgagaactacaagtcccttgtgaggcggagctatcgcagacgtgggaagtcccagcagcagcagcagcagcagcagcagcagcagcagcagcagcaacaacagccaatgcctaggtcctcccaggaggaaaaagatgagaaagaaaaagaaaaagaagcggaaaaagaggaggagaagcctgaggtcgagaatgataaggaagacctcttgaaggaaaagaccgatgataccagtggtgaggacaacgatgaaaaagaagctgttgcttccaaaggccgaaagactgctaattcacagggacgccgaaagggaagaatcactcgatcgatggctaacgaagctaactcagaggaagcaattacacctcagcagagcgcagagcttgcatcaatggaattgaatgagagtagcagatggacggaagaggaaatggagactgccaagaagggactcctggaacacgggaggaattggagcgcaatagctagaatggtaggcagcaagacggtttcacagtgtaagaacttctattttaattataagaagcgtcagaacttggacgagatcctccagcagcataaacttaagatggagaaagagaggaacgctcgtcgtaaaaagaaaaaagcccctgctgctgcttcagaggaggcagcattcccgccagtcgtcgaggacgaggagatggaggctagcggcgtatctggcaacgaagaggagatggtagaggaagcagaagccaccgtcaacaattcttcagataccgaaagtatcccttcaccacatactgaggctgcaaaggatactggccagaacggacccaagcctccagcaacactgggggctgacggacccccccctggcccaccgactccaccacctgaagacatccccgcccccacagaacccaccccggcctcagaagcgaccggggcaccaacacctcctccagctcctccgagcccttccgctccaccacctgtagtgcccaaagaggagaaggaggaggaaactgctgctgcccctccggtagaggagggcgaggaacaaaaaccacccgccgctgaggagctggctgtagataccggtaaagctgaggagccagtgaagtctgagtgtaccgaggaagcagaggagggtccagcaaaagggaaagacgccgaggcggcggaagccactgcagaaggagcattaaaggcagaaaagaaggaggggggaagcgggagagcaacaaccgccaaaagttctggcgctccccaagattccgactcatccgccacatgctcagctgatgaagtggacgaagctgaaggcggagacaagaataggctccttagtccaaggccaagcctcctaacccctactggggacccgcgagcaaatgcctctccgcaaaaacctctggacctgaaacagttaaagcaaagggctgctgcaattccacccattcaggtgaccaaggttcacgagcccccccgtgaggatgcagcaccaaccaagccagccccccctgctccaccacctccacaaaatctgcagcctgagtcagacgcccctcaacagcctgggtcatccccaagaggaaaatctaggagtcccgccccacctgccgataaggaggctgagaaaccggtattcttccctgcttttgccgccgaagcccagaagttacctggcgatcccccttgttggacgagcggtctgccgtttccagttcctcctcgggaggtcattaaagcttcaccccatgcaccagaccccagcgcgttttcctatgcacctcctggacaccccctgcccctgggactccatgatactgcacgacctgttcttcctaggcctcccaccatctctaacccacctcctctaatcagttctgctaagcaccctagtgtgctggaaagacagatcggcgccatctcccaaggcatgtctgtacaactccacgtcccttacagtgaacacgcaaaggccccagttgggccagtaaccatgggcctgccgctgccaatggatcccaaaaagttggcacccttttccggggtaaagcaagagcagctgagcccgaggggccaggctgggcctccggaatcgttgggcgtgccaaccgctcaggaggcctctgtcctcagaggaactgccctcgggtctgtccctggagggagtattaccaaagggataccatcgacacgcgtaccgagcgactctgcaatcacctaccgaggttccattacacacgggacacctgccgatgtcctgtataaaggcacaatcacgaggattattggcgaagactctccgagcagactcgaccggggcagggaagattctctgcctaagggccacgtgatctacgaaggcaaaaaaggccacgtcttaagttacgagggcggcatgtccgtgacccagtgttcgaaggaggatggacgaagttcttcaggccctcctcacgagacggctgctccgaagcgcacctacgatatgatggagggccgggtgggacgtgccatctcaagtgcgtctattgaaggcctgatgggccgggcgatcccccctgagcgacattcacctcaccatctaaaggaacagcatcacatccggggatccattacccaggggatcccgcgatcatacgtggaggcccaggaggattatttgcggcgggaggctaagctgcttaagagggagggcaccccacctcccccaccaccctctagagacttgactgaggcttacaagacacaggcactgggccctttgaagttgaagcccgcccacgagggactggttgctaccgtcaaggaggcaggccggagcatacatgagattcctcgagaagagctgagacacacacctgagcttccccttgccccgcggccattgaaggaaggatccataacgcaaggaactcctctgaaatatgataccggcgcaagcaccactgggtccaaaaagcacgacgtgaggagcctaatagggtcccccgggcggacttttcctcctgtgcaccctctcgatgtaatggccgacgctcgcgccctggagcgagcctgctatgaggagtccttgaagtctagaccaggcactgcatccagctctgggggctcgatcgccagaggcgccccagtgatcgttcctgagttaggcaagcccagacagagcccactaacttacgaagaccatggggcgccttttgcaggccacttacctcgaggatctcccgttaccacaagagagccaacgcctcgcctgcaagagggaagtctgtctagctccaaagctagccaggaccgcaagcttacatctaccccacgcgagatcgcaaaaagcccccattccaccgttccagagcaccacccgcatcctatatccccttatgagcacctcctgagaggtgtgtcaggagttgatctgtacagatcacacattccattagccttcgatccaacctctatccctagagggattccgcttgacgcagccgcagcatactatctgcctaggcacctggccccaaacccaacctaccctcatctgtacccaccgtatctgatccggggttatccagacacagcagcccttgagaaccgccaaaccatcattaacgattacattactagccagcagatgcaccacaatgccgcgactgctatggctcagcgggccgatatgttaagaggcctctcccccagggagtcctctctggcgttgaattacgcggcaggccctagaggcattattgatctgtcccaagtgcctcatctcccagtactggttcctcccacacctggtactccagcgacagcgatggaccgcctcgcttatctgcccaccgctccgcagcctttctcctccaggcactctagttcccccttgagccctggcgggccaacacatttgacaaagccaacgaccacctcttcgagcgagcgcgaaagagatcgtgacagagagcgagatcgagacagagaaagagagaaaagtatattgacctctacgactacggtcgagcatgctcctatctggcgccccggcaccgaacagtcatccggctcaagcggcggaggcggaggatcctcttctagacctgcctcccattcccatgctcatcagcatagtccgatctccccacgcacccaggatgctctgcaacaaaggccatccgtacttcataacactggtatgaagggtataatcaccgctgtggagccaagcacacccactgtcctaaggtccacctcgacatcatcccctgtgcgtcctgcagctacatttccgcctgcgacccactgtcctttagggggcaccctcgacggagtctacccaactctaatggagccagtattactgcccaaagaagcccctagggtggctcgccccgagaggcccagggccgacactggacacgcctttttggcgaagccaccggcccggtccggcctggaacctgcttccagcccaagtaagggatcagaacccaggcctctggttcccccagtgagcggccacgccacaatcgcccgcacaccagccaaaaacctcgcacctcatcacgcctccccagacccgcccgcaccccctgcatctgccagcgatccacacagagagaaaacccagagcaaaccgtttagtattcaggagctggagcttcgatcactgggctatcatgggagctcttactcaccggaaggagtggaacctgtctcccctgtctcttcacccagcctgactcacgataagggcctccctaaacatctggaggagttggataagtcacaccttgagggcgagctgaggcccaagcagcccggacctgtgaagctgggtggagaggcagcccatcttccacacctcagacccctgcctgagtctcaacctagcagtagccccctattacagaccgcccctggggtaaaggggcatcagcgcgtagtgacactggcgcagcatatatccgaggtaatcactcaggactataccagacaccatcctcagcagctgagtgcacccctgccggcacccctttactcattcccaggagcttcttgtccagtgctggacttgagaaggcccccttcggacctataccttcccccccccgatcatggagccccggcaagggggtcaccacacagcgagggcggcaaacgctctccagagccgaataagacgagtgtactgggaggcggcgaggacggcattgaaccggtatcaccacctgagggcatgaccgagcctggccattcaaggagtgccgtttaccctctcctttacagagatggcgagcagaccgagccctctagaatgggtagtaaaagtccaggcaataccagccagccccccgcattcttttccaaactaacggagtctaattctgctatggtgaaatctaaaaaacaggagatcaacaagaaactgaatactcacaacagaaatgagcccgagtataatatctcccagccaggcactgagatttttaatatgcccgccattactgggaccggcctcatgacttatcgcagccaagcagttcaagagcacgcatctacaaacatgggcctggaagctatcataaggaaggcccttatgggcaaatacgaccagtgggaggagagccctcccttgagcgctaatgccttcaacccacttaacgcaagcgcctctttgccagcagccatgcctatcaccgcagcagatggacggagcgatcataccctgacttctcccgggggtggggggaaggccaaggtgagtggccgaccatcctcaaggaaggcaaaatcccctgcccctgggcttgctagcggcgataggccgccaagtgtgtcttcagtgcactccgagggggattgcaacagacgcacaccactgactaatcgcgtctgggaagatcgtcccagttccgcgggttcaactccttttccttataacccacttatcatgagacttcaggcaggtgttatggcgagccctccaccccccggcctgcctgccggttccgggcctctggccggcccccatcacgcctgggacgaagagcctaagccactgctctgctctcaatacgagacactgtcagacagtgagtag

SEQ ID NO: 82288 - DNA, 1821 bp, Artificial Sequence
  derived and/or modified sequence
cttcagagcggggctacacactgccctctgggagggacccttgacggggtgtatcctactctcatggagccagtgctccttccaaaagaggccccacgtgttgcgcgaccggagcggcctcgggccgacacaggtcatgcttttctggcaaaaccccctgctaggagcggcctcgagccagcctcttccccatccaagggctctgagcccagacctttggtgccgccagtgtctggccatgctaccattgctcgcactcccgcaaaaaatttagcccctcaccatgcttcccctgacccgcccgcaccccccgcttcggcatctgatccccatagggagaagacgcaatcaaagcccttttcaatacaagagctggaacttaggtccctgggttatcatggaagttcatattccccggaaggagtagagccagtgtccccggtgagctcccctagtttaacgcacgacaagggactacctaaacatctagaggaattggataaaagccacttggaaggcgagctgcgtccgaagcagcccgggcctgtgaagcttggcggggaggctgcacatctgccacatctgaggccattgcctgagtctcagcccagcagctctccgctgcttcaaacagcacctggggtaaaaggtcatcagcgcgtggtcacattggctcaacatatctccgaggtgataacccaggactatactcgccatcacccacagcaactgagtgcacccctccctgcgccgctgtacagctttcctggagcaagctgccctgtgctcgacctccggcgccctcctagcgacctgtatttaccccctcctgatcatggggcacccgctcgggggtccccacattcggaagggggcaagcgatctcctgaacccaacaaaacttctgttcttggaggcggcgaggacggcattgaacccgtatccccgcccgagggtatgactgaacccgggcatagccggtctgctgtataccccctgctgtaccgcgatggcgagcagacagagccctccagaatgggcagcaagagcccaggtaacacttcccaacccccggctttcttctcgaaactaaccgagtccaacagcgctatggtgaaatctaaaaagcaggagattaacaagaagttgaatacacacaatcgaaatgagcctgagtacaatatttctcagcccggtacagaaatttttaatatgcctgcaatcaccgggaccggactgatgacgtatcgcagtcaagctgttcaggagcatgcctccactaacatgggtctggaagccatcataagaaaggctttgatgggcaaatacgaccagtgggaagagtctcctccgctctctgctaacgcctttaaccctctgaacgcctccgcttcattgccggccgccatgcccattactgctgccgacggccgcagcgatcacactctcacctcacccggcggaggcggtaaagccaaagttagtggccggccctctagccggaaggccaaaagccccgccccagggttggcgagcggtgaccgccccccttctgtcagttctgtgcactccgaaggcgattgtaaccggcgaacccctctgacaaatcgggtgtgggaagatcggccgtcaagcgccggctccacgccatttccttacaatccactaatcatgagactgcaggccggagtgatggcctcccccccacctccgggcttacccgcaggcagcggcccccttgcaggtccccaccacgcctgggacgaagagcccaaaccgctgctgtgttcacagtatgaaacactcagcgattctgaatag

SEQ ID NO: 82289 - DNA, 7566 bp, Artificial Sequence
  derived and/or modified sequence
atgagcggcagcacccagcctgtggcccagacctggagggccacagagccccgctacccaccccacagcctgagctaccctgtgcagatcgcccggacccacacagatgtgggcctgctggagtaccagcaccacagccgggactatgccagccacctgagccctggcagcatcatccagccccagaggcggcggcccagcctgctgtctgagttccagcctggaaatgaaagaagccaggagctgcacctgcggcctgagagccacagctacctgcctgagctgggcaagtctgagatggagttcatcgagagcaagaggccccggctggagctgctgcctgaccccctgctgcggcccagccccctgctggccaccggccagcctgctggcagcgaggacctgaccaaggacaggagcctgaccgggaagctggagcctgtgagcccccccagccccccccacacagatcctgagctggagctggtgcccccccggctgagcaaggaggagctgatccagaacatggacagagtggaccgggagatcaccatggtggagcagcagatcagcaagctgaagaagaagcagcagcagctggaggaggaggccgccaagcccccagagcctgagaagcctgtgagccccccacccatcgagagcaagcacaggagcctggtgcagatcatctatgatgaaaataggaagaaggccgaggccgcccaccgcatcctggagggcctgggcccccaggtggagctgcccctgtacaaccagcccagcgacacccggcagtaccacgagaacatcaagatcaaccaggccatgaggaagaagctgatcctgtacttcaagagaagaaatcatgccaggaagcagtgggagcagaagttctgccagagatatgaccagctgatggaggcctgggagaagaaggtggagagaattgagaacaacccccggcggcgggccaaggagagcaaggtgcgggagtactatgagaagcagtttcctgagatcaggaagcagcgggagctgcaggagaggatgcagagccgggtgggccagaggggcagcggcctgtccatgtctgctgcccggtctgagcacgaggtgtctgagatcattgatggcctgtctgagcaggagaacctggagaagcagatgaggcagctggccgtcatcccccccatgctgtatgatgctgaccagcagaggatcaagttcatcaacatgaatggcctgatggctgaccccatgaaggtgtacaaggaccggcaggtgatgaacatgtggagcgagcaggagaaggagaccttccgggagaagttcatgcagcaccccaagaactttggcctcatcgccagcttcctggagaggaagacagtggctgaatgtgtgctgtactactacctgaccaagaagaatgaaaactacaagagcctggtgcggcgcagctacagaagaagaggcaagagccagcagcagcagcagcagcagcagcagcagcagcagcagcagcagcagcagcccatgcccaggagcagccaggaggagaaggatgagaaggagaaggagaaggaggccgagaaggaggaggagaagccagaggtggagaatgacaaggaggacctgctgaaggagaagacagatgacaccagcggggaggacaatgatgagaaggaggccgtggccagcaaaggaaggaagacagccaacagccagggccgcaggaagggccgcatcaccaggtccatggccaatgaggccaacagcgaggaggccatcaccccccagcagagcgctgagctggcctccatggagctgaatgaaagcagccgctggacagaggaggagatggagacagccaagaagggcctgctggagcacggcaggaactggagcgccatcgccaggatggtgggcagcaagacagtgtcccagtgcaagaacttctacttcaactacaagaagaggcagaacctggatgagatcctgcagcagcacaagctgaagatggagaaggagagaaatgcccggaggaagaagaagaaggccccagctgctgccagcgaggaggccgccttcccccctgtggtggaggatgaggagatggaggccagcggcgtgtctggaaatgaggaggagatggtggaggaggccgaggccctgcacgccagcggaaatgaggtgcccagaggagaatgttctggccctgccaccgtgaacaacagcagtgacacagagagcatccccagcccccacacagaggccgccaaggacaccggccagaatggccccaagcccccagccaccctgggcgcagatggccccccacctggcccccccaccccacctcctgaggacatcccagcccccacagagcccaccccagccagcgaggccactggagcccccaccccacctccagccccacccagccccagcgcccctcctcctgtggtgcccaaggaggagaaggaggaggagacagctgctgcccctcctgtggaggagggggaggagcagaagcccccagctgctgaggagctggccgtggacaccgggaaggccgaggagcctgtgaagtcagaatgtacagaggaggccgaggagggccctgccaagggcaaggatgctgaggccgctgaggccacagctgagggcgccctgaaggccgagaagaaggagggcggcagcggccgggccaccacagccaagagcagcggggccccccaggacagcgacagcagcgccacctgcagcgcagatgaggtggatgaagctgagggcggggacaagaaccggctgctgagcccccggcccagcctgctgacccccaccggggacccccgggccaatgccagcccccagaagcccctggacctgaagcagctgaagcagagagctgctgccatcccccccatcgtgaccaaggtgcatgagcccccccgggaggatgctgcccccaccaagccagcccccccagcccctcctccaccccagaacctgcagcctgagagtgatgccccccagcagcccggcagcagcccccggggcaagagccgcagccctgcccctcctgctgacaaggaggccgagaagcctgtgttcttccctgcctttgctgctgaggcccagaagctgcccggggaccccccctgctggaccagcggcctgcccttccctgtgcccccccgggaggtgatcaaggccagcccccacgccccagaccccagcgccttctcctatgcccctcctggccaccccctgcccctgggcctgcatgacacagcccggcctgtgctgccccggccccccaccatcagcaaccccccacccctcatcagcagcgccaagcaccccagcgtgctggagcggcagattggagccatcagccagggcatgtctgtgcagctgcacgtgccctacagcgagcacgccaaggcccctgtgggccctgtgaccatgggcctgcccctgcccatggaccccaagaagctggcccccttcagcggcgtgaagcaggagcagctgagcccccggggccaggccggccccccagagagcctgggcgtgcccacagcccaggaggcctctgtgctgcggggcacagccctgggctctgtgcctgggggcagcatcaccaagggcatccccagcaccagggtgcccagcgacagcgccatcacctaccggggcagcatcacccacggcaccccagcagatgtgctgtacaagggcaccatcacccgcatcatcggggaggacagccccagccggctggaccggggccgggaggacagcctgcccaagggccacgtgatctatgagggcaagaagggccacgtgctgtcctatgaaggaggcatgtctgtgacccagtgcagcaaagaagatggccgcagcagcagcggcccccctcatgaaacagctgcccccaagaggacctatgacatgatggagggccgggtgggccgggccatcagcagcgccagcattgagggcctgatgggccgggccatccccccagagcggcacagcccccaccacctgaaggagcagcaccacatccggggcagcatcacccagggcatccccaggagctatgtggaggcccaggaggactacctgcggcgggaggccaagctgctgaagcgggagggcaccccacctcctcctccacccagccgggacctgacagaggcctacaagacccaggccctgggccccctgaagctgaagccagcccacgagggcctggtggccaccgtgaaggaggccggccgcagcatccacgagatcccccgggaggagctgcggcacaccccagagctgcccctggccccccggcccctgaaggagggcagcatcacccagggcacccccctgaagtatgacaccggggccagcaccaccggcagcaagaagcatgatgtgcgcagcctcatcggcagccctggccgcaccttcccccctgtgcaccccctggatgtgatggctgatgcccgggccctggagcgggcctgctatgaggagagcctgaagagcaggcctggaacagccagcagcagcggcggcagcatcgcccggggggcccctgtgattgtgcctgagctgggcaagccccggcagagccccctgacctatgaagatcatggagccccctttgctggccacctgccccggggcagccctgtgaccacccgggagcccaccccccggctgcaggagggcagcctgagcagcagcaaggccagccaggacaggaagctgaccagcaccccccgggagatcgccaagagcccccacagcacagtgcctgagcaccacccccaccccatcagcccctatgagcacctgctgcggggcgtgtctggagtggacctgtaccgcagccacatccccctggcctttgaccccaccagcatcccccggggcatccccctggatgctgctgctgcctactacctgcccaggcacctggcccccaaccccacctacccccacctgtacccaccctacctgatccggggctacccagacacagctgccctggagaaccggcagaccatcatcaatgactacatcaccagccagcagatgcaccacaatgctgccacagccatggcccagagagctgacatgctgcggggcctgagcccccgggagagcagcctggccctgaactatgctgctggcccccggggcatcatcgacctgagccaggtgccccacctgcctgtgctggtgccccccaccccaggcaccccagccacagccatggaccggctggcctacctgcccacagccccccagcccttcagcagccgccacagcagcagccccctgagccctgggggccccacccacctgaccaagcccaccaccaccagcagcagcgagcgggagcgggaccgggaccgggagcgggaccgggaccgggagcgggagaagagcatcctgaccagcaccaccaccgtggagcacgcccccatctggaggcctggaacagagcagagcagcggcagcagcggcggcggcggcggcagcagcagcaggcctgccagccacagccacgcccaccagcacagccccatcagccccaggacccaggatgccctgcagcagaggcccagcgtgctgcacaacacaggcatgaagggcatcatcacagctgtggagcccagcacccccaccgtgctgcggagcaccagcaccagcagccctgtgcggcctgctgccaccttccccccagccacccactgccccctgggcggcaccctggatggagtgtaccccaccctgatggagcctgtgctgctgcccaaggaggccccccgggtggcccggcctgagcggcccagggctgacaccggccacgccttcctggccaagcccccagcccggagcggcctggagcccgccagcagccccagcaaaggaagtgagccccggcccctggtgccccctgtgtctggccacgccaccatcgcccggaccccagccaagaacctggccccccaccacgccagcccagaccccccagcccccccagccagcgccagtgacccccaccgggagaagacccagagcaagcccttcagcatccaggagctggagctgcggagcctgggctaccacggcagcagctacagccctgagggcgtggagcctgtgtcccctgtgagcagccccagcctgacccatgacaagggcctgcccaagcacctggaggagctggacaagagccacctggagggggagctgcggcccaagcagcccggccctgtgaagctgggcggggaggccgcccacctgccccacctgcggcccctgcctgagagccagcccagcagcagccccctgctgcagacagcccctggggtgaagggccaccagagggtggtgaccctggcccagcacatcagcgaggtgatcacccaggactacaccaggcaccacccccagcagctgagcgcccccctgcctgcccccctgtacagcttccctggggccagctgccctgtgctggacctgcggcggcccccaagtgacctgtacctgcccccaccagaccacggggccccagcccggggcagcccccacagcgagggcggcaagaggagccctgagcccaacaagacctctgtgctgggcggcggagaagatggcatcgagcctgtgtccccacctgagggcatgacagagcccggccacagccgctctgctgtgtaccccctgctgtacagagatggagagcagacagagcccagcaggatgggcagcaagagccctggcaacaccagccagcccccagccttcttcagcaagctgacagagagcaacagcgccatggtgaagagcaagaagcaggagatcaacaagaagctgaacacccacaacagaaatgaacctgagtacaacatcagccagcctggaacagagatcttcaacatgcctgccatcaccggcaccggcctgatgacctaccgcagccaggccgtgcaggagcacgccagcaccaacatgggcctggaggccatcatcaggaaggccctgatgggcaagtatgaccagtgggaggagagcccccccctgagcgccaatgccttcaaccccctgaatgccagcgccagcctgcctgctgccatgcccatcacagctgctgatggccgcagtgaccacaccctgaccagccctgggggcggcggcaaggccaaggtgtctggccggcccagcagcaggaaggccaagagccctgcccctggcctggccagcggggacaggcctccttctgtgtcctctgtgcacagcgagggggactgcaacagaaggacccccctgaccaacagagtgtgggaggaccggcccagcagcgctggcagcacccccttcccctacaaccccctcatcatgaggctgcaggccggcgtgatggccagccccccacctcctggcctgcctgctggcagcggccccctggccggcccccaccacgcctgggatgaggagcccaagcccctgctgtgcagccagtatgagaccctgagtgacagcgagtag

SEQ ID NO: 82290 - DNA, 6228 bp, Artificial Sequence
  derived and/or modified sequence
atgtggagcgagcaggagaaggagaccttccgggagaagttcatgcagcaccccaagaactttggcctcatcgccagcttcctggagaggaagacagtggctgaatgtgtgctgtactactacctgaccaagaagaatgaaaactacaagagcctggtgcggcgcagctacagaagaagaggcaagagccagcagcagcagcagcagcagcagcagcagcagcagcagcagcagcagcagcccatgcccaggagcagccaggaggagaaggatgagaaggagaaggagaaggaggccgagaaggaggaggagaagccagaggtggagaatgacaaggaggacctgctgaaggagaagacagatgacaccagcggggaggacaatgatgagaaggaggccgtggccagcaaaggaaggaagacagccaacagccagggccgcaggaagggccgcatcaccaggtccatggccaatgaggccaacagcgaggaggccatcaccccccagcagagcgctgagctggcctccatggagctgaatgaaagcagccgctggacagaggaggagatggagacagccaagaagggcctgctggagcacggcaggaactggagcgccatcgccaggatggtgggcagcaagacagtgtcccagtgcaagaacttctacttcaactacaagaagaggcagaacctggatgagatcctgcagcagcacaagctgaagatggagaaggagagaaatgcccggaggaagaagaagaaggccccagctgctgccagcgaggaggccgccttcccccctgtggtggaggatgaggagatggaggccagcggcgtgtctggaaatgaggaggagatggtggaggaggccgaggccaccgtgaacaacagcagtgacacagagagcatccccagcccccacacagaagctgccaaggacaccggccagaatggccccaagcccccagccaccctgggcgcagatggccccccacctggcccccccaccccacctcctgaggacatcccagcccccacagagcccaccccagccagcgaggccaccggggcccccaccccacctccagccccacccagccccagcgcccctcctcctgtggtgcccaaggaggagaaggaggaggagacagctgctgcccctcctgtggaggagggggaggagcagaagcccccagctgctgaggagctggccgtggacaccgggaaggccgaggagcctgtgaagtctgagtgcacagaggaggccgaggagggccctgccaagggcaaggatgctgaggccgctgaggccacagctgagggcgccctgaaggccgagaagaaggagggcggcagcggccgggccaccacagccaagagcagcggggccccccaggacagcgacagcagcgccacctgcagcgcagatgaggtggatgaggccgagggcggggacaagaaccggctgctgagcccccggcccagcctgctgacccccactggagacccccgggccaatgccagcccccagaagcccctggacctgaagcagctgaagcagagagctgctgccatcccccccatccaggtgaccaaggtgcatgagcccccccgggaggatgctgcccccaccaagccagcccccccagcccctcctccaccccagaacctgcagcctgagagtgatgccccccagcagcccggcagcagcccccggggcaagagccgcagccctgcccctcctgctgacaaggaggccgagaagcctgtgttcttccctgcctttgctgctgaggcccagaagctgcccggggaccccccctgctggaccagcggcctgcccttccctgtgcccccccgggaggtgatcaaggccagcccccacgccccagaccccagcgccttctcctatgcccctcctggccaccccctgcccctgggcctgcatgacacagcccggcctgtgctgccccggccccccaccatcagcaaccccccacccctcatcagcagcgccaagcaccccagcgtgctggagcggcagattggagccatcagccagggcatgtctgtgcagctgcacgtgccctacagcgagcacgccaaggcccctgtgggccctgtgaccatgggcctgcccctgcccatggaccccaagaagctggcccccttcagcggcgtgaagcaggagcagctgagcccccggggccaggccggccccccagagagcctgggcgtgcccacagcccaggaggcctctgtgctgcggggcacagccctgggctctgtgcctgggggcagcatcaccaagggcatccccagcaccagggtgcccagcgacagcgccatcacctaccggggcagcatcacccacggcaccccagcagatgtgctgtacaagggcaccatcacccgcatcatcggggaggacagccccagccggctggaccggggccgggaggacagcctgcccaagggccacgtgatctatgagggcaagaagggccacgtgctgtcctatgaaggaggcatgtctgtgacccagtgcagcaaagaagatggccgcagcagcagcggcccccctcatgaaacagctgcccccaagaggacctatgacatgatggagggccgggtgggccgggccatcagcagcgccagcattgagggcctgatgggccgggccatccccccagagcggcacagcccccaccacctgaaggagcagcaccacatccggggcagcatcacccagggcatccccaggagctatgtggaggcccaggaggactacctgcggcgggaggccaagctgctgaagcgggagggcaccccacctcctcctccacccagccgggacctgacagaggcctacaagacccaggccctgggccccctgaagctgaagccagcccacgagggcctggtggccaccgtgaaggaggccggccgcagcatccacgagatcccccgggaggagctgcggcacaccccagagctgcccctggccccccggcccctgaaggagggcagcatcacccagggcacccccctgaagtatgacaccggggccagcaccaccggcagcaagaagcatgatgtgcgcagcctcatcggcagccctggccgcaccttcccccctgtgcaccccctggatgtgatggctgatgcccgggccctggagcgggcctgctatgaggagagcctgaagagcaggcctggaacagccagcagcagcggcggcagcatcgcccggggggcccctgtgattgtgcctgagctgggcaagccccggcagagccccctgacctatgaagatcatggagccccctttgctggccacctgccccggggcagccctgtgaccacccgggagcccaccccccggctgcaggagggcagcctgagcagcagcaaggccagccaggacaggaagctgaccagcaccccccgggagatcgccaagagcccccacagcacagtgcctgagcaccacccccaccccatcagcccctatgagcacctgctgcggggcgtgtctggagtggacctgtaccgcagccacatccccctggcctttgaccccaccagcatcccccggggcatccccctggatgctgctgctgcctactacctgcccaggcacctggcccccaaccccacctacccccacctgtacccaccctacctgatccggggctacccagacacagctgccctggagaaccggcagaccatcatcaatgactacatcaccagccagcagatgcaccacaatgctgccacagccatggcccagagagctgacatgctgcggggcctgagcccccgggagagcagcctggccctgaactatgctgctggcccccggggcatcatcgacctgagccaggtgccccacctgcctgtgctggtgccccccaccccaggcaccccagccacagccatggaccggctggcctacctgcccacagccccccagcccttcagcagccgccacagcagcagccccctgagccctgggggccccacccacctgaccaagcccaccaccaccagcagcagcgagcgggagcgggaccgggaccgggagcgggaccgggaccgggagcgggagaagagcatcctgaccagcaccaccaccgtggagcacgcccccatctggaggcctggaacagagcagagcagcggcagcagcggcggcggcggcggcagcagcagcaggcctgccagccacagccacgcccaccagcacagccccatcagccccaggacccaggatgccctgcagcagaggcccagcgtgctgcacaacacaggcatgaagggcatcatcacagctgtggagcccagcacccccaccgtgctgcggagcaccagcaccagcagccctgtgcggcctgctgccaccttccccccagccacccactgccccctgggcggcaccctggatggagtgtaccccaccctgatggagcctgtgctgctgcccaaggaggccccccgggtggcccggcctgagcggcccagggctgacaccggccacgccttcctggccaagcccccagcccggagcggcctggagcccgccagcagccccagcaaaggaagtgagccccggcccctggtgccccctgtgtctggccacgccaccatcgcccggaccccagccaagaacctggccccccaccacgccagcccagaccccccagcccccccagccagcgccagtgacccccaccgggagaagacccagagcaagcccttcagcatccaggagctggagctgcggagcctgggctaccacggcagcagctacagccctgagggcgtggagcctgtgtcccctgtgagcagccccagcctgacccatgacaagggcctgcccaagcacctggaggagctggacaagagccacctggagggggagctgcggcccaagcagcccggccctgtgaagctgggcggggaggccgcccacctgccccacctgcggcccctgcctgagagccagcccagcagcagccccctgctgcagacagcccctggggtgaagggccaccagagggtggtgaccctggcccagcacatcagcgaggtgatcacccaggactacaccaggcaccacccccagcagctgagcgcccccctgcctgcccccctgtacagcttccctggggccagctgccctgtgctggacctgcggcggcccccaagtgacctgtacctgcccccaccagaccacggggccccagcccggggcagcccccacagcgagggcggcaagaggagccctgagcccaacaagacctctgtgctgggcggcggagaagatggcatcgagcctgtgtccccacctgagggcatgacagagcccggccacagccgctctgctgtgtaccccctgctgtacagagatggagagcagacagagcccagcaggatgggcagcaagagccctggcaacaccagccagcccccagccttcttcagcaagctgacagagagcaacagcgccatggtgaagagcaagaagcaggagatcaacaagaagctgaacacccacaacagaaatgaacctgagtacaacatcagccagcctggaacagagatcttcaacatgcctgccatcaccggcaccggcctgatgacctaccgcagccaggccgtgcaggagcacgccagcaccaacatgggcctggaggccatcatcaggaaggccctgatgggcaagtatgaccagtgggaggagagcccccccctgagcgccaatgccttcaaccccctgaatgccagcgccagcctgcctgctgccatgcccatcacagctgctgatggccgcagtgaccacaccctgaccagccctgggggcggcggcaaggccaaggtgtctggccggcccagcagcaggaaggccaagagccctgcccctggcctggccagcggggacaggcctccttctgtgtcctctgtgcacagcgagggggactgcaacagaaggacccccctgaccaacagagtgtgggaggaccggcccagcagcgctggcagcacccccttcccctacaaccccctcatcatgaggctgcaggccggcgtgatggccagccccccacctcctggcctgcctgctggcagcggccccctggccggcccccaccacgcctgggatgaggagcccaagcccctgctgtgcagccagtatgagaccctgagtgacagcgagtag

SEQ ID NO: 82291 - DNA, 7515 bp, Artificial Sequence
  derived and/or modified sequence
atgagcggcagcacccagcctgtggcccagacctggagggccacagagccccgctacccaccccacagcctgagctaccctgtgcagatcgcccggacccacacagatgtgggcctgctggagtaccagcaccacagccgggactatgccagccacctgagccctggcagcatcatccagccccagaggcggcggcccagcctgctgtctgagttccagcctggaaatgaaagaagccaggagctgcacctgcggcctgagagccacagctacctgcctgagctgggcaagtctgagatggagttcatcgagagcaagaggccccggctggagctgctgcctgaccccctgctgcggcccagccccctgctggccaccggccagcctgctggcagcgaggacctgaccaaggacaggagcctgaccgggaagctggagcctgtgagcccccccagccccccccacacagatcctgagctggagctggtgcccccccggctgagcaaggaggagctgatccagaacatggacagagtggaccgggagatcaccatggtggagcagcagatcagcaagctgaagaagaagcagcagcagctggaggaggaggccgccaagcccccagagcctgagaagcctgtgagccccccacccatcgagagcaagcacaggagcctggtgcagatcatctatgatgaaaataggaagaaggccgaggccgcccaccgcatcctggagggcctgggcccccaggtggagctgcccctgtacaaccagcccagcgacacccggcagtaccacgagaacatcaagatcaaccaggccatgaggaagaagctgatcctgtacttcaagagaagaaatcatgccaggaagcagtgggagcagaagttctgccagagatatgaccagctgatggaggcctgggagaagaaggtggagagaattgagaacaacccccggcggcgggccaaggagagcaaggtgcgggagtactatgagaagcagtttcctgagatcaggaagcagcgggagctgcaggagaggatgcagagggtgggccagaggggcagcggcctgtccatgtctgctgcccggagtgaacatgaggtgtctgagatcattgatggcctgtctgagcaggagaacctggagaagcagatgaggcagctggccgtcatcccccccatgctgtatgatgctgaccagcagaggatcaagttcatcaacatgaatggcctgatggctgaccccatgaaggtgtacaaggaccggcaggtgatgaacatgtggagcgagcaggagaaggagaccttccgggagaagttcatgcagcaccccaagaactttggcctgattgccagcttcctggagaggaagacagtggccgagtgtgtgctgtactactacctgaccaagaagaatgaaaactacaagagcctggtgagaagaagctacagaagaagaggcaagagccagcagcagcagcagcagcagcagcagcagcagcagcagcagcagcagcagcccatgcccaggagcagccaggaggagaaggatgagaaggagaaggagaaggaggccgagaaggaggaggagaagccagaggtggagaatgacaaggaggacctgctgaaggagaagacagatgacaccagcggagaagataatgatgagaaggaggccgtggccagcaagggcaggaagacagccaacagccagggccgcaggaagggccgcatcaccaggtccatggccaatgaggccaacagcgaggaggccatcaccccccagcagagcgctgagctggcctccatggagctgaatgaaagcagccgctggacagaggaggagatggagacagccaagaagggcctgctggagcacggcaggaactggagcgccatcgccaggatggtgggcagcaagacagtgtcccagtgcaagaacttctacttcaactacaagaagaggcagaacctggatgagatcctgcagcagcacaagctgaagatggagaaggagagaaatgcccggaggaagaagaagaaggccccagctgctgccagcgaggaggccgccttcccccctgtggtggaggatgaggagatggaggccagcggcgtgtctggaaatgaggaggagatggtggaggaggccgaggccaccgtgaacaacagcagtgacacagagagcatccccagcccccacacagaggccgccaaggacaccggccagaatggccccaagcccccagccaccctgggcgcagatggccccccacctggcccccccaccccacctcctgaggacatcccagcccccacagagcccaccccagccagcgaggccactggagcccccaccccacctccagccccacccagccccagcgcccctcctcctgtggtgcccaaggaggagaaggaggaggagacagctgctgcccctcctgtggaggagggggaggagcagaagcccccagctgctgaggagctggccgtggacaccgggaaggccgaggagcctgtgaagtcagaatgtacagaggaggccgaggagggccctgccaagggcaaggatgctgaggccgctgaggccacagctgagggcgccctgaaggccgagaagaaggagggcggcagcggccgggccaccacagccaagagcagcggggccccccaggacagcgacagcagcgccacctgcagcgcagatgaggtggatgaagctgagggcggggacaagaaccggctgctgagcccccggcccagcctgctgacccccaccggggacccccgggccaatgccagcccccagaagcccctggacctgaagcagctgaagcagagagctgctgccatcccccccatccaggtgaccaaggtgcatgagcccccaagagaagatgctgcccccaccaagccagcccccccagcccctcctccaccccagaacctgcagcctgagagtgatgccccccagcagcccggcagcagcccccggggcaagagccgcagccctgcccccccagctgacaaggaggccgagaagcctgtgttcttccctgcctttgctgctgaggcccagaagctgcccggggaccccccctgctggaccagcggcctgcccttccctgtgcccccccgggaggtgatcaaggccagcccccacgccccagaccccagcgccttctcctatgcccctcctggccaccccctgcccctgggcctgcatgacacagcccggcctgtgctgcccaggcctcccaccatcagcaaccccccacccctcatcagcagcgccaagcaccccagcgtgctggagcggcagatcggggccatcagccagggcatgtctgtgcagctgcacgtgccctacagcgagcacgccaaggcccctgtgggccctgtgaccatgggcctgcccctgcccatggaccccaagaagctggcccccttctctggagtgaagcaggagcagctgagcccccggggccaggccggccccccagagagcctgggcgtgcccacagcccaggaggcctctgtgctgcggggcacagccctgggctctgtgcctgggggcagcatcaccaagggcatccccagcaccagggtgcccagcgacagcgccatcacctaccggggcagcatcacccacggcaccccagcagatgtgctgtacaagggcaccatcacccgcatcattggagaggacagccccagccggctggaccggggccgggaggacagcctgcccaagggccacgtgatctatgagggcaagaagggccacgtgctgtcctatgagggcggcatgtctgtgacccagtgcagcaaggaggatggccgcagcagcagcggcccccctcatgaaacagctgcccccaagaggacctatgacatgatggagggccgggtgggccgggccatcagcagcgccagcattgagggcctgatgggccgggccatccccccagagcggcacagcccccaccacctgaaggagcagcaccacatccggggcagcatcacccagggcatccccaggagctatgtggaggcccaggaggactacctgcggcgggaggccaagctgctgaagcgggagggcaccccacctcctcctccacccagccgggacctgacagaggcctacaagacccaggccctgggccccctgaagctgaagccagcccacgagggcctggtggccaccgtgaaggaggccggccgcagcatccacgagatcccccgggaggagctgcggcacaccccagagctgcccctggccccccggcccctgaaggagggcagcatcacccagggcacccccctgaagtatgacacaggagccagcaccaccggcagcaagaagcatgatgtgcgcagcctgattggcagccctggccgcaccttcccccctgtgcaccccctggatgtgatggctgatgcccgggccctggagcgggcctgctatgaggagagcctgaagagccggcccggcacagccagcagcagcggcggcagcatcgcccggggggcccctgtgattgtgcctgagctgggcaagccccggcagagccccctgacctatgaggaccacggggccccctttgctggccacctgccccggggcagccctgtgaccacccgggagcccaccccccggctgcaggagggcagcctgagcagcagcaaggccagccaggacaggaagctgaccagcaccccccgggagatcgccaagagcccccacagcacagtgcctgagcaccacccccaccccatcagcccctatgagcacctgctgcggggcgtgtctggagtggacctgtaccgcagccacatccccctggcctttgaccccaccagcatcccccggggcatccccctggatgctgctgctgcctactacctgcccaggcacctggcccccaaccccacctacccccacctgtacccaccctacctgatccggggctacccagacacagctgccctggagaaccggcagaccatcatcaatgactacatcaccagccagcagatgcaccacaatgctgccacagccatggcccagagagctgacatgctgcggggcctgagcccccgggagagcagcctggccctgaactatgctgctggcccccggggcatcatcgacctgagccaggtgccccacctgcctgtgctggtgccccccaccccaggcaccccagccacagccatggaccggctggcctacctgcccacagccccccagcccttcagcagccgccacagcagcagccccctgagccctgggggccccacccacctgaccaagcccaccaccaccagcagcagcgagcgggagcgggaccgggaccgggagcgggaccgggaccgggagcgggagaagagcatcctgaccagcaccaccaccgtggagcacgcccccatctggaggcctggaacagagcagagcagcggcagcagcggcggcggcggcggcagcagcagcaggcctgccagccacagccacgcccaccagcacagccccatcagccccaggacccaggatgccctgcagcagaggccttctgtgctgcacaacacaggcatgaagggcatcatcacagctgtggagcccagcacccccaccgtgctgcggagcaccagcaccagcagccctgtgcggcctgctgccaccttccccccagccacccactgccccctgggcggcaccctggatggagtgtaccccaccctgatggagcctgtgctgctgcccaaggaggccccccgggtggcccggcctgagcggcccagggctgacaccggccacgccttcctggccaagcccccagcccggagcggcctggagcccgccagcagccccagcaagggcagcgagccccggcccctggtgccccctgtgtctggccacgccaccatcgcccggaccccagccaagaacctggccccccaccacgccagcccagaccccccagcccccccagccagcgccagtgacccccaccgggagaagacccagagcaagcccttcagcatccaggagctggagctgcggagcctgggctaccacggcagcagctacagccctgagggcgtggagcctgtgtcccctgtgagcagccccagcctgacccatgacaagggcctgcccaagcacctggaggagctggacaagagccacctggagggggagctgcggcccaagcagcccggccctgtgaagctgggcggggaggccgcccacctgccccacctgcggcccctgcctgagagccagcccagcagcagccccctgctgcagacagcccctggggtgaagggccaccagagggtggtgaccctggcccagcacatcagcgaggtgatcacccaggactacaccaggcaccacccccagcagctgagcgcccccctgcctgcccccctgtacagcttccctggggccagctgccctgtgctggacctgcggcggccccccagcgacctgtacctgcccccaccagaccatggagccccagcccggggcagcccccacagcgagggcggcaagaggagccctgagcccaacaagacctctgtgctgggcggcggggaggatggcatcgagcctgtgagccccccagagggcatgacagagcccggccacagccgctctgctgtgtaccccctgctgtacagagatggagagcagacagagcccagcaggatgggcagcaagagccctggcaacaccagccagcccccagccttcttcagcaagctgacagagagcaacagcgccatggtgaagagcaagaagcaggagatcaacaagaagctgaacacccacaacagaaatgaacctgagtacaacatcagccagcccggcacagagatcttcaacatgcctgccatcactggaacaggcctgatgacctaccgcagccaggccgtgcaggagcacgccagcaccaacatgggcctggaggccatcatcaggaaggccctgatgggcaagtatgaccagtgggaggagagcccccccctgagcgccaatgccttcaaccccctgaatgccagcgccagcctgcctgctgccatgcccatcacagctgctgatggccgcagtgaccacaccctgaccagccctgggggcggcggcaaggccaaggtgtctggccggcccagcagcaggaaggccaagagccctgcccctggcctggccagcggggaccggccccccagcgtgtcctctgtgcacagcgagggggactgcaacagaaggacccccctgaccaacagagtgtgggaggaccggcccagcagcgctggcagcacccccttcccctacaaccccctcatcatgaggctgcaggccggcgtgatggccagccccccacctcctggcctgcctgctggcagcggccccctggccggcccccaccacgcctgggatgaggagcccaagcccctgctgtgcagccagtatgagaccctgagtgacagcgagtag

SEQ ID NO: 82292 - DNA, 1821 bp, Artificial Sequence
  derived and/or modified sequence
ctgcagagcggggccacccactgccccctgggcggcaccctggatggagtgtaccccaccctgatggagcctgtgctgctgcccaaggaggccccccgggtggcccggcctgagcggcccagggctgacaccggccacgccttcctggccaagcccccagcccggagcggcctggagcccgccagcagccccagcaagggcagcgagccccggcccctggtgccccctgtgtctggccacgccaccatcgcccggaccccagccaagaacctggccccccaccacgccagcccagaccccccagcccccccagccagcgccagtgacccccaccgggagaagacccagagcaagcccttcagcatccaggagctggagctgcggagcctgggctaccacggcagcagctacagccctgagggcgtggagcctgtgtcccctgtgagcagccccagcctgacccatgacaagggcctgcccaagcacctggaggagctggacaagagccacctggagggggagctgcggcccaagcagcccggccctgtgaagctgggcggggaggccgcccacctgccccacctgcggcccctgcctgagagccagcccagcagcagccccctgctgcagacagcccctggggtgaagggccaccagagggtggtgaccctggcccagcacatcagcgaggtgatcacccaggactacaccaggcaccacccccagcagctgagcgcccccctgcctgcccccctgtacagcttccctggggccagctgccctgtgctggacctgcggcggccccccagcgacctgtacctgcccccaccagaccatggagccccagcccggggcagcccccacagcgagggcggcaagaggagccctgagcccaacaagacctctgtgctgggcggcggggaggatggcatcgagcctgtgagccccccagagggcatgacagagcccggccacagccgctctgctgtgtaccccctgctgtacagagatggagagcagacagagcccagcaggatgggcagcaagagccctggcaacaccagccagcccccagccttcttcagcaagctgacagagagcaacagcgccatggtgaagagcaagaagcaggagatcaacaagaagctgaacacccacaacagaaatgaacctgagtacaacatcagccagcccggcacagagatcttcaacatgcctgccatcactggaacaggcctgatgacctaccgcagccaggccgtgcaggagcacgccagcaccaacatgggcctggaggccatcatcaggaaggccctgatgggcaagtatgaccagtgggaggagagcccccccctgagcgccaatgccttcaaccccctgaatgccagcgccagcctgcctgctgccatgcccatcacagctgctgatggccgcagtgaccacaccctgaccagccctgggggcggcggcaaggccaaggtgtctggccggcccagcagcaggaaggccaagagccctgcccctggcctggccagcggggaccggccccccagcgtgtcctctgtgcacagcgagggggactgcaacagaaggacccccctgaccaacagagtgtgggaggaccggcccagcagcgctggcagcacccccttcccctacaaccccctcatcatgaggctgcaggccggcgtgatggccagccccccacctcctggcctgcctgctggcagcggccccctggccggcccccaccacgcctgggatgaggagcccaagcccctgctgtgcagccagtatgagaccctgagtgacagcgagtag

SEQ ID NO: 82293 - DNA, 7566 bp, Artificial Sequence
  derived and/or modified sequence
atgagcggcagcacccagcccgtggcccagacctggcgggccaccgaacctcgctatcctccacactccctgtcttatcccgttcaaatcgcaaggacccacacagatgttgggttgctcgagtatcagcaccacagtcgcgattacgcgtctcacctgtcacctggatcaatcatacaaccgcagcgccgaagaccgagcctcctgtccgagtttcagccaggaaacgagaggagccaggagttacatcttaggcctgaatctcacagctacctccccgaactcggcaaatctgagatggaattcatcgagagtaagaggccacgactggagttgctgcccgatcccttgctgcgcccaagtccgctcctggctacggggcagccagctggctccgaggatctcactaaagaccgtagcctcaccggtaagctggaacctgtaagccccccctctcccccccataccgaccccgagctcgaacttgtgccccctcgcctttcaaaggaagagctgatccaaaacatggacagggttgacagagagataacgatggtggaacaacagatcagcaagttgaagaaaaaacagcagcagctggaagaggaggccgcgaagcctcccgagccggagaagccagtctcgccgcccccaatagaatctaaacatcgttcactggttcagattatttatgacgagaacaggaagaaggccgaagccgcccatagaatcttggagggcttgggcccccaggttgaactgcccctttataaccagcctagtgatacccgacaatatcatgaaaacataaagatcaaccaggctatgcgcaagaaattgatcctctatttcaagagaagaaaccatgcaagaaaacagtgggagcagaagttctgccagcggtacgaccaactgatggaagcatgggaaaagaaggtggaaagaatcgagaacaatccacgtagaagggccaaagaatcgaaggtacgagagtactatgaaaagcagtttccagaaataagaaagcagagagagctccaggaacggatgcagtctcgggtgggccagcggggatccggcttatcaatgtcagccgctaggtccgagcacgaggtctcggaaatcatcgacgggctatccgaacaggagaacctggagaaacagatgcggcagcttgcagtcatacctcctatgctctacgacgctgatcagcagaggatcaaattcatcaacatgaatgggctcatggctgatccaatgaaggtctacaaggacaggcaggtgatgaatatgtggtcagagcaggaaaaagagacttttagagagaagttcatgcagcacccaaaaaacttcggtctgattgcaagcttcttggaacgcaagacagtggctgaatgtgttctctattattacctcaccaaaaaaaatgagaattataagtccctggtccgtagatcttaccgacggcggggcaagtcgcagcagcagcagcagcagcagcagcagcagcaacaacaacagcagcagcagccaatgccacgatcttcccaggaagaaaaagacgagaaggaaaaggaaaaagaggctgaaaaagaggaggagaagcctgaagttgagaatgacaaagaggatctgttgaaggagaagaccgatgataccagcggggaggataatgatgagaaggaagctgtggccagcaagggcaggaagaccgctaattctcaggggcggaggaagggcagaatcaccagatcgatggcaaatgaagcaaatagcgaggaagccataactccacagcaaagtgcagagctcgcatcaatggagctcaatgaatcttcaagatggacggaagaagaaatggaaacagcaaaaaaggggctgttagagcatgggcggaattggagcgcaatcgcccggatggttgggtccaagacagtctcgcaatgcaaaaacttctacttcaactacaaaaagcgccagaacctggatgagatcctgcagcagcacaagcttaagatggagaaagagcgcaacgcccgacgtaagaagaagaaggcccccgccgccgcgtctgaagaggcagcctttccaccagtggtggaggatgaagagatggaagccagtggagtgagtgggaatgaagaagagatggtggaggaggctgaagcgttacatgcgagcggcaatgaggtcccccggggtgagtgttcaggcccagctactgtgaataacagcagcgacaccgaaagcataccaagcccacacaccgaggccgctaaagacacaggtcagaatgggcccaagcctccagccacccttggggccgacgggcccccacctggccctccaacaccgccacccgaggatatccctgcccctactgaaccaaccccagcaagcgaggctaccggggccccaaccccccctcccgctcccccatcgccttctgcccccccgccggttgtccctaaggaagagaaggaagaggagaccgcagctgcgccgccagttgaagagggcgaagaacaaaagccacctgccgcagaggagctggcggtcgatactgggaaagcggaagagccggtgaagtccgagtgcacggaagaagccgaggaaggtccggcgaaaggcaaggatgccgaagcagccgaggccaccgctgaaggcgctcttaaggccgagaagaaagaggggggctctggaagggccacaactgcaaagagcagcggggcacctcaggattccgacagctcagccacctgttccgctgatgaagtggacgaagctgaaggcggcgacaagaataggttactgtcacctcggccctcgttgcttactccgacgggggacccaagggctaacgcctccccacagaaaccactggatcttaagcagcttaagcagcgtgccgccgccatcccccccatagttaccaaagtgcacgaaccacctcgagaagacgcagctccaacaaaacccgcacctcctgcacctccgcctccacagaatctgcagccggaatctgacgctcctcagcagccagggtcctccccaaggggtaagagtcggagccccgccccacctgcagataaagaggccgaaaagcctgtttttttcccagctttcgcagctgaggctcagaagctacctggcgaccccccttgctggacatctggcctcccatttccagtcccccccagggaggtcattaaggcttccccccacgcaccggatccaagtgcttttagttacgcacctcctgggcatcccttgcctctcggcctgcatgatacagcccggcccgtcttgccccgtccgcccaccatttcaaaccctcctcctttgatctcgtcagcgaagcacccttccgtcttggaacgccagatcggagccatctctcaaggcatgtccgtacagcttcacgtgccttatagcgagcacgcaaaggctccagttgggccagtgacgatgggactccccctacccatggacccaaagaaattggccccatttagcggcgtcaagcaggaacagctttctccgaggggccaagcaggtccacccgagtccttgggggtgcctactgcccaggaggcttcagtcctccggggcacggctttggggagcgtccctggcggaagtattaccaaagggataccatcaactagggtcccaagcgactcggccataacatatcgaggaagcatcacccatggcactcccgcagacgtgctgtacaagggaaccatcactcgcattattggtgaggactcacctagccgtctggaccgcggcagagaagattctctgcccaagggtcatgttatctacgaaggaaaaaaaggccacgtgctttcctacgaggggggcatgtctgtgacacagtgttccaaggaagacggacggagcagctctggaccccctcacgaaacggctgcgcctaaaagaacctacgacatgatggagggtagagtgggaagggcaatatcctcagcttccatcgagggcctgatgggccgcgcaattccccctgagaggcactccccgcatcatctgaaagagcagcaccatattcgtggtagcataacccagggcattccccggagctacgtggaggcccaggaagactacttgaggcgggaggcaaaactcttaaagagagaaggcacacccccacctcctcccccctccagggatctcaccgaagcgtacaaaacacaggcgctggggcccctgaaactgaagcctgcccatgaggggctggttgccacagtcaaagaagcaggacgctctatccatgagatcccaagagaggaactgagacatacacctgagctgccgttggcgccgcggccactcaaagaaggctccatcacccagggaacgcctttgaagtacgatacaggagcctccactactggttctaagaaacatgacgttaggagtctcatcggctcacccggaagaacctttccgcctgtgcaccccttggatgtgatggcagacgccagagctttagagcgggcttgctatgaggagtccctgaagtcaagaccaggcaccgctagctcttccggaggctccatcgcccggggtgcacccgtgatcgttcccgagctgggtaagccacggcagagtccactgacttacgaggatcacggtgccccttttgctgggcatctgccccgcgggagtcccgtgacgaccagggaaccaactcctagattacaggaaggatcgctctcatcttctaaggcttcacaggataggaaacttacatccacacccagagagatcgcgaagagcccgcattcgacagtgcccgagcatcatccacaccccatctctccttacgaacacttgttgcgcggagtgagcggcgtggacctctacagaagccacataccactggcatttgatcccacatcaattccgaggggcatccccttggacgctgctgctgcttattacctcccccgccatctggcaccaaatcctacgtatccacatctatacccaccctacctgatccgagggtacccagatacagctgccctcgagaacagacagactattattaatgattacataacttctcagcagatgcatcacaatgccgcaactgccatggcccagcgagccgatatgcttcgcggactgtctcccagggagagcagcctcgctctcaattatgcggctgggcccaggggaataatcgacctgagtcaagtccctcatctgcctgtcctggtgccacctacgcctggaacccctgcaactgccatggaccggcttgcctatttacccaccgcaccgcagcctttttctagtaggcacagcagcagtccactctccccaggcggtccgactcacctcacgaagccaacaactacgagtagttccgagcgggagagagaccgagaccgggagagggaccgagacagggaacgcgaaaaaagcattcttaccagcacaactacggtcgaacacgctcccatatggcgaccagggaccgaacaatcaagcggatcgtcagggggcggcggtgggtcatctagccggccagccagccatagtcacgcacatcagcactcccctatatcccctcgcacccaggacgcactgcagcagcgtccatcagtcttacataatacaggaatgaaaggaattatcactgccgtagagcctagtacaccaaccgtccttagaagcacaagcacatcctcccctgtcaggccagcagcaacttttccgccagcgacccactgtcctttaggtgggacgctggatggggtctatcctactttgatggaacctgtgttgctccccaaggaagcccctagagtcgctaggccagagcgccctcgcgccgacaccggtcatgccttcctcgccaagcctccagcccggtccggcttagaaccagcttcctctccgtctaaggggagcgagccccgtcccctggtcccacccgtcagcgggcacgcgaccatcgcgcgaactccagccaagaacttagcaccccatcacgcctcgcccgatccacccgccccacctgcctccgcctcggatccacatcgcgaaaagacccaatccaaaccttttagtattcaagaactggaattacgcagtctcggctaccatgggtcctcttacagtccagagggcgtggagccagtaagccccgtatcctctccaagcctcacgcacgacaaggggttacccaagcacctagaggagctcgataagtcgcaccttgagggagaactgaggccaaagcaacccggaccagttaagctgggcggagaagccgcccaccttccccacctgcgcccactaccggaaagtcagcctagcagcagtcccctcttgcagacagccccaggtgtcaaggggcatcagagggtggtgaccttggcgcagcatatcagcgaggttattacccaggactacactcggcaccatccacagcagctgagcgcacctctcccagctccgttatacagcttcccaggagccagttgtcccgtattggatctgaggcgtcccccatcagacttatatttaccacccccagaccacggcgctccagcaaggggcagtcctcactccgagggtggaaagcggtccccagagcctaacaaaacttcggtgttgggtggaggggaggacggtatagaaccagttagcccgccagagggcatgactgagcccggccactcccgcagcgctgtgtacccactattatacagggatggtgagcagacagaaccgagccggatggggtccaagtcccccggaaacacctctcaacccccggcttttttctctaagcttaccgagagcaactcggctatggtgaagtcaaaaaagcaagaaatcaacaagaagctgaacacccataatagaaacgaacctgaatacaatatttcccagccggggaccgagatcttcaatatgcccgccatcacggggactggacttatgacctacaggagccaggctgtccaggagcacgcctctacaaacatgggtctggaggccattattcgaaaagcactgatgggaaagtacgaccagtgggaggaaagcccacctttgagcgccaatgctttcaatcctctaaatgcctccgctagcctacccgcagctatgccaattacagccgccgatggtcggtctgatcatacactcacaagccccggtggcgggggcaaagctaaagtcagcgggagaccatccagccgcaaagccaagtcacccgctccggggctggcttcaggagaccgtccgcccagcgtctctagtgtgcactcagagggagactgtaatcgccggacccccctgacgaatagagtgtgggaggatcgcccttcaagcgcaggatcaaccccgttcccctacaatccactgatcatgcggttacaggcaggagtgatggcctctccccctccccccggtcttcctgcagggagtggccctttggcaggcccacaccatgcctgggacgaggaacccaaacccctcctttgtagccagtacgaaaccctgagcgatagtgaatag

SEQ ID NO: 82294 - DNA, 6228 bp, Artificial Sequence
  derived and/or modified sequence
atgtggagcgagcaggagaaggagaccttccgggagaagttcatgcagcatcctaaaaacttcggcctaatagcgtcgttcctggagcggaaaaccgtcgcagagtgcgtgctgtattactacctaaccaaaaagaatgagaattacaaatcattggttagaagatcctatcgtcgtagaggcaagtcacagcagcagcaacaacagcagcaacaacagcagcagcagcagcagcaacagcccatgccaaggtcttctcaagaagagaaagatgagaaggagaaggagaaagaggcagaaaaggaagaggaaaagcccgaggtggagaacgacaaagaagatctgttgaaagaaaagacggacgatacatctggagaagacaatgatgaaaaagaagctgtcgcgtccaagggcaggaagaccgcgaactcccagggccgacgcaagggtaggatcaccaggagcatggctaacgaggctaatagcgaagaagcgattaccccccagcagagcgccgagctggctagtatggaactcaatgagtcctctcggtggactgaagaggagatggagacagcaaagaagggactgctggaacacggccgcaattggagtgccattgcacggatggtggggagcaagaccgtgtcccagtgtaagaacttttactttaactacaagaaacgccagaacctcgacgaaattctgcagcaacataagctcaaaatggaaaaagagcgaaacgctagacgtaagaaaaaaaaggcgcccgctgctgccagcgaggaggccgctttccctcctgtagttgaggacgaagaaatggaggcctctggcgtgtctggtaacgaagaagagatggttgaggaggccgaagctaccgtgaacaacagtagcgacaccgaaagcattccatcccctcacaccgaagccgcaaaggatacagggcagaacgggcctaaacctcctgctaccctcggtgctgatgggccacctcctggtccccctacccccccacctgaggatatcccagcacccacagaaccgaccccagcctccgaggctacaggggctcccactcccccccccgcacccccatctccgtcagctcctccccctgtcgtcccaaaggaggaaaaggaggaggaaacagcagccgctccaccagtggaagaaggggaagaacaaaagccaccagccgccgaagagcttgcggtggatactggtaaagctgaggagcctgtgaagtcagagtgcactgaagaggcggaagagggaccagcaaaaggtaaagacgctgaggccgctgaggcaacagctgaaggcgccctcaaggccgaaaagaaagagggaggaagcggaagggcaacaacggcaaagtcttctggtgccccccaggactccgactccagtgcgacctgttccgccgatgaggttgacgaggcagaaggcggtgacaagaaccgactgctgagcccacgcccatctctgctcacacccacgggagaccccagggccaacgcaagcccacaaaagcctttagaccttaaacagctcaaacagagggcggccgcaatcccccctatccaggtcactaaggtgcacgagcctccaagagaggacgctgcgccaactaagcctgccccacctgcccctccaccccctcaaaacttgcaacctgaatctgacgctccccagcagccaggatccagcccccgcggaaagtctcggtcccccgcccctcctgccgacaaagaagcagagaagccagtgttttttccagccttcgccgccgaagcgcaaaagctcccaggggaccctccatgttggacatcaggcttgccctttccagttccgccacgagaagtaatcaaggcttcacctcatgccccggaccccagcgctttttcctatgcgccccctgggcacccactgcccctgggcctccacgatactgcaagaccagtgcttccccgcccccctaccatcagtaaccctccacctctcatcagctccgcaaagcatccaagcgtgctggaaagacagataggggcaatatcccagggcatgagcgtgcaacttcatgtgccctatagtgagcatgccaaagcccccgtggggccagtgacaatggggttgcccctgcctatggaccctaaaaagctggcaccattttccggcgtgaagcaggaacaactgtcaccacggggacaggctggaccccccgagtctctcggggtgcccaccgcccaagaggctagcgtgctgcgcggtactgcactgggaagtgtgccaggaggatctatcaccaaaggcataccatctaccagggtgccatcggattccgccataacctaccgaggaagcatcacccacgggacacctgcagatgtgctatataaaggtacgataacccgaataattggcgaggacagtccttcacggctggatcggggaagggaggactctctgccaaaaggccatgttatatatgaagggaaaaagggtcatgtgctctcatacgaaggtgggatgtccgtcactcaatgttcgaaagaagacggacgtagtagcagcggaccccctcatgagaccgctgcccctaaacgtacttatgatatgatggaaggccgagtgggaagagccatcagctccgccagcatcgaggggttgatggggcgcgcaatccccccggagcgacatagtccacaccatttaaaggagcagcaccatataagaggctccatcacccaggggatccccagatcatatgtcgaggctcaggaagactaccttaggagggaggcaaagcttctcaagagagagggcactccgcctccgcctcccccttctcgggacctaacagaagcctataagactcaagctctgggccccctcaaactgaagccagcacatgagggcctagtcgccaccgtgaaagaggcagggaggtccatccatgaaatccctcgagaagagctgaggcatacgcccgagctcccactagcaccaagaccactgaaagagggaagcattacacagggaaccccattgaaatacgataccggcgctagtacaaccggatccaaaaagcatgatgtccgatcccttattggtagtcctggcagaacgtttccacccgtccatcccctcgacgtgatggctgatgcgcgagctcttgagagggcctgttatgaggagtctcttaagtcacggcctgggacggcctcctcctccggaggctctatcgctcgcggagctccagttatcgtgcctgagctagggaaaccacgtcagagtcccctgacatatgaagatcacggggctccatttgccgggcatctgccaagaggctcccccgtgactactagagaacccaccccccgcctacaagaggggagcctgtcctcttccaaagccagccaggacaggaagcttactagtactccccgggaaatcgcaaagtctccgcacagtacggttccggaacaccatcctcacccaatatctccatacgaacaccttcttagaggggtatcgggcgttgacctctacagatcacacatcccgttggcctttgacccaacttcaattcctcgtggaataccactggatgccgcagccgcctattacttacctcgccacctcgctccgaaccctacttaccctcacctatacccaccatatttaatcaggggctacccggatactgccgccctggagaaccgacagactattatcaacgattacattacgtcccagcaaatgcatcataatgctgctaccgccatggctcagagggccgatatgctccggggactctctccaagggaatcttctctggccctcaactacgccgcaggcccccgcggcattatagatctgtcacaggtcccacatctccctgtgctagttccccccacgcccggaaccccggctacggccatggacaggctcgcgtatctgcccacagcgccacagccgttcagcagcaggcacagctcgagtccactctcaccaggaggtccaacccacctgactaagcctacgactacctcttcttcagaaagggagcgcgaccgcgaccgggagagagaccgggaccgggagagagagaagtccatattgacatcaactactacagtggaacacgccccaatttggcggccgggcactgagcaaagtagcggatcgagcggcggcgggggagggtctagttccaggcctgcttcccacagccacgcccatcagcacagtccgatctcgccccgaacacaagacgccctgcagcaaagaccatccgtgctgcacaatactggaatgaagggcatcatcacagcggtggagccgtccactccaactgtactccgctctacatcaaccagctcccctgtacggccagcagcgacctttccccctgccacacactgtcctctaggcggcactctggatggtgtgtaccccacattgatggaaccagtcttgttacctaaggaagcccctagggtggcccgcccggagcgcccacgggctgacactggccacgccttcttagcaaagccccctgcacgatccggattggagccagctagttctcccagtaagggtagcgaacccaggcccctcgtgcctccagtttcaggccatgcgactattgcgagaactcctgcgaagaatctagcaccgcaccacgcttcaccagaccccccagcgccacctgcaagcgcctcagatccacatcgtgagaaaacacagagcaagcccttctctatccaagaactagaactgcgaagtcttggatatcatggatcctcatatagcccagagggggtggaaccggtcagcccagtctcgagtccttctctgactcatgacaagggtctgcccaaacatctggaggaactcgataagagccacctggaaggcgagctcaggcccaaacagcctggcccagtgaaactaggtggtgaggccgctcaccttcctcatttgagacctctgccagagagtcagccctctagtagccccctgctgcaaactgcccccggggtgaagggacatcagcgcgtcgtcacactcgcacagcacattagcgaagtaattactcaggactatactaggcaccatccgcaacagcttagtgcgccgcttcccgccccactgtattcgtttcccggagcctcttgccctgtcctggatttacggaggcccccctctgacttatatctgccaccacctgaccacggtgcacctgcgagaggttccccacattccgaaggcggaaaacgctctccggagcctaacaagacatcggtgctcggcgggggggaagatggtatcgaaccagtgagcccacccgagggaatgactgagccaggccactcaagaagcgctgtctatccgcttctttatagagacggggagcagaccgagcccagcaggatgggaagcaagagtccaggcaacaccagccagccgcccgctttcttctccaaactcactgaaagtaactctgcaatggtcaaaagcaagaaacaggagattaacaaaaaactgaacacacataataggaatgagccggagtacaatatttctcagcctggcacagaaatcttcaacatgcccgccatcactggaacaggtcttatgacatataggagtcaggcggtgcaggagcacgcctcgaccaatatgggtctcgaagccataatcagaaaagctcttatgggaaagtacgaccagtgggaggagagtccacctttgtctgccaatgcttttaacccattaaacgcatcagcctcccttcccgcggccatgcctatcacggctgccgatggacggagtgatcatactctgacctcgcctggcgggggtggaaaagctaaggtctctgggaggcccagttcaagaaaagctaaaagtcccgctcccgggctggcgtctggagatcggccaccctccgtgtctagtgtgcattccgaaggggattgcaatagacggacgcctctgaccaatagagtgtgggaggaccggcctagtagtgccggttctaccccctttccatataatcccttaataatgcgactacaagcaggcgtcatggccagccctcctccccccgggcttcctgccgggagcgggccgctggctgggccacatcacgcttgggacgaagagcccaagcctctgttgtgtagccagtatgagacactgtccgacagcgaatag

SEQ ID NO: 82295 - DNA, 7515 bp, Artificial Sequence
  derived and/or modified sequence
atgagcggcagcacccagcccgtggcccagacctggcgggccaccgagccgagatatcccccacacagtctctcataccccgtccagatagcgaggacccatactgatgtggggctccttgagtaccaacaccacagtcgcgactatgctagtcatttatccccagggagtattatacagcctcagaggagacgtcccagccttctgagcgagtttcaaccaggcaacgaacggagccaggaattgcatcttagaccggaatcccactcctacctccctgagcttggtaaaagtgagatggagtttattgagagcaagaggcccagacttgaacttttgccagatccactgttgcgtccatcccccttattggccaccggccagcccgccggcagtgaggatctgacaaaggatcggagcctgacaggaaagctcgagcccgtgagtcctccctccccgccccacactgacccggagctcgaactcgttcctcctcgcctttcgaaagaggagcttatccaaaacatggatcgcgtagacagggagattaccatggtggagcagcagatcagcaagctgaagaagaaacagcaacagctcgaagaggaagccgctaaaccccctgaacccgagaaaccagtcagcccccctcccattgagtccaagcaccggtccctggtgcagattatctacgatgaaaacagaaaaaaggcagaggcggcacataggatcctggagggcctgggaccccaggtggagctgccattatacaaccagccaagcgacacccgacaataccatgagaatatcaaaatcaatcaagcaatgcgaaaaaagctcatcctctatttcaaaaggcgcaatcatgcgcgcaaacagtgggagcagaagttttgccagagatacgaccagcttatggaggcgtgggagaagaaagtagagcgaatcgaaaacaaccccagacgtagggccaaagagagcaaggtccgggaatactacgagaagcagttccctgaaattcgtaagcagagagaactccaggaacggatgcagcgagtcggccagcggggatccgggttgagtatgagtgccgccaggtcggagcacgaagtttccgagatcattgatggtctgagtgaacaggagaatcttgagaaacagatgaggcaattagcggtgatcccacccatgctatatgacgcggaccagcagcgaataaaattcattaacatgaacgggctgatggctgatcccatgaaggtctataaggacagacaggtcatgaacatgtggagtgagcaagaaaaggagacattccgcgagaagttcatgcagcaccctaaaaatttcggactgatcgcatcctttctggaacgtaagacagtggcggaatgcgttctatattattatctaaccaaaaagaacgagaactacaagagcttagtaaggcgatcctatagaaggcgaggaaagagccagcagcaacagcagcaacagcagcagcagcagcagcaacagcagcagcagcccatgcctagatctagccaggaggagaaagacgagaaggagaaagagaaagaggccgagaaggaagaggagaagcctgaagtcgaaaatgataaagaggacctacttaaggagaaaacagatgacaccagcggggaagacaatgatgaaaaagaggctgttgcaagtaagggaaggaagaccgcaaactctcaggggaggagaaagggcaggattacccgatccatggctaatgaggcaaacagcgaggaagccattacacctcagcagtctgcagagctggcctccatggaactgaatgagtcaagtaggtggaccgaagaggaaatggagaccgccaaaaaggggcttctggagcacggcaggaattggagcgccatcgcacggatggttgggtcaaagacagtttcccaatgcaagaacttttattttaattacaaaaagcgccaaaaccttgacgagatcctgcaacagcacaagctcaagatggagaaagagcggaatgcacggcgcaaaaaaaagaaagcccctgccgccgcctcagaagaggcagcgttcccccccgtcgtggaagatgaggaaatggaggcatctggagtctcaggtaatgaagaggagatggtggaagaagctgaagctacggtgaacaactcctccgacactgaatcaatccccagccctcacaccgaggcagcaaaagacaccgggcaaaatgggccgaaaccgcccgcaacattgggcgccgacgggcctccccctggaccacctacaccgccacctgaggatattccagctcccactgagcccactcccgcatcagaggccacaggggctcccaccccaccccccgccccaccatccccatctgcccctcctcccgtggttcccaaagaggagaaagaagaggaaacagctgccgcacctccggtggaggaaggcgaagaacagaagcccccggccgccgaggagctagccgtggataccggcaaagccgaagagcccgttaagtcagagtgcacagaggaggcagaagaaggaccggccaaaggaaaggacgcggaggctgccgaagccacggccgaaggcgccttgaaagcagaaaagaaggaaggcgggtccggccgggcaactactgcaaagtccagtggtgccccgcaagactcagacagctcagctacatgctctgccgacgaagtggacgaggccgagggcggcgacaagaacaggcttctgagcccacggccttcgctgctgactcccaccggcgacccaagagccaatgcgagcccacagaagcccctggatttaaaacagttaaaacagagggccgctgctataccccccatacaggtgactaaagtgcatgaacctccccgcgaagacgctgctcctaccaaacccgctcccccagcaccccctccaccccagaatctgcagcctgagtccgatgctccccagcagcccgggtcaagcccaaggggcaagagccgatcccctgcaccacccgcagataaagaggccgagaaacccgtattctttcccgctttcgccgctgaagcacaaaagctgccaggcgatccaccctgctggaccagtggcctgccatttccagtgcccccacgtgaggtaatcaaagcatctccccacgctcccgacccatctgcattctcatacgcccctcctggacatccgctacctctcggcctgcacgatacagctcgaccagtattaccccggccccctacaatctctaacccccctcccctcattagctccgcaaagcatccatccgtgttggagcggcagatcggagcaatctcacagggtatgagcgtgcaattgcatgtcccttattcagagcacgctaaggcgccggttgggccggtcacaatgggacttcccctgccaatggatccaaagaaattagctcccttctcaggcgtcaaacaggagcagctgtccccacgcggccaagctgggcccccagagagcctgggcgtgcctaccgctcaagaagcgtcagtgctgagggggactgctcttggcagtgtgccggggggcagtatcaccaagggaattccatccactagagtgccttctgattccgctatcacctaccggggatcgatcacacacggaacaccagctgacgtgctctataaaggcactatcacccgcatcataggggaagacagtcccagccgactcgacaggggcagagaggactccctacccaaagggcatgtaatctatgagggcaaaaagggacatgtactgagttacgagggtggcatgagtgtgacccagtgctcaaaggaggacgggagatcaagctccgggcctccgcatgagaccgctgcccctaagcggacctacgacatgatggagggccgggtgggtcgagctatttcgagcgcgagcatagaaggactgatgggtcgcgcaatcccccccgaacggcacagtccccatcacctcaaagaacagcaccacatacggggctccattacccaaggaattccaagaagttacgttgaagctcaagaggactacttacgccgtgaggcgaaactgttgaagcgcgaaggaacccctccccctcccccacccagtagggacctgaccgaggcttataagacacaagccctgggaccactgaaactgaaacccgcccatgaaggacttgtcgcaactgttaaggaagctgggaggagcattcacgagatccccagagaagagctgcggcatacccccgaactacctcttgcccccagacctctgaaggagggcagcataacacaagggactcctctcaagtacgatacgggggcgtctacaaccggtagcaaaaagcatgacgtgcggtccttaatcggtagccctgggcgcacgttcccccccgtgcatcctttggacgttatggcagacgctagagcactggagagagcgtgctatgaggaatcgttgaagtcaaggcccggcactgcctcaagcagtggaggatcaattgctaggggagctcctgtgatcgtgccagagcttggcaagcccagacaatcacctttaacttacgaggatcacggcgcaccttttgccggtcatctgccccgaggctcaccagtgaccacgcgcgagccaactccgaggctccaagagggttctcttagctctagcaaggcctcacaggaccgcaagctaacatctacccctagggagatcgccaagtccccccactcgaccgttccggaacatcatccacacccaataagcccatatgagcatctgttacgcggcgtgtcgggggtcgatttatacagatcccacatcccccttgccttcgatcccacctccatccctcgggggattccactagacgctgccgcagcatattatcttcctagacatctggcaccaaaccctacatacccccatctctacccaccctatctaatccgggggtacccagacaccgctgctctggagaatcgccaaactattatcaacgactatattacctcccagcagatgcatcataacgccgctactgccatggcacaaagagctgacatgttgcgaggattgagccccagagagagctccctggccttgaactacgccgcgggccctcgcggcattatcgacctgtctcaggtgccacacctgccggtgctggtccctcctacgccaggaactcccgccacagctatggacaggctcgcttacctgcctaccgcgcctcagcccttttcgagccggcattctagtagtccccttagtcccggcggacccacacacctcaccaaacccacaactactagctcaagcgagcgtgaacgcgatcgggatagagagagggacagagatagggagcgcgagaaatcaattctgacatcaaccactaccgttgaacatgctcctatctggcgcccgggcaccgaacagtcatctggttctagcggggggggtgggggctccagctcccgaccggcttcccatagccatgcccatcaacacagccccatctccccccggacacaggatgccctgcaacagcgcccatctgtcctgcataacaccgggatgaagggcatcatcaccgccgttgaaccttccactcccaccgtcctgagatctacttcaacaagcagtcctgtaagaccagctgctactttccctcccgccacccattgtcctctgggagggaccctcgatggagtttatcctaccctaatggaacctgtgctgctccctaaggaggctcccagggtcgcaaggccagagcggccacgcgcagatactggccatgcctttttggcaaagcctcccgcgagatctgggttagaaccggcttccagtccttctaagggatccgaacctcgcccactagttccaccagtatctggccacgcaactattgctcggactccagctaaaaacctcgccccgcatcacgcttctcctgaccctcccgctccaccggccagcgcctcagatcctcaccgggagaagactcagtctaaaccattttccatccaggaacttgagctgcggtccctgggttatcatggaagctcctacagcccagagggggttgagcccgtctctcccgtgagctccccaagtctgacgcacgacaaggggctgccaaagcatctggaagagctggataagtcgcacctggagggggaattgcgacccaaacagcctggtcctgtgaaactagggggcgaagctgcacatttgccacatcttaggccgctccccgagtctcaaccatcctcttcccctctgctgcagaccgccccaggcgtgaagggacaccaaagagttgtgacactcgcgcagcatataagcgaagttattacccaggactataccagacaccacccacagcagctctcagctccattgcccgctccactgtactcctttcccggggctagttgccctgtcctagatctgagacgtcctcccagtgatctgtatttgcctcctccagaccatggggcacctgcgcgcggcagtccccactctgaaggagggaaaaggtctcccgaacccaataagacaagcgtgttgggagggggggaggacggcattgagcctgtctctccccccgaaggcatgacagagccaggacatagcaggagcgctgtgtacccccttttgtatcgtgacggtgagcaaactgagcccagtaggatgggaagcaaatcccccggcaatacttctcaaccccccgcatttttcagtaagctgaccgaaagtaatagcgccatggtgaaaagcaaaaagcaggagattaataagaagctaaatacccacaacaggaacgaacctgagtataatatctcacagcctggtactgagattttcaacatgcctgctataacaggtacgggactgatgacatatagatctcaagctgttcaggaacatgccagcactaacatgggcctcgaagccatcattagaaaggcacttatggggaaatacgaccagtgggaagagagccctcccctgtccgcaaatgctttcaaccccctaaatgccagcgccagcctacccgctgctatgccaattactgccgcagatggccggtccgaccatactctgaccagccctggagggggtggcaaggcaaaggttagcggtcggccatcttcaaggaaggcgaagtcccccgctcccggcctagcgtccggcgatcgacctccctcggtgtccagcgtacactccgagggcgattgcaaccggcggactcctctgactaacagagtttgggaggatcgtccatcttccgctggatcaacgcccttcccctacaatcctctaatcatgcgactgcaagctggtgtcatggcctcgcctcccccacccggtctgcccgctgggagcggtcctctggcaggcccgcatcatgcctgggatgaggagccgaaacctttgctgtgttcacagtacgagactcttagcgactccgagtag

SEQ ID NO: 82296 - DNA, 1821 bp, Artificial Sequence
  derived and/or modified sequence
ctgcagagcggcgccacccactgccccctgggcggcaccctggacggagtctatcccacactcatggaacccgtactactgccaaaggaagccccgagggtggccaggcctgagcgccctcgggccgacaccggccacgcttttctggccaaaccacccgcacgttccggccttgaacccgctagcagccctagcaaaggaagcgaacctcggccacttgtgccccctgtttctggacacgcgacgatagctaggactcctgccaagaatctggctcctcatcatgcatcacccgatccacctgccccaccggctagcgccagcgatccacaccgagagaagacacaatccaagcccttcagcattcaggagctggagcttcggagcctcggctaccacgggtcaagctactcccccgagggggtggaacccgtatcaccagtcagcagcccctcccttactcacgacaaagggctgccaaagcatctagaggagcttgacaaaagtcacctggagggtgagctcagacccaaacagccaggaccagttaagcttggcggggaggccgcgcacctcccacatttgcggcccctgcccgagtctcagccatcaagcagccctttgctgcagacagctccgggcgtgaaaggtcaccaacgggtggtaacacttgctcaacatattagcgaggttattacccaagattacactcggcatcatcctcagcaactgtccgcacctttacccgctcccctttactcttttcctggagccagttgtcccgtcctggacttgcgccgccccccgtccgacctgtaccttcctcctccggatcacggtgctcccgctcggggtagtccacactctgagggcggcaaaagatctcccgagcctaataaaacatctgttcttggcggtggggaagatgggatcgagcctgtgtcccctcctgaaggcatgactgaacctggccactccaggtcagctgtgtacccccttttgtaccgggacggagagcagacagaaccctctagaatggggtccaagtctccaggcaacaccagccagccacccgcctttttctcaaaattgaccgagagcaactcagccatggtgaaaagtaagaagcaggaaatcaataagaagctgaatacccataacagaaatgagcccgagtataacatcagccagcctggcaccgagattttcaatatgcctgccatcacggggacaggacttatgacgtacaggagccaggctgtccaagaacacgcgagtacgaatatgggtctcgaagcgatcatacgaaaggccctgatgggcaagtacgatcagtgggaggaaagtccccccctgtctgccaatgcctttaaccccttaaatgccagcgcatctctgcctgcagccatgcccatcacagccgctgacgggagatccgatcacacactgacttctcctggaggaggcgggaaggcaaaagtgtcaggaaggccctccagccgaaaggctaagtcaccggctccaggacttgcaagtggggaccgccctccatcagtgagctctgtacactccgagggcgactgtaataggaggactccattaacaaatcgggtatgggaggacaggcctagttcagctggcagcaccccgttcccttataatccccttatcatgaggctgcaagctggagtcatggcatccccaccaccccctggtctgcctgcaggatcaggacccctggccggaccccaccatgcatgggatgaagaaccaaaacccctgctgtgttctcagtatgagacactatcagacagcgagtag

SEQ ID NO: 82297 - DNA, 8708 bp, Artificial Sequence
  derived and/or modified sequence
gagtctttgaggacacagcctcgctggaggcagtttctggtgccagtgacggggtggcccgtgagctgatgacgaggactggcttttaatccttggtggtgattaagagaaagcttattggggcctgggagcagctccccgccgacccccaccaccatgtcgggatccacacagcctgtggcacagacgtggagggccactgagccccgctacccgccccacagcctttcctacccagtgcagatcgcccggacgcacacggacgtcgggctcctggagtaccagcaccactcccgcgactatgcctcccacctgtcgcccggctccatcatccagccccagcggcggaggccctccctgctgtctgagttccagcccgggaatgaacggtcccaggagctccacctgcggccagagtcccactcatacctgcccgagctggggaagtcagagatggagttcattgaaagcaagcgccctcggctagagctgctgcctgaccccctgctgcgaccgtcacccctgctggccacgggccagcctgcgggatctgaagacctcaccaaggaccgtagcctgacgggcaagctggaaccggtgtctccccccagccccccgcacactgaccctgagctggagctggtgccgccacggctgtccaaggaggagctgatccagaacatggaccgcgtggaccgagagatcaccatggtagagcagcagatctctaagctgaagaagaagcagcaacagctggaggaggaggctgccaagccgcccgagcctgagaagcccgtgtcaccgccgcccatcgagtcgaagcaccgcagcctggtgcagatcatctacgacgagaaccggaagaaggctgaagctgcacatcggattctggaaggcctggggccccaggtggagctgccgctgtacaaccagccctccgacacccggcagtatcatgagaacatcaaaataaaccaggcgatgcggaagaagctaatcttgtacttcaagaggaggaatcacgctcggaaacaatgggagcagaagttctgccagcgctatgaccagctcatggaggcctgggagaagaaggtggagcgcatcgagaacaacccccggcggcgggccaaggagagcaaggtgcgcgagtactacgagaagcagttccctgagatccgcaagcagcgcgagctgcaggagcgcatgcagagcagggtgggccagcggggcagtgggctgtccatgtcggccgcccgcagcgagcacgaggtgtcagagatcatcgatggcctctcagagcaggagaacctggagaagcagatgcgccagctggccgtgatcccgcccatgctgtacgacgctgaccagcagcgcatcaagttcatcaacatgaacgggcttatggccgaccccatgaaggtgtacaaagaccgccaggtcatgaacatgtggagtgagcaggagaaggagaccttccgggagaagttcatgcagcatcccaagaactttggcctgatcgcatcattcctggagaggaagacagtggctgagtgcgtcctctattactacctgactaagaagaatgagaactataagagcctggtgagacggagctatcggcgccgcggcaagagccagcagcagcaacaacagcagcagcagcagcagcagcagcagcagcagcagcccatgccccgcagcagccaggaggagaaagatgagaaggagaaggaaaaggaggcggagaaggaggaggagaagccggaggtggagaacgacaaggaagacctcctcaaggagaagacagacgacacctcaggggaggacaacgacgagaaggaggctgtggcctccaaaggccgcaaaactgccaacagccagggaagacgcaaaggccgcatcacccgctcaatggctaatgaggccaacagcgaggaggccatcaccccccagcagagcgccgagctggcctccatggagctgaatgagagttctcgctggacagaagaagaaatggaaacagccaagaaaggtctcctggaacacggccgcaactggtcggccatcgcccggatggtgggctccaagactgtgtcgcagtgtaagaacttctacttcaactacaagaagaggcagaacctcgatgagatcttgcagcagcacaagctgaagatggagaaggagaggaacgcgcggaggaagaagaagaaagcgccggcggcggccagcgaggaggctgcattcccgcccgtggtggaggatgaggagatggaggcgtcgggcgtgagcggaaatgaggaggagatggtggaggaggctgaagccttacatgcctctgggaatgaggtgcccagaggggaatgcagtggcccagccactgtcaacaacagctcagacaccgagagcatcccctctcctcacactgaggccgccaaggacacagggcagaatgggcccaagcccccagccaccctgggcgccgacgggccacccccagggccacccaccccaccaccggaggacatcccggcccccactgagcccaccccggcctctgaagccaccggagcccctacgcccccaccagcacccccatcgccctctgcacctcctcctgtggtccccaaggaggagaaggaggaggagaccgcagcagcgcccccagtggaggagggggaggagcagaagccccccgcggctgaggagctggcagtggacacagggaaggccgaggagcccgtcaagagcgagtgcacggaggaagccgaggaggggccggccaagggcaaggacgcggaggccgctgaggccacggccgagggggcgctcaaggcagagaagaaggagggcgggagcggcagggccaccacagccaagagctcgggcgccccccaggacagcgactccagtgctacctgcagtgcagacgaggtggatgaggccgagggcggcgacaagaaccggctgctgtccccaaggcccagcctcctcaccccgactggcgacccccgggccaatgcctcaccccagaagccactggacctgaagcagctgaagcagcgagcggctgccatcccccccatcgtcaccaaagtccatgagcccccccgggaggacgcagctcccaccaagccagctcccccagccccaccgccaccgcaaaacctgcagccggagagcgacgcccctcagcagcctggcagcagcccccggggcaagagcaggagcccggcaccccccgccgacaaggaggcagagaagcctgtgttcttcccagccttcgcagccgaggcccagaagctgcctggggaccccccttgctggacttccggcctgcccttccccgtgcccccccgtgaggtgatcaaggcctccccgcatgccccggacccctcagccttctcctacgctccacctggtcacccactgcccctgggcctccatgacactgcccggcccgtcctgccgcgcccacccaccatctccaacccgcctcccctcatctcctctgccaagcaccccagcgtcctcgagaggcaaataggtgccatctcccaaggaatgtcggtccagctccacgtcccgtactcagagcatgccaaggccccggtgggccctgtcaccatggggctgcccctgcccatggaccccaaaaagctggcacccttcagcggagtgaagcaggagcagctgtccccacggggccaggctgggccaccggagagcctgggggtgcccacagcccaggaggcgtccgtgctgagagggacagctctgggctcagttccgggcggaagcatcaccaaaggcattcccagcacacgggtgccctcggacagcgccatcacataccgcggctccatcacccacggcacgccagctgacgtcctgtacaagggcaccatcaccaggatcatcggcgaggacagcccgagtcgcttggaccgcggccgggaggacagcctgcccaagggccacgtcatctacgaaggcaagaagggccacgtcttgtcctatgagggtggcatgtctgtgacccagtgctccaaggaggacggcagaagcagctcaggacccccccatgagacggccgcccccaagcgcacctatgacatgatggagggccgcgtgggcagagccatctcctcagccagcatcgaaggtctcatgggccgtgccatcccgccggagcgacacagcccccaccacctcaaagagcagcaccacatccgcgggtccatcacacaagggatccctcggtcctacgtggaggcacaggaggactacctgcgtcgggaggccaagctcctaaagcgggagggcacgcctccgcccccaccgccctcacgggacctgaccgaggcctacaagacgcaggccctgggccccctgaagctgaagccggcccatgagggcctggtggccacggtgaaggaggcgggccgctccatccatgagatcccgcgcgaggagctgcggcacacgcccgagctgcccctggccccgcggccgctcaaggagggctccatcacgcagggcaccccgctcaagtacgacaccggcgcgtccaccactggctccaaaaagcacgacgtacgctccctcatcggcagccccggccggacgttcccacccgtgcacccgctggatgtgatggccgacgcccgggcactggaacgtgcctgctacgaggagagcctgaagagccggccagggaccgccagcagctcggggggctccattgcgcgcggcgccccggtcattgtgcctgagctgggtaagccgcggcagagccccctgacctatgaggaccacggggcaccctttgccggccacctcccacgaggttcgcccgtgaccacgcgggagcccacgccgcgcctgcaggagggcagcctttcgtccagcaaggcatcccaggaccgaaagctgacgtcgacgcctcgtgagatcgccaagtccccgcacagcaccgtgcccgagcaccacccacaccccatctcgccctatgagcacctgcttcggggcgtgagtggcgtggacctgtatcgcagccacatccccctggccttcgaccccacctccataccccgcggcatccctctggacgcagccgctgcctactacctgccccgacacctggcccccaaccccacctacccgcacctgtacccaccctacctcatccgcggctaccccgacacggcggcgctggagaaccggcagaccatcatcaatgactacatcacctcgcagcagatgcaccacaacgcggccaccgccatggcccagcgagctgatatgctgaggggcctctcgccccgcgagtcctcgctggcactcaactacgctgcgggtccccgaggcatcatcgacctgtcccaagtgccacacctgcctgtgctcgtgcccccgacaccaggcaccccagccaccgccatggaccgccttgcctacctccccaccgcgccccagcccttcagcagccgccacagcagctccccactctccccaggaggtccaacacacttgacaaaaccaaccaccacgtcctcgtccgagcgggagcgagaccgggatcgagagcgggaccgggatcgggagcgggaaaagtccatcctcacgtccaccacgacggtggagcacgcacccatctggagacctggtacagagcagagcagcggcagcagcggcgggggtgggggcagcagcagccgccccgcctcccactcccatgcccaccagcactcgcccatctcccctcggacccaggatgccctccagcagagacccagtgtgcttcacaacacaggcatgaagggtatcatcaccgctgtggagcccagcacgcccacggtcctgaggtccacctccacctcctcacccgttcgcccggctgccacattcccacctgccacccactgcccactgggcggcaccctcgatggggtctaccctaccctcatggagcccgtcttgctgcccaaggaggccccccgggtcgcccggccagagcggccccgagcagacaccggccatgccttcctcgccaagcccccagcccgctccgggctggagcccgcctcctcccccagcaagggctcggagccccggcccctagtgcctcctgtctctggccacgccaccatcgcccgcacccctgcgaagaacctcgcacctcaccacgccagcccggacccgccggcgccacctgcctcggcctcggacccgcaccgggaaaagactcaaagtaaacccttttccatccaggaactggaactccgttctctgggttaccacggcagcagctacagccccgaaggggtggagcccgtcagccctgtgagctcacccagtctgacccacgacaaggggctccccaagcacctggaagagctcgacaagagccacctggagggggagctgcggcccaagcagccaggccccgtgaagcttggcggggaggccgcccacctcccacacctgcggccgctgcctgagagccagccctcgtccagcccgctgctccagaccgccccaggggtcaaaggtcaccagcgggtggtcaccctggcccagcacatcagtgaggtcatcacacaggactacacccggcaccacccacagcagctcagcgcacccctgcccgcccccctctactccttccctggggccagctgccccgtcctggacctccgccgcccacccagtgacctctacctcccgcccccggaccatggtgccccggcccgtggctccccccacagcgaagggggcaagaggtctccagagccaaacaagacgtcggtcttgggtggtggtgaggacggtattgaacctgtgtccccaccggagggcatgacggagccagggcactcccggagtgctgtgtacccgctgctgtaccgggatggggaacagacggagcccagcaggatgggctccaagtctccaggcaacaccagccagccgccagccttcttcagcaagctgaccgagagcaactccgccatggtcaagtccaagaagcaagagatcaacaagaagctgaacacccacaaccggaatgagcctgaatacaatatcagccagcctgggacggagatcttcaatatgcccgccatcaccggaacaggccttatgacctatagaagccaggcggtgcaggaacatgccagcaccaacatggggctggaggccataattagaaaggcactcatgggtaaatatgaccagtgggaagagtccccgccgctcagcgccaatgcttttaaccctctgaatgccagtgccagcctgcccgctgctatgcccataaccgctgctgacggacggagtgaccacacactcacctcgccaggtggcggcgggaaggccaaggtctctggcagacccagcagccgaaaagccaagtccccggccccgggcctggcatctggggaccggccaccctctgtctcctcagtgcactcggagggagactgcaaccgccggacgccgctcaccaaccgcgtgtgggaggacaggccctcgtccgcaggttccacgccattcccctacaaccccctgatcatgcggctgcaggcgggtgtcatggcttccccacccccaccgggcctccccgcgggcagcgggcccctcgctggcccccaccacgcctgggacgaggagcccaagccactgctctgctcgcagtacgagacactctccgacagcgagtgactcagaacagggcgggggggggggcggtgtcaggtcccagcgagccacaggaacggccctgcaggagcagggcggctgccgactcccccaaccaaggaaggagcccctgagtccgcctgcgcctccatccatctgtccgtccagagccggcatccttgcctgtctaaagccttaactaagactcccgccccgggctggccctgtgcagaccttactcaggggatgtttacctggtgctcgggaagggaggggaaggggccggggagggggcacggcaggcgtgtggcagccacacgcaggcggccagggcggccagggacccaaagcaggatgaccacgcacctccacgccactgcctcccccgaatgcatttggaaccaaagtctaaactgagctcgcagcccccgcgccctccctccgcctcccatcccgcttagcgctctggacagatggacgcaggccctgtccagcccccagtgcgctcgttccggtccccacagactgccccagccaacgagattgctggaaaccaagtcaggccaggtgggcggacaaaagggccaggtgcggcctggggggaacggatgctccgaggactggactgtttttttcacacatcgttgccgcagcggtgggaaggaaaggcagatgtaaatgatgtgttggtttacagggtatatttttgataccttcaatgaattaattcagatgttttacgcaaggaaggacttacccagtattactgctgctgtgcttttgatctctgcttaccgttcaagaggcgtgtgcaggccgacagtcggtgaccccatcactcgcaggaccaagggggcggggactgctggctcacgccccgctgtgtcctccctccctcccttccttgggcagaatgaattcgatgcgtattctgtggccgccatctgcgcagggtggtggtattctgtcatttacacacgtcgttctaattaaaaagcgaattatactcc

SEQ ID NO: 82298 - DNA, 8660 bp, Artificial Sequence
  derived and/or modified sequence
gagtctttgaggacacagcctcgctggaggcagtttctggtgccagtgacggggtggcccgtgagctgatgacgaggactggcttttaatccttggtggtgattaagagaaagcttattggggcctgggagcagctccccgccgacccccaccaccatgtcgggatccacacagcctgtggcacagacgtggagggccactgagccccgctacccgccccacagcctttcctacccagtgcagatcgcccggacgcacacggacgtcgggctcctggagtaccagcaccactcccgcgactatgcctcccacctgtcgcccggctccatcatccagccccagcggcggaggccctccctgctgtctgagttccagcccgggaatgaacggtcccaggagctccacctgcggccagagtcccactcatacctgcccgagctggggaagtcagagatggagttcattgaaagcaagcgccctcggctagagctgctgcctgaccccctgctgcgaccgtcacccctgctggccacgggccagcctgcgggatctgaagacctcaccaaggaccgtagcctgacgggcaagctggaaccggtgtctccccccagccccccgcacactgaccctgagctggagctggtgccgccacggctgtccaaggaggagctgatccagaacatggaccgcgtggaccgagagatcaccatggtagagcagcagatctctaagctgaagaagaagcagcaacagctggaggaggaggctgccaagccgcccgagcctgagaagcccgtgtcaccgccgcccatcgagtcgaagcaccgcagcctggtgcagatcatctacgacgagaaccggaagaaggctgaagctgcacatcggattctggaaggcctggggccccaggtggagctgccgctgtacaaccagccctccgacacccggcagtatcatgagaacatcaaaataaaccaggcgatgcggaagaagctaatcttgtacttcaagaggaggaatcacgctcggaaacaatgggagcagaagttctgccagcgctatgaccagctcatggaggcctgggagaagaaggtggagcgcatcgagaacaacccccggcggcgggccaaggagagcaaggtgcgcgagtactacgagaagcagttccctgagatccgcaagcagcgcgagctgcaggagcgcatgcagagcagggtgggccagcggggcagtgggctgtccatgtcggccgcccgcagcgagcacgaggtgtcagagatcatcgatggcctctcagagcaggagaacctggagaagcagatgcgccagctggccgtgatcccgcccatgctgtacgacgctgaccagcagcgcatcaagttcatcaacatgaacgggcttatggccgaccccatgaaggtgtacaaagaccgccaggtcatgaacatgtggagtgagcaggagaaggagaccttccgggagaagttcatgcagcatcccaagaactttggcctgatcgcatcattcctggagaggaagacagtggctgagtgcgtcctctattactacctgactaagaagaatgagaactataagagcctggtgagacggagctatcggcgccgcggcaagagccagcagcagcaacaacagcagcagcagcagcagcagcagcagcagcagcagcccatgccccgcagcagccaggaggagaaagatgagaaggagaaggaaaaggaggcggagaaggaggaggagaagccggaggtggagaacgacaaggaagacctcctcaaggagaagacagacgacacctcaggggaggacaacgacgagaaggaggctgtggcctccaaaggccgcaaaactgccaacagccagggaagacgcaaaggccgcatcacccgctcaatggctaatgaggccaacagcgaggaggccatcaccccccagcagagcgccgagctggcctccatggagctgaatgagagttctcgctggacagaagaagaaatggaaacagccaagaaaggtctcctggaacacggccgcaactggtcggccatcgcccggatggtgggctccaagactgtgtcgcagtgtaagaacttctacttcaactacaagaagaggcagaacctcgatgagatcttgcagcagcacaagctgaagatggagaaggagaggaacgcgcggaggaagaagaagaaagcgccggcggcggccagcgaggaggctgcattcccgcccgtggtggaggatgaggagatggaggcgtcgggcgtgagcggaaatgaggaggagatggtggaggaggctgaagccactgtcaacaacagctcagacaccgagagcatcccctctcctcacactgaggccgccaaggacacagggcagaatgggcccaagcccccagccaccctgggcgccgacgggccacccccagggccacccaccccaccaccggaggacatcccggcccccactgagcccaccccggcctctgaagccaccggagcccctacgcccccaccagcacccccatcgccctctgcacctcctcctgtggtccccaaggaggagaaggaggaggagaccgcagcagcgcccccagtggaggagggggaggagcagaagccccccgcggctgaggagctggcagtggacacagggaaggccgaggagcccgtcaagagcgagtgcacggaggaagccgaggaggggccggccaagggcaaggacgcggaggccgctgaggccacggccgagggggcgctcaaggcagagaagaaggagggcgggagcggcagggccaccacagccaagagctcgggcgccccccaggacagcgactccagtgctacctgcagtgcagacgaggtggatgaggccgagggcggcgacaagaaccggctgctgtccccaaggcccagcctcctcaccccgactggcgacccccgggccaatgcctcaccccagaagccactggacctgaagcagctgaagcagcgagcggctgccatcccccccatccaggtcaccaaagtccatgagcccccccgggaggacgcagctcccaccaagccagctcccccagccccaccgccaccgcaaaacctgcagccggagagcgacgcccctcagcagcctggcagcagcccccggggcaagagcaggagcccggcaccccccgccgacaaggaggcagagaagcctgtgttcttcccagccttcgcagccgaggcccagaagctgcctggggaccccccttgctggacttccggcctgcccttccccgtgcccccccgtgaggtgatcaaggcctccccgcatgccccggacccctcagccttctcctacgctccacctggtcacccactgcccctgggcctccatgacactgcccggcccgtcctgccgcgcccacccaccatctccaacccgcctcccctcatctcctctgccaagcaccccagcgtcctcgagaggcaaataggtgccatctcccaaggaatgtcggtccagctccacgtcccgtactcagagcatgccaaggccccggtgggccctgtcaccatggggctgcccctgcccatggaccccaaaaagctggcacccttcagcggagtgaagcaggagcagctgtccccacggggccaggctgggccaccggagagcctgggggtgcccacagcccaggaggcgtccgtgctgagagggacagctctgggctcagttccgggcggaagcatcaccaaaggcattcccagcacacgggtgccctcggacagcgccatcacataccgcggctccatcacccacggcacgccagctgacgtcctgtacaagggcaccatcaccaggatcatcggcgaggacagcccgagtcgcttggaccgcggccgggaggacagcctgcccaagggccacgtcatctacgaaggcaagaagggccacgtcttgtcctatgagggtggcatgtctgtgacccagtgctccaaggaggacggcagaagcagctcaggacccccccatgagacggccgcccccaagcgcacctatgacatgatggagggccgcgtgggcagagccatctcctcagccagcatcgaaggtctcatgggccgtgccatcccgccggagcgacacagcccccaccacctcaaagagcagcaccacatccgcgggtccatcacacaagggatccctcggtcctacgtggaggcacaggaggactacctgcgtcgggaggccaagctcctaaagcgggagggcacgcctccgcccccaccgccctcacgggacctgaccgaggcctacaagacgcaggccctgggccccctgaagctgaagccggcccatgagggcctggtggccacggtgaaggaggcgggccgctccatccatgagatcccgcgcgaggagctgcggcacacgcccgagctgcccctggccccgcggccgctcaaggagggctccatcacgcagggcaccccgctcaagtacgacaccggcgcgtccaccactggctccaaaaagcacgacgtacgctccctcatcggcagccccggccggacgttcccacccgtgcacccgctggatgtgatggccgacgcccgggcactggaacgtgcctgctacgaggagagcctgaagagccggccagggaccgccagcagctcggggggctccattgcgcgcggcgccccggtcattgtgcctgagctgggtaagccgcggcagagccccctgacctatgaggaccacggggcaccctttgccggccacctcccacgaggttcgcccgtgaccacgcgggagcccacgccgcgcctgcaggagggcagcctttcgtccagcaaggcatcccaggaccgaaagctgacgtcgacgcctcgtgagatcgccaagtccccgcacagcaccgtgcccgagcaccacccacaccccatctcgccctatgagcacctgcttcggggcgtgagtggcgtggacctgtatcgcagccacatccccctggccttcgaccccacctccataccccgcggcatccctctggacgcagccgctgcctactacctgccccgacacctggcccccaaccccacctacccgcacctgtacccaccctacctcatccgcggctaccccgacacggcggcgctggagaaccggcagaccatcatcaatgactacatcacctcgcagcagatgcaccacaacgcggccaccgccatggcccagcgagctgatatgctgaggggcctctcgccccgcgagtcctcgctggcactcaactacgctgcgggtccccgaggcatcatcgacctgtcccaagtgccacacctgcctgtgctcgtgcccccgacaccaggcaccccagccaccgccatggaccgccttgcctacctccccaccgcgccccagcccttcagcagccgccacagcagctccccactctccccaggaggtccaacacacttgacaaaaccaaccaccacgtcctcgtccgagcgggagcgagaccgggatcgagagcgggaccgggatcgggagcgggaaaagtccatcctcacgtccaccacgacggtggagcacgcacccatctggagacctggtacagagcagagcagcggcagcagcggcgggggtgggggcagcagcagccgccccgcctcccactcccatgcccaccagcactcgcccatctcccctcggacccaggatgccctccagcagagacccagtgtgcttcacaacacaggcatgaagggtatcatcaccgctgtggagcccagcacgcccacggtcctgaggtccacctccacctcctcacccgttcgcccggctgccacattcccacctgccacccactgcccactgggcggcaccctcgatggggtctaccctaccctcatggagcccgtcttgctgcccaaggaggccccccgggtcgcccggccagagcggccccgagcagacaccggccatgccttcctcgccaagcccccagcccgctccgggctggagcccgcctcctcccccagcaagggctcggagccccggcccctagtgcctcctgtctctggccacgccaccatcgcccgcacccctgcgaagaacctcgcacctcaccacgccagcccggacccgccggcgccacctgcctcggcctcggacccgcaccgggaaaagactcaaagtaaacccttttccatccaggaactggaactccgttctctgggttaccacggcagcagctacagccccgaaggggtggagcccgtcagccctgtgagctcacccagtctgacccacgacaaggggctccccaagcacctggaagagctcgacaagagccacctggagggggagctgcggcccaagcagccaggccccgtgaagcttggcggggaggccgcccacctcccacacctgcggccgctgcctgagagccagccctcgtccagcccgctgctccagaccgccccaggggtcaaaggtcaccagcgggtggtcaccctggcccagcacatcagtgaggtcatcacacaggactacacccggcaccacccacagcagctcagcgcacccctgcccgcccccctctactccttccctggggccagctgccccgtcctggacctccgccgcccacccagtgacctctacctcccgcccccggaccatggtgccccggcccgtggctccccccacagcgaagggggcaagaggtctccagagccaaacaagacgtcggtcttgggtggtggtgaggacggtattgaacctgtgtccccaccggagggcatgacggagccagggcactcccggagtgctgtgtacccgctgctgtaccgggatggggaacagacggagcccagcaggatgggctccaagtctccaggcaacaccagccagccgccagccttcttcagcaagctgaccgagagcaactccgccatggtcaagtccaagaagcaagagatcaacaagaagctgaacacccacaaccggaatgagcctgaatacaatatcagccagcctgggacggagatcttcaatatgcccgccatcaccggaacaggccttatgacctatagaagccaggcggtgcaggaacatgccagcaccaacatggggctggaggccataattagaaaggcactcatgggtaaatatgaccagtgggaagagtccccgccgctcagcgccaatgcttttaaccctctgaatgccagtgccagcctgcccgctgctatgcccataaccgctgctgacggacggagtgaccacacactcacctcgccaggtggcggcgggaaggccaaggtctctggcagacccagcagccgaaaagccaagtccccggccccgggcctggcatctggggaccggccaccctctgtctcctcagtgcactcggagggagactgcaaccgccggacgccgctcaccaaccgcgtgtgggaggacaggccctcgtccgcaggttccacgccattcccctacaaccccctgatcatgcggctgcaggcgggtgtcatggcttccccacccccaccgggcctccccgcgggcagcgggcccctcgctggcccccaccacgcctgggacgaggagcccaagccactgctctgctcgcagtacgagacactctccgacagcgagtgactcagaacagggcgggggggggggcggtgtcaggtcccagcgagccacaggaacggccctgcaggagcagggcggctgccgactcccccaaccaaggaaggagcccctgagtccgcctgcgcctccatccatctgtccgtccagagccggcatccttgcctgtctaaagccttaactaagactcccgccccgggctggccctgtgcagaccttactcaggggatgtttacctggtgctcgggaagggaggggaaggggccggggagggggcacggcaggcgtgtggcagccacacgcaggcggccagggcggccagggacccaaagcaggatgaccacgcacctccacgccactgcctcccccgaatgcatttggaaccaaagtctaaactgagctcgcagcccccgcgccctccctccgcctcccatcccgcttagcgctctggacagatggacgcaggccctgtccagcccccagtgcgctcgttccggtccccacagactgccccagccaacgagattgctggaaaccaagtcaggccaggtgggcggacaaaagggccaggtgcggcctggggggaacggatgctccgaggactggactgtttttttcacacatcgttgccgcagcggtgggaaggaaaggcagatgtaaatgatgtgttggtttacagggtatatttttgataccttcaatgaattaattcagatgttttacgcaaggaaggacttacccagtattactgctgctgtgcttttgatctctgcttaccgttcaagaggcgtgtgcaggccgacagtcggtgaccccatcactcgcaggaccaagggggcggggactgctggctcacgccccgctgtgtcctccctccctcccttccttgggcagaatgaattcgatgcgtattctgtggccgccatctgcgcagggtggtggtattctgtcatttacacacgtcgttctaattaaaaagcgaattatactcc

SEQ ID NO: 82299 - DNA, 8475 bp, Artificial Sequence
  derived and/or modified sequence
gagtctttgaggacacagcctcgctggaggcagtttctggtgccagtgacggggtggcccgtgagctgatgacgaggactggcttttaatccttggtggtgattaagagaaagcttattggggcctgggagcagctccccgccgacccccaccaccatgtcgggatccacacagcctgtggcacagacgtggagggccactgagccccgctacccgccccacagcctttcctacccagtgcagatcgcccggacgcacacggacgtcgggctcctggagtaccagcaccactcccgcgactatgcctcccacctgtcgcccggctccatcatccagccccagcggcggaggccctccctgctgtctgagttccagcccgggaatgaacggtcccaggagctccacctgcggccagagtcccactcatacctgcccgagctggggaagtcagagatggagttcattgaaagcaagcgccctcggctagagctgctgcctgaccccctgctgcgaccgtcacccctgctggccacgggccagcctgcgggatctgaagacctcaccaaggaccgtagcctgacgggcaagctggaaccggtgtctccccccagccccccgcacactgaccctgagctggagctggtgccgccacggctgtccaaggaggagctgatccagaacatggaccgcgtggaccgagagatcaccatggtagagcagcagatctctaagctgaagaagaagcagcaacagctggaggaggaggctgccaagccgcccgagcctgagaagcccgtgtcaccgccgcccatcgagtcgaagcaccgcagcctggtgcagatcatctacgacgagaaccggaagaaggctgaagctgcacatcggattctggaaggcctggggccccaggtggagctgccgctgtacaaccagccctccgacacccggcagtatcatgagaacatcaaaataaaccaggcgatgcggaagaagctaatcttgtacttcaagaggaggaatcacgctcggaaacaatgggagcagaagttctgccagcgctatgaccagctcatggaggcctgggagaagaaggtggagcgcatcgagaacaacccccggcggcgggccaaggagagcaaggtgcgcgagtactacgagaagcagttccctgagatccgcaagcagcgcgagctgcaggagcgcatgcagagggtgggccagcggggcagtgggctgtccatgtcggccgcccgcagcgagcacgaggtgtcagagatcatcgatggcctctcagagcaggagaacctggagaagcagatgcgccagctggccgtgatcccgcccatgctgtacgacgctgaccagcagcgcatcaagttcatcaacatgaacgggcttatggccgaccccatgaaggtgtacaaagaccgccaggtcatgaacatgtggagtgagcaggagaaggagaccttccgggagaagttcatgcagcatcccaagaactttggcctgatcgcatcattcctggagaggaagacagtggctgagtgcgtcctctattactacctgactaagaagaatgagaactataagagcctggtgagacggagctatcggcgccgcggcaagagccagcagcagcaacaacagcagcagcagcagcagcagcagcagcagcagcagcccatgccccgcagcagccaggaggagaaagatgagaaggagaaggaaaaggaggcggagaaggaggaggagaagccggaggtggagaacgacaaggaagacctcctcaaggagaagacagacgacacctcaggggaggacaacgacgagaaggaggctgtggcctccaaaggccgcaaaactgccaacagccagggaagacgcaaaggccgcatcacccgctcaatggctaatgaggccaacagcgaggaggccatcaccccccagcagagcgccgagctggcctccatggagctgaatgagagttctcgctggacagaagaagaaatggaaacagccaagaaaggtctcctggaacacggccgcaactggtcggccatcgcccggatggtgggctccaagactgtgtcgcagtgtaagaacttctacttcaactacaagaagaggcagaacctcgatgagatcttgcagcagcacaagctgaagatggagaaggagaggaacgcgcggaggaagaagaagaaagcgccggcggcggccagcgaggaggctgcattcccgcccgtggtggaggatgaggagatggaggcgtcgggcgtgagcggaaatgaggaggagatggtggaggaggctgaagccactgtcaacaacagctcagacaccgagagcatcccctctcctcacactgaggccgccaaggacacagggcagaatgggcccaagcccccagccaccctgggcgccgacgggccacccccagggccacccaccccaccaccggaggacatcccggcccccactgagcccaccccggcctctgaagccaccggagcccctacgcccccaccagcacccccatcgccctctgcacctcctcctgtggtccccaaggaggagaaggaggaggagaccgcagcagcgcccccagtggaggagggggaggagcagaagccccccgcggctgaggagctggcagtggacacagggaaggccgaggagcccgtcaagagcgagtgcacggaggaagccgaggaggggccggccaagggcaaggacgcggaggccgctgaggccacggccgagggggcgctcaaggcagagaagaaggagggcgggagcggcagggccaccacagccaagagctcgggcgccccccaggacagcgactccagtgctacctgcagtgcagacgaggtggatgaggccgagggcggcgacaagaaccggctgctgtccccaaggcccagcctcctcaccccgactggcgacccccgggccaatgcctcaccccagaagccactggacctgaagcagctgaagcagcgagcggctgccatcccccccatccaggtcaccaaagtccatgagcccccccgggaggacgcagctcccaccaagccagctcccccagccccaccgccaccgcaaaacctgcagccggagagcgacgcccctcagcagcctggcagcagcccccggggcaagagcaggagcccggcaccccccgccgacaaggaggcagagaagcctgtgttcttcccagccttcgcagccgaggcccagaagctgcctggggaccccccttgctggacttccggcctgcccttccccgtgcccccccgtgaggtgatcaaggcctccccgcatgccccggacccctcagccttctcctacgctccacctggtcacccactgcccctgggcctccatgacactgcccggcccgtcctgccgcgcccacccaccatctccaacccgcctcccctcatctcctctgccaagcaccccagcgtcctcgagaggcaaataggtgccatctcccaaggaatgtcggtccagctccacgtcccgtactcagagcatgccaaggccccggtgggccctgtcaccatggggctgcccctgcccatggaccccaaaaagctggcacccttcagcggagtgaagcaggagcagctgtccccacggggccaggctgggccaccggagagcctgggggtgcccacagcccaggaggcgtccgtgctgagagggacagctctgggctcagttccgggcggaagcatcaccaaaggcattcccagcacacgggtgccctcggacagcgccatcacataccgcggctccatcacccacggcacgccagctgacgtcctgtacaagggcaccatcaccaggatcatcggcgaggacagcccgagtcgcttggaccgcggccgggaggacagcctgcccaagggccacgtcatctacgaaggcaagaagggccacgtcttgtcctatgagggtggcatgtctgtgacccagtgctccaaggaggacggcagaagcagctcaggacccccccatgagacggccgcccccaagcgcacctatgacatgatggagggccgcgtgggcagagccatctcctcagccagcatcgaaggtctcatgggccgtgccatcccgccggagcgacacagcccccaccacctcaaagagcagcaccacatccgcgggtccatcacacaagggatccctcggtcctacgtggaggcacaggaggactacctgcgtcgggaggccaagctcctaaagcgggagggcacgcctccgcccccaccgccctcacgggacctgaccgaggcctacaagacgcaggccctgggccccctgaagctgaagccggcccatgagggcctggtggccacggtgaaggaggcgggccgctccatccatgagatcccgcgcgaggagctgcggcacacgcccgagctgcccctggccccgcggccgctcaaggagggctccatcacgcagggcaccccgctcaagtacgacaccggcgcgtccaccactggctccaaaaagcacgacgtacgctccctcatcggcagccccggccggacgttcccacccgtgcacccgctggatgtgatggccgacgcccgggcactggaacgtgcctgctacgaggagagcctgaagagccggccagggaccgccagcagctcggggggctccattgcgcgcggcgccccggtcattgtgcctgagctgggtaagccgcggcagagccccctgacctatgaggaccacggggcaccctttgccggccacctcccacgaggttcgcccgtgaccacgcgggagcccacgccgcgcctgcaggagggcagcctttcgtccagcaaggcatcccaggaccgaaagctgacgtcgacgcctcgtgagatcgccaagtccccgcacagcaccgtgcccgagcaccacccacaccccatctcgccctatgagcacctgcttcggggcgtgagtggcgtggacctgtatcgcagccacatccccctggccttcgaccccacctccataccccgcggcatccctctggacgcagccgctgcctactacctgccccgacacctggcccccaaccccacctacccgcacctgtacccaccctacctcatccgcggctaccccgacacggcggcgctggagaaccggcagaccatcatcaatgactacatcacctcgcagcagatgcaccacaacgcggccaccgccatggcccagcgagctgatatgctgaggggcctctcgccccgcgagtcctcgctggcactcaactacgctgcgggtccccgaggcatcatcgacctgtcccaagtgccacacctgcctgtgctcgtgcccccgacaccaggcaccccagccaccgccatggaccgccttgcctacctccccaccgcgccccagcccttcagcagccgccacagcagctccccactctccccaggaggtccaacacacttgacaaaaccaaccaccacgtcctcgtccgagcgggagcgagaccgggatcgagagcgggaccgggatcgggagcgggaaaagtccatcctcacgtccaccacgacggtggagcacgcacccatctggagacctggtacagagcagagcagcggcagcagcggcgggggtgggggcagcagcagccgccccgcctcccactcccatgcccaccagcactcgcccatctcccctcggacccaggatgccctccagcagagacccagtgtgcttcacaacacaggcatgaagggtatcatcaccgctgtggagcccagcacgcccacggtcctgaggtccacctccacctcctcacccgttcgcccggctgccacattcccacctgccacccactgcccactgggcggcaccctcgatggggtctaccctaccctcatggagcccgtcttgctgcccaaggaggccccccgggtcgcccggccagagcggccccgagcagacaccggccatgccttcctcgccaagcccccagcccgctccgggctggagcccgcctcctcccccagcaagggctcggagccccggcccctagtgcctcctgtctctggccacgccaccatcgcccgcacccctgcgaagaacctcgcacctcaccacgccagcccggacccgccggcgccacctgcctcggcctcggacccgcaccgggaaaagactcaaagtaaacccttttccatccaggaactggaactccgttctctgggttaccacggcagcagctacagccccgaaggggtggagcccgtcagccctgtgagctcacccagtctgacccacgacaaggggctccccaagcacctggaagagctcgacaagagccacctggagggggagctgcggcccaagcagccaggccccgtgaagcttggcggggaggccgcccacctcccacacctgcggccgctgcctgagagccagccctcgtccagcccgctgctccagaccgccccaggggtcaaaggtcaccagcgggtggtcaccctggcccagcacatcagtgaggtcatcacacaggactacacccggcaccacccacagcagctcagcgcacccctgcccgcccccctctactccttccctggggccagctgccccgtcctggacctccgccgcccacccagtgacctctacctcccgcccccggaccatggtgccccggcccgtggctccccccacagcgaagggggcaagaggtctccagagccaaacaagacgtcggtcttgggtggtggtgaggacggtattgaacctgtgtccccaccggagggcatgacggagccagggcactcccggagtgctgtgtacccgctgctgtaccgggatggggaacagacggagcccagcaggatgggctccaagtctccaggcaacaccagccagccgccagccttcttcagcaagctgaccgagagcaactccgccatggtcaagtccaagaagcaagagatcaacaagaagctgaacacccacaaccggaatgagcctgaatacaatatcagccagcctgggacggagatcttcaatatgcccgccatcaccggaacaggccttatgacctatagaagccaggcggtgcaggaacatgccagcaccaacatggggctggaggccataattagaaaggcactcatgggtaaatatgaccagtgggaagagtccccgccgctcagcgccaatgcttttaaccctctgaatgccagtgccagcctgcccgctgctatgcccataaccgctgctgacggacggagtgaccacacactcacctcgccaggtggcggcgggaaggccaaggtctctggcagacccagcagccgaaaagccaagtccccggccccgggcctggcatctggggaccggccaccctctgtctcctcagtgcactcggagggagactgcaaccgccggacgccgctcaccaaccgcgtgtgggaggacaggccctcgtccgcaggttccacgccattcccctacaaccccctgatcatgcggctgcaggcgggtgtcatggcttccccacccccaccgggcctccccgcgggcagcgggcccctcgctggcccccaccacgcctgggacgaggagcccaagccactgctctgctcgcagtacgagacactctccgacagcgagtgactcagaacagggcgggggggggggcggtgtcaggtcccagcgagccacaggaacggccctgcaggagcagggcggctgccgactcccccaaccaaggaaggagcccctgagtccgcctgcgcctccatccatctgtccgtccagagccggcatccttgcctgtctaaagccttaactaagactcccgccccgggctggccctgtgcagaccttactcaggggatgtttacctggtgctcgggaagggaggggaaggggccggggagggggcacggcaggcgtgtggcagccacacgcaggcggccagggcggccagggacccaaagcaggatgaccacgcacctccacgccactgcctcccccgaatgcatttggaaccaaagtctaaactgagctcgcagcccccgcgccctccctccgcctcccatcccgcttagcgctctggacagatggacgcaggccctgtccagcccccagtgcgctcgttccggtccccacagactgccccagccaacgagattgctggaaaccaagtcaggccaggtgggcggacaaaagggccaggtgcggcctggggggaacggatgctccgaggactggactgtttttttcacacatcgttgccgcagcggtgggaaggaaaggcagatgtaaatgatgtgttggtttacagggtatatttttgataccttcaatgaattaattcagatgttttacgcaaggaaggacttacccagtattactgctgctgtgcttttgatctctgcttaccgttcaagaggcgtgtgcaggccgacagtcggt

SEQ ID NO: 82300 - DNA, 2807 bp, Artificial Sequence
  derived and/or modified sequence
ttacagtcaggagccacccactgcccactgggcggcaccctcgatggggtctaccctaccctcatggagcccgtcttgctgcccaaggaggccccccgggtcgcccggccagagcggccccgagcagacaccggccatgccttcctcgccaagcccccagcccgctccgggctggagcccgcctcctcccccagcaagggctcggagccccggcccctagtgcctcctgtctctggccacgccaccatcgcccgcacccctgcgaagaacctcgcacctcaccacgccagcccggacccgccggcgccacctgcctcggcctcggacccgcaccgggaaaagactcaaagtaaacccttttccatccaggaactggaactccgttctctgggttaccacggcagcagctacagccccgaaggggtggagcccgtcagccctgtgagctcacccagtctgacccacgacaaggggctccccaagcacctggaagagctcgacaagagccacctggagggggagctgcggcccaagcagccaggccccgtgaagcttggcggggaggccgcccacctcccacacctgcggccgctgcctgagagccagccctcgtccagcccgctgctccagaccgccccaggggtcaaaggtcaccagcgggtggtcaccctggcccagcacatcagtgaggtcatcacacaggactacacccggcaccacccacagcagctcagcgcacccctgcccgcccccctctactccttccctggggccagctgccccgtcctggacctccgccgcccacccagtgacctctacctcccgcccccggaccatggtgccccggcccgtggctccccccacagcgaagggggcaagaggtctccagagccaaacaagacgtcggtcttgggtggtggtgaggacggtattgaacctgtgtccccaccggagggcatgacggagccagggcactcccggagtgctgtgtacccgctgctgtaccgggatggggaacagacggagcccagcaggatgggctccaagtctccaggcaacaccagccagccgccagccttcttcagcaagctgaccgagagcaactccgccatggtcaagtccaagaagcaagagatcaacaagaagctgaacacccacaaccggaatgagcctgaatacaatatcagccagcctgggacggagatcttcaatatgcccgccatcaccggaacaggccttatgacctatagaagccaggcggtgcaggaacatgccagcaccaacatggggctggaggccataattagaaaggcactcatgggtaaatatgaccagtgggaagagtccccgccgctcagcgccaatgcttttaaccctctgaatgccagtgccagcctgcccgctgctatgcccataaccgctgctgacggacggagtgaccacacactcacctcgccaggtggcggcgggaaggccaaggtctctggcagacccagcagccgaaaagccaagtccccggccccgggcctggcatctggggaccggccaccctctgtctcctcagtgcactcggagggagactgcaaccgccggacgccgctcaccaaccgcgtgtgggaggacaggccctcgtccgcaggttccacgccattcccctacaaccccctgatcatgcggctgcaggcgggtgtcatggcttccccacccccaccgggcctccccgcgggcagcgggcccctcgctggcccccaccacgcctgggacgaggagcccaagccactgctctgctcgcagtacgagacactctccgacagcgagtgactcagaacagggcgggggggggggcggtgtcaggtcccagcgagccacaggaacggccctgcaggagcagggcggctgccgactcccccaaccaaggaaggagcccctgagtccgcctgcgcctccatccatctgtccgtccagagccggcatccttgcctgtctaaagccttaactaagactcccgccccgggctggccctgtgcagaccttactcaggggatgtttacctggtgctcgggaagggaggggaaggggccggggagggggcacggcaggcgtgtggcagccacacgcaggcggccagggcggccagggacccaaagcaggatgaccacgcacctccacgccactgcctcccccgaatgcatttggaaccaaagtctaaactgagctcgcagcccccgcgccctccctccgcctcccatcccgcttagcgctctggacagatggacgcaggccctgtccagcccccagtgcgctcgttccggtccccacagactgccccagccaacgagattgctggaaaccaagtcaggccaggtgggcggacaaaagggccaggtgcggcctggggggaacggatgctccgaggactggactgtttttttcacacatcgttgccgcagcggtgggaaggaaaggcagatgtaaatgatgtgttggtttacagggtatatttttgataccttcaatgaattaattcagatgttttacgcaaggaaggacttacccagtattactgctgctgtgcttttgatctctgcttaccgttcaagaggcgtgtgcaggccgacagtcggtgaccccatcactcgcaggaccaagggggcggggactgctggctcacgccccgctgtgtcctccctccctcccttccttgggcagaatgaattcgatgcgtattctgtggccgccatctgcgcagggtggtggtattctgtcatttacacacgtcgttctaattaaaaagcgaattatactcc

SEQ ID NO: 82301 - DNA, 7565 bp, Artificial Sequence
  derived and/or modified sequence
atgtccggatctacccagccagtcgctcagacttggcgggcaacggagcctcggtaccctcctcattcactctcttacccagttcaaattgccaggactcatacagacgttggattgctggagtaccagcaccactcacgtgattacgcaagccatctgtctcctggaagtataatccagcctcagagacgcaggccgtctctgttatctgagttccagcctggcaatgagagatcgcaggagcttcacctccgaccagaatctcactcatacttgccagagctggggaaatcagaaatggaatttattgagagcaaaagacccagactcgaactgctgcccgaccctctgttgagaccaagcccactgctcgctacaggtcagcccgctggttccgaggatttgaccaaagaccggtccctgactggcaaactggagcccgtctcgcccccttcacccccacatacagaccctgagttggaactggtgccgccacgactgagcaaagaagagcttatccagaacatggaccgggtggaccgcgaaatcaccatggtggagcagcagatctccaagctgaagaaaaagcaacagcagcttgaagaggaggccgctaagccaccagagcccgaaaaaccggtgtcaccgccacctatagagagcaaacaccgttccctcgttcagattatctacgacgagaacaggaagaaggctgaagctgcgcatcggatcctggagggcctgggtcctcaagtggagcttccattatataaccagccatctgatacccgccagtatcacgaaaacattaagatcaaccaggccatgcgcaagaagctgatcctctactttaaacggaggaaccatgctaggaagcagtgggagcagaagttttgtcagcgctatgaccagctaatggaggcatgggaaaagaaagttgaaagaattgagaacaatccacgtcgtagagccaaagagtctaaggttcgtgagtattatgagaaacagttcccagagatccggaaacagagagagctccaggaacggatgcagagtcgagtggggcagcgagggtccggtctgtccatgtccgccgctagatccgagcacgaggtgagcgagatcatcgacggattaagtgaacaggagaatctcgagaaacagatgaggcaactggcagtgattcctcccatgctctatgacgccgatcaacagagaataaaattcataaatatgaacggattgatggccgacccaatgaaggtttataaagaccgacaggtgatgaacatgtggagcgaacaagaaaaagaaacctttcgggagaagtttatgcagcacccaaagaatttcggcctcattgcatcttttctggagcggaaaaccgtggctgagtgcgttttatattattacctgaccaagaaaaacgagaattataaatctctggtgagacgctcttacaggcggagagggaaatcacagcaacagcagcagcagcaacagcagcaacagcagcagcagcagcaacaaccaatgcctcgctcctctcaggaggaaaaggacgaaaaagagaaagagaaggaggcagagaaggaagaggagaaacccgaagtggagaacgataaagaggaccttctgaaagaaaagacagatgacacctctggagaagacaatgacgagaaggaggccgtggcctctaaaggaagaaagacagccaattcccaagggagacgcaaaggcagaataacaaggtccatggctaacgaggctaactcagaagaggcaatcaccccacagcagtccgcagagttggcatccatggagcttaacgagagctccagatggactgaagaggagatggagacggctaaaaaggggttgctcgagcatggcagaaactggagcgccatcgcacgcatggtgggctcaaagaccgtgtctcaatgtaagaatttttacttcaactataaaaagcggcagaacctggacgaaattcttcagcagcataaactcaaaatggaaaaggaaagaaatgctagacggaaaaagaagaaggccccagccgctgcctctgaggaggcagctttccctcccgtggtggaggacgaggaaatggaagccagtggcgtgagcgggaacgaagaggagatggtggaggaggcagaagcacttcatgcaagcgggaacgaagtgccccgaggcgaatgtagtggcccagccacagtgaataactcaagcgacactgaaagcatcccttccccccacacagaggcagccaaagacacgggccagaacggtccaaagccgccagcgacattgggcgcagatggaccaccaccgggacctcctaccccacccccagaagatattccagcccctaccgagcctactcctgcttctgaggctacaggagcgcctacccctcctccagcaccccctagcccttcagctccccctcccgtggtgccaaaagaggagaaggaggaagagaccgcagctgctcctcccgtggaagagggtgaggagcaaaagcctccagccgctgaagaactcgcagttgacactggcaaggcggaagaacctgtcaagtctgaatgtacagaggaagcagaggaagggccagccaagggcaaagatgctgaggcagctgaagcgacagccgagggggctctgaaagcagagaaaaaagaggggggtagcgggcgagctaccacagccaagtcctccggggctcctcaagacagtgatagctccgctacttgcagcgccgatgaagtggatgaagctgagggcggtgacaagaacagactcttatcccctcgaccatctttgcttacacccactggggatcctcgagccaacgctagtccgcagaaaccattagacctcaagcaactgaagcagcgggctgcagccattcctcccatcgttaccaaggtgcatgaaccccctcgagaagatgcagcacctacaaaacccgcaccgccagccccaccacccccacagaatctccagcctgagtcggatgctccccaacagccagggtcatccccacggggtaagagccgcagcccggctcctcccgcagacaaggaggccgaaaaacccgtgttctttcccgcatttgcggcagaggctcaaaaactgcctggcgatccaccttgttggacgtctggactgcctttccctgtgccacctagggaagttatcaaggcctcacctcacgccccagacccttccgcattctcatatgccccacccggacacccactccctctgggtttgcacgacaccgccagaccggtgttacctcgtcccccaacaatctctaatccacccccattgatatcatcagccaaacacccctcagtgctggaacggcagattggcgctatcagccagggtatgagcgttcagcttcacgtgccgtactccgaacacgcaaaggccccagtcggcccagtgactatggggttgccactgcctatggaccctaaaaaactggcccctttctcaggagtgaagcaagagcagctgtcgccgagagggcaagcgggtcctcctgagagtcttggagttcccacagctcaggaggcgagcgttctccggggaaccgctctggggagtgttcccggtgggagcataactaagggtattcccagcacgcgcgttccatctgacagcgctattacatacaggggctccatcacacatggtaccccggctgacgtgctctacaaaggaaccatcacccgaattatcggcgaagactctccctcccgtctggaccgaggtcgtgaagactccctcccaaagggccatgtaatttatgagggcaaaaagggacacgtgctcagttacgagggaggaatgtcggtcacgcagtgctccaaagaagatggaaggagcagtagcgggcctcctcacgaaacggctgccccaaaaaggacatacgacatgatggagggtcgtgtaggcagagccatcagttccgcctcaattgagggactcatgggacgagccatcccacctgagcggcactcccctcatcatctgaaggaacagcaccatattagaggcagcatcactcaaggaattccacggtcttatgtcgaggcccaggaggattatttgaggcgggaggcgaaattgctgaagcgcgaaggaaccccccctcctcctcccccttctcgtgacctcactgaagcttacaagacccaggctctaggaccacttaagctcaagccggctcacgagggcctggtggctacagtcaaagaggcaggaaggagcattcacgagatccctcgagaggagctgcggcatacccctgagctccctctcgccccaagacccttgaaggaaggaagtatcacccagggcacccccttgaagtacgacacaggggcatctaccacaggctctaaaaagcacgatgtcaggtccctgattggcagtcctggaagaacattccctcctgtacatccgcttgacgtcatggccgacgccagagcactcgagcgtgcctgctacgaggaatctctgaagtctagaccaggtactgcctcttcctctggaggtagcattgccaggggagcaccagttatcgtcccagaattaggtaagcctcggcagagccccctgacctatgaggaccacggcgctccttttgcaggtcacctgcctaggggatctcccgtcactacacgcgaacccacccctagattgcaggagggctctctctcttcaagtaaagctagccaggatcgcaaactgacaagtacccccagagagattgctaagtctccacacagtactgtcccagagcatcaccctcatccaatctccccgtatgagcacttgctgcggggagtaagcggggtagatttatacaggtcccatattccactggccttcgaccccacttctattccacgtgggattcccctcgacgcggcagcagcttattatctgcctcggcacctggctcccaatcctacttatccacatctgtaccccccttacttaattcggggttaccccgacacagcagctctagaaaaccgtcaaaccataattaacgactatatcacctcacagcagatgcaccacaatgcagccacagctatggcccagagggctgatatgctgcgtggcctctcacccagagagagttccctggccctaaattacgctgccggacctcgagggattatcgacctcagtcaggtgccccacttgccggtgctggtcccacctacacctggaacacctgctacagccatggatcggctggcttacctgcctaccgcgcctcaaccgtttagctctcgccacagtagttcacctctgtcccccggtgggcctacgcatctaacaaagccaaccaccacctcgagcagcgagagggagagagaccgagacagggagcgggatagagaccgagaacgggagaagagcatactgacctcaaccacaactgtggaacacgccccaatatggagacccggtaccgaacaatctagcggatccagcggagggggagggggatccagctctcgacccgcttcccacagccacgcacaccaacactcccctatctccccacgcacccaggacgcactgcaacaacgcccttcggtgcttcacaataccggtatgaaggggattatcacggccgtggagcccagcacccctaccgtcttgaggtcaacttcgaccagttctcctgtgcgccctgcggcaacatttcctccagccacccattgccccctgggtggcacattagatggagtatacccaactttgatggagccggtgctgttgcctaaggaggctcccagagttgcaaggcccgagcgcccacgggcagacacaggccatgcatttttggccaagccacctgcaaggagtggactggagccagcgtctagcccatccaaggggtctgaaccacgcccactggtgcctccggtgagcggtcatgctacaatcgcacgcacccctgcaaaaaatctcgccccacatcacgcaagccccgatccgccagctcctcctgcaagtgcttcagacccgcatagagagaagacccagagtaagccatttagcatacaggaactggaattgcgttctctagggtaccacggctcaagctacagtccggaaggcgttgaacccgtctctcccgtgtcttccccttccctgacccacgataagggtttgccaaagcatctggaagagttagacaaatcccacttggaaggagagctgagaccgaagcaaccaggccctgtaaaactcggaggcgaggcagctcacctgccacacctgaggcctctccccgaatcccagcctagttcaagccctctgctccagacagctccaggcgtaaaaggacaccagcgcgtggttaccctggcccaacatatctcagaggtcataacacaggactacaccaggcatcacccccagcagttgagcgcacccttacccgctccgctgtactcattcccaggtgcctcctgccccgtgctggatttgcgcaggccgccatccgacctgtacctaccacctcctgatcacggcgcacccgcacggggtagcccccatagtgagggaggaaaacgctcacctgagcctaacaagaccagcgtcctcgggggaggcgaggacggaatcgaacccgtttctcccccagaaggaatgactgagccgggacattcccggtccgcggtctaccccctgttgtatcgggacggcgagcagaccgagccatccaggatgggcagtaagtcccctggcaatacctcccagccacccgcttttttttctaagctgaccgaaagtaatagcgccatggtcaaatccaaaaagcaggagattaataaaaagctgaacacccacaaccggaacgagcccgaatacaacattagccagccaggcacagaaatctttaatatgccggctataactggcaccgggcttatgacctaccggtcgcaagccgttcaagaacatgctagcaccaacatggggttagaagctattatccgtaaggccttaatgggcaaatacgaccagtgggaagaatccccccctctgagcgccaacgccttcaaccccctaaatgccagcgcctcactgcctgcggctatgcctatcaccgcagctgatggtcgctcggatcataccctaacttcaccgggaggtggcggtaaagccaaggtgtcggggaggcctagcagccgcaaggcgaagtcacctgctcccggtctggcatcaggggaccgaccaccttccgtgagctccgtgcacagtgagggagactgcaacagacgcaccccattgacaaacagagtctgggaggataggccctcaagtgcaggtagcaccccgtttccatataaccctctgatcatgaggctgcaggccggtgtgatggctagcccacctcctcccggactgcctgcgggtagcggccctctggctgggccacatcacgcatgggacgaggaaccgaagcccctgctgtgctcacagtacgagactctctcagacagcgagta

SEQ ID NO: 82302 - DNA, 6227 bp, Artificial Sequence
  derived and/or modified sequence
atgtggtctgagcaggaaaaagagacttttagggagaaatttatgcagcacccgaaaaactttggattaattgcgtcctttctcgagagaaagaccgttgctgagtgcgtgctgtattactaccttacgaagaagaatgaaaattacaagtctctggtacggagatcatatagacgcaggggcaaatctcaacagcaacagcaacagcaacagcagcaacaacagcagcagcaacagcaacccatgcctcgttcatctcaggaagaaaaggacgagaaggagaaggagaaagaggcagaaaaggaggaggagaaacccgaggtggagaatgacaaggaagatttgctcaaggagaagacagacgatacaagcggagaggacaatgatgagaaggaagccgtggcatctaagggcaggaaaacagcaaatagccaggggcgacgcaagggaaggattacgcgcagcatggccaatgaagccaattcggaggaggcgattactccacagcagtctgcagagctggcttcaatggagcttaacgagtcaagccggtggaccgaagaggaaatggaaaccgccaagaaaggcctgctggagcatggaaggaactggtctgcaatagcaagaatggtcggctcaaagacggtgagccagtgcaaaaatttttattttaactacaagaaacggcaaaacctcgacgaaattctgcagcagcacaagctcaagatggagaaggagagaaatgctcggcgaaagaagaagaaagcccctgccgctgcaagcgaggaggccgcatttcccccagtggtagaagacgaagaaatggaagcgagcggggtgtcaggcaatgaagaggaaatggtggaggaagcagaggccaccgtaaataactcctccgacactgagtccataccaagcccccataccgaggccgctaaggacaccggtcagaatgggccaaaacccccagcaacactcggggctgacggcccaccccctggccctcctaccccccctcctgaagatatccccgctcccaccgaacccactcctgcatctgaggctaccggggctcccacgccacccccagctccaccgagcccctccgctcccccaccagtcgtccctaaagaagaaaaagaggaggagaccgccgctgcccctcccgtggaggagggtgaagagcagaaaccaccagccgcagaagagctggccgtcgatacaggcaaggctgaggagcccgtgaaatctgagtgtacagaggaggccgaggagggtccagctaagggtaaggacgctgaagctgccgaagcaacagcggagggtgctctcaaggcagaaaaaaaagagggtggctctggacgggctacgaccgccaaatcatctggtgctcctcaggatagcgactcctccgccacatgttcagcggacgaagtcgacgaagctgaggggggtgataaaaatagactgctttctcctcggccatccctgctcacccccaccggggatcccagggcaaacgcttctcctcagaaacctcttgacttgaaacagctgaagcaaagagccgctgctatcccccctatccaggtgacaaaggtccacgaaccccctcgggaggacgccgctccgaccaaacccgctcccccagcccctcctccccctcagaacctgcagcccgaatcggacgccccacagcagccgggttcatcccccagagggaagagccggtctcccgctcctcctgcagataaggaggccgagaagcctgtcttcttccccgctttcgctgccgaagcgcagaagcttccgggagaccctccttgctggaccagcggcctaccgtttcctgtgccaccaagggaggttattaaggcatccccacacgcaccggacccctccgcgttttcctacgcacccccaggccaccccctgcctctggggttgcatgataccgccagaccagttcttcccagaccccctactatcagcaacccccctcctctgatttcatcagccaagcacccttccgtgttagagcggcagattggagctatctctcagggcatgtcggtccagcttcacgtgccttattcagagcatgctaaagcgcctgtaggcccagtgaccatggggttgccacttcctatggacccaaagaagttggctcccttcagcggtgtcaagcaggagcagctttcccccaggggacaagctggcccaccagagtcactaggcgtgccaaccgcacaagaggcttccgtgctgcggggtactgcactcgggagtgtccccggaggatccattacaaaaggtatcccgagcacacgcgtgccatccgatagtgccatcacttaccgcggttcaattacccacggtacacccgcagacgtactttacaagggtacaattactaggatcataggcgaggatagtccatcccggctggacagaggacgggaagactccctgcctaagggccatgtcatctacgaagggaagaaaggccacgtcctgtcatatgagggcggaatgtccgtgacacagtgttccaaggaagacgggagaagtagcagtgggcctccccacgagaccgccgctccgaaacggacatacgacatgatggaggggagagtgggtcgcgcaattagtagtgccagtattgagggactgatggggagagcaattcccccagaaagacactcaccccaccacctaaaagagcagcaccacattcggggaagtattacacaaggtatcccccgaagctatgtagaagctcaggaagattaccttcgtcgagaagcaaaactgcttaagcgagaaggaacgcccccacctccaccaccgtcgagagacctgaccgaagcttacaagacccaggcgctgggcccactcaagctcaaacctgcacacgagggcttagtcgctaccgtaaaggaggcaggacgatccattcacgagatacctcgggaagagctgcgccatactccagagcttcccttggcaccacgacccctaaaagagggatcgataacccagggcaccccgctcaaatacgacaccggggcatccaccactggttccaagaaacatgacgtgcgatccctcattgggtcacctgggaggacgtttccacctgtccaccccctcgacgtgatggcagacgcgcgtgcactggagagggcatgttatgaagaatcacttaaatcccgccctggcaccgccagcagttcaggcggatccattgccaggggggcaccagttatcgtgccagaactgggcaaaccaagacagagtcccctcacctatgaggatcacggagctccattcgccggtcatcttcctcggggaagtcccgttactacccgcgagcctacacctagacttcaagaaggatctctcagcagtagtaaagcgagccaggacaggaagctgacatccactcctcgggagatcgccaagagtcctcactcaaccgtcccagaacaccacccacaccccatatcaccctacgagcaccttctacggggtgtaagcggagttgatctgtataggtcacatatacctctcgccttcgaccccacttcaattccaagggggatcccactggatgcagccgcagcttactacctccccagacacctggctcctaatccaacatacccgcacctgtatccaccatacttaataagaggataccccgatactgccgctcttgaaaataggcagaccataataaatgactacataactagccagcagatgcaccataatgccgctactgctatggcacaaagggccgacatgctgagaggtctttcccctagggagtctagcctagccctcaattatgccgctggcccacgaggaattattgatctgagccaggtcccacacttgcccgtgctagtgccaccaacccccggaactcccgctaccgccatggacaggctggcctatctcccgaccgcccctcagccctttagctctcgacatagctcaagccctttgagcccaggaggtcctacacatcttactaagcccactactaccagctcttccgagagggagcgggacagagaccgcgagcgtgaccgtgatcgagaacgggaaaagtctatcttgacatctaccaccactgtggaacatgctcctatctggagacccggaacagaacagtcctctggcagttccggcggaggcggaggatcttctagcaggccggcatcccatagccatgcacatcagcattcccccatttctccgagaacacaagatgccctgcagcagcgcccttccgtccttcataacacggggatgaaggggattattacagccgtagaaccgagtacacctactgtcttgagatccacaagtacatcttcacctgtgagaccggctgctacttttccccctgccacacactgccctttagggggaactttagatggcgtgtaccctacactgatggagcccgtgctgctgccaaaggaagcacctagagtagctcggcctgagagaccacgcgctgatacaggccacgcatttctggccaaaccacctgcacgctccggcttggagcccgcttcctccccctcaaaaggaagcgagcccagacctttggtgcctcctgtgagtggacatgccactatcgccagaactcccgcaaaaaatctggccccacaccacgcctcccctgatccccctgcccctcccgctagcgcgtctgatccgcaccgggaaaaaacacagtcaaaaccgttcagtattcaggagctggagctgcggagtctgggctaccatgggtcgagttacagcccagaaggagtggagcctgtcagccccgtgagctccccttctctgacccatgacaaggggctccccaaacacctggaagagcttgacaagtcacatcttgaaggtgagctcagaccgaaacagcccggacccgtgaagctcggaggtgaagcggcacatctgccgcacttacgccctctcccggaatcacaacccagctcctccccccttttgcaaaccgcaccaggtgtgaaaggccatcaacgcgtggtgactctggcccagcatatctccgaagttatcacgcaagactacacgaggcatcatccacagcagctgtccgcgccactacccgctcctttatattcattcccaggcgcaagctgccccgtgctggacctcaggaggcctccctcagatctgtatttgcccccaccagaccacggggcaccagccagagggtcaccccattcggaggggggaaaaagatctcccgaaccgaataagactagtgtcctgggaggtggtgaagatggtattgaaccagtgtcccctccagaagggatgacagagcctggtcatagtcggagcgccgtgtacccactgctatatcgtgacggcgaacagactgagccgtcccgtatgggatctaaatcccctggaaacacaagtcagcctcctgcgttcttctccaaactgaccgagtctaactcagccatggtgaagtcgaaaaagcaagagattaataagaagctaaacacacacaacaggaacgaaccagagtacaacatcagtcaaccaggaacggagatcttcaatatgcccgctattactgggacaggcttgatgacctatagatcccaggcggtccaggagcatgcctcaactaatatggggctggaagctattattaggaaggcactaatgggaaaatacgatcagtgggaggagagccccccactctcagcaaacgcgtttaatcccctgaacgcttccgccagcttaccagctgcgatgccaatcaccgccgcagacgggagaagtgaccacacactgactagtcctggcggagggggaaaggctaaggtgtccggacgaccatcgagtaggaaagccaaatcgcccgctcctggactcgcatcaggcgataggccaccttcggtatctagcgtacacagtgagggtgattgcaacagacggacccccttaacgaatcgtgtgtgggaagacagacctagtagtgctggctccaccccgttcccctataacccattaattatgcggcttcaagctggcgtcatggcaagtcccccacctcccggacttccagcaggtagcgggcctttggccggtccccatcacgcatgggacgaggagcccaagcccctgctgtgctcacagtatgagacactgagcgattctgagta

SEQ ID NO: 82303 - DNA, 7514 bp, Artificial Sequence
  derived and/or modified sequence
atgagcgggtcaactcaaccagtggctcagacatggagggcaacggaaccacgttacccaccgcactcgcttagctacccagttcagattgcaaggactcatacggacgtcgggcttcttgagtatcagcaccattcccgggactacgcgtcacacctgtccccaggcagtatcatacagccccagcggcgaagaccttccctgctgagtgagtttcagccaggcaacgaacggagccaggagctgcacctgcgtccggaatctcatagttacctgcctgaactagggaagtctgagatggaatttatcgaaagcaagcggcctagattggagttgctccccgacccattgttacgcccttccccactcctcgccaccggtcaaccagctgggtccgaagacctgaccaaagaccgctctctgaccggcaaactcgagcctgtgagccccccaagtccccctcacaccgatcccgagttggaactcgtgccacccaggctgtctaaggaagagttgatacagaacatggacagagtggatcgtgaaatcacaatggtcgaacagcagatatctaaactgaagaaaaaacagcagcagctggaggaggaggctgcgaagccgcctgaacccgagaagcctgtttccccccctcccatcgagtcaaagcatagaagtctcgtccagattatttatgatgagaacagaaaaaaagccgaggcagctcatcgcattctggaagggttgggcccacaggtcgagctccccctgtacaaccagccaagcgacacccgtcagtaccatgagaacatcaaaatcaatcaggcaatgcgaaagaaactgatcctttatttcaagagaaggaaccatgccaggaaacagtgggaacagaagttctgccagaggtacgatcaacttatggaggcctgggaaaaaaaggtggaacgcattgagaacaaccctaggaggagagccaaggagtccaaggttcgtgaatactatgaaaagcaatttccggagatcaggaagcagcgcgaactccaggaaaggatgcaaagagtcggccaacggggaagtggtctttccatgtctgctgctcgttctgagcacgaagtttcggagataatagatggtctgagcgagcaggaaaatcttgagaagcagatgaggcagctggcagttatccccccaatgctatacgacgcagatcagcagaggattaaattcatcaacatgaacggtttaatggctgaccccatgaaagtctacaaagatcgacaagtcatgaatatgtggtctgaacaagagaaggaaactttccgcgaaaagttcatgcagcaccccaaaaatttcgggctgatcgctagctttcttgaaagaaagactgtggcagaatgcgtgctgtattattacctgactaaaaagaacgagaattacaagtcgctggtgcgacggtcctacagaaggagaggtaagtctcagcagcagcaacagcagcaacagcagcagcagcagcaacagcaacaacaaccgatgcctcggtcatctcaggaagagaaggacgaaaaggaaaaggagaaagaagcagaaaaggaggaggaaaaaccagaggtcgaaaacgataaggaggacctgcttaaagagaagactgacgacacttccggcgaggacaacgatgagaaggaagccgtcgcatccaaggggaggaagacggcgaactcgcagggtaggagaaagggcagaattacccggagcatggctaacgaggccaactctgaggaagccattactcctcagcagagtgctgagctagcatcaatggaattaaacgagagctcaagatggactgaggaggaaatggaaaccgctaaaaaggggctcctggagcacggcaggaattggagcgcgattgctcgcatggtgggttcaaagaccgtgagtcagtgtaaaaacttctattttaattacaagaaaagacagaacttagatgaaattctgcaacagcacaaactcaagatggagaaagagagaaatgccaggaggaagaagaagaaagcacctgcagcggcatccgaggaagctgccttcccacctgtcgtggaagatgaggagatggaagccagcggtgtgtcaggcaacgaggaggagatggtggaagaggccgaggcaaccgtaaacaactctagcgacaccgagagcattcccagcccccacaccgaggcagccaaagataccggtcagaacggacccaagccacccgctacgcttggcgcagacggcccacccccaggccctccgactccgcctccggaggacatccccgctccaacggagcctacgcccgcatccgaggccacaggggcacccactccccctcccgctcctccctcaccgtccgcgccaccccctgtggtgccgaaagaagagaaggaggaggagacagccgcagcccctcccgtggaagaaggggaggagcagaaaccaccagccgctgaagagctcgccgtggacacaggcaaagccgaggaaccggttaaaagcgagtgcacggaggaagccgaagagggacctgccaaaggaaaggacgcagaggccgctgaagctaccgcggagggtgcgctgaaagccgagaagaaagagggcggaagcggacgcgctactaccgccaagagctcaggtgcacctcaggattctgacagctctgccacatgtagcgcagatgaagtggacgaggccgagggcggtgacaaaaatcgactgctgtccccccgtccctccctgctaactccgaccggtgatccgagagccaacgccagccctcagaagcctttggatcttaaacagttgaaacagagggctgccgcaataccacccattcaggtcactaaagtgcatgagccccctagggaagatgcggcaccgaccaagccagcccctccagctccaccgcctccccagaatctacagcctgagagtgacgccccacaacagcctggcagcagccccagaggaaagagtcgatcccctgcaccgccagccgacaaggaagcagagaaacctgtattcttccccgctttcgcagctgaagcccagaaactgccaggggatcccccatgctggaccagcggcctgcctttccccgtcccgcctcgggaagtgatcaaagcctcccctcatgcacctgatccctcagctttcagttatgctcctcctggccaccccctgcctctaggtctacacgatactgctcgcccagtgctcccgcgaccgcctacaatcagcaatccaccacctcttatctcttccgcaaaacacccatcggtcctcgaacgccaaataggagcaatctcgcagggtatgtcagtgcagttgcacgttccttacagcgaacatgctaaggccccagtgggtcccgtgactatggggttacctctgcctatggacccaaaaaagctggctcccttcagcggggttaaacaagagcaactgtctcctcgaggccaggccggacccccagagtctctgggtgtcccaacagcgcaggaggcctcagtcctccgaggtaccgcccttggcagtgttccaggcggatccattactaagggaatcccatcaacaagggtcccctccgacagcgccataacatatcgaggcagcattacgcatggtacccccgctgacgtgctatataagggtacaattactcgaataatcggtgaagacagcccctcaagactggacagggggcgagaagattccctccctaagggacatgtcatctatgagggaaagaagggacacgtgctgtcttatgaaggtgggatgtctgtcacgcagtgcagcaaggaagacggcaggtcttctagcggaccccctcatgaaacagctgctcccaagaggacctatgatatgatggagggcagagtcggacgcgcaatcagctcggcctccattgagggccttatgggaagagccatcccgcctgagaggcatagccctcaccacctgaaggaacagcatcacatccgcggaagtataactcagggaattccacgcagttatgtcgaagcgcaagaggactatctgagaagggaagctaaactcttgaagcgtgaaggtactcctcctccaccacccccatctcgggacctgactgaggcatacaaaacgcaggccttgggcccactgaaactgaaaccagcccacgaagggctggtagcaaccgtgaaggaggctggcagatcaatacatgagattccaagagaggaacttcgtcacacccctgaacttccactcgcaccaagacccttgaaggagggtagcattacccaggggaccccccttaaatatgacacgggggcaagcactactgggtccaagaagcacgacgtcagatctctgataggcagtccagggagaacattccctcccgtccatcccttggacgtgatggcggacgccagagccctggagcgggcatgttacgaggagagtcttaagagtaggccaggaaccgcctctagtagcggcggtagcatcgcgaggggagcgcctgtaattgttcctgagctcggcaaaccaagacagtctccactgacttatgaggaccatggagctccctttgccggtcatctgccacgcggatcaccggttactacaagagagcccactcccaggctgcaggagggtagcctatccagctctaaggcatctcaagaccgtaagctgacatccacacccagagagatcgccaaaagtccccactcaaccgtccccgagcaccacccccatcctatttccccttacgagcacctcctgagaggcgtgtccggcgttgacctttataggtcgcatatcccgttggcattcgatccaaccagcatccctcggggaattcctctggacgccgcagcagcctactacctaccacgccatcttgctccaaaccccacatatccccacctttaccccccttatctgattagaggctatcccgacacagccgcacttgaaaataggcagactatcattaacgattatatcacctctcagcagatgcatcataacgctgctaccgccatggcacagagagctgacatgctacgcggtctgtcccctagggaaagttctttggcgcttaactatgcagctgggccacgaggcatcatcgatctctcgcaggtgccccatctccctgtgctggtgcctcccacgcccggaacgcccgcaacagctatggatagattagcctatctgccaaccgcgccacaacccttctctagtaggcacagctcttctccattgtccccaggcggacccactcacctgaccaagcctacgacaacctcctcatccgagcgcgagcgggatagagaccgcgagagagacagagatcgcgaacgcgagaagagtattttaacttccacgaccaccgttgagcatgctcccatttggaggcccggtaccgagcagagctcaggcagttccggaggaggaggcggatcctctagccgccctgcttcacattcacacgctcatcaacattctcctatatctcctcggacgcaggacgccctgcagcagaggccttccgtacttcataacactggtatgaagggcatcattacagcagtggaacccagtacacccacagtattgcgctccacttctacttctagcccggtgagaccggctgcgacgttcccacctgctactcattgccctctcggcggaacactggacggtgtctatcctactctgatggagcccgtgctgctgcctaaggaggcccctagagtcgctcgtcccgaacgacctcgtgcagacaccggacacgcctttctggccaaaccccctgccagatccggactcgagcccgcaagcagcccgtccaaaggaagcgagccaaggccactcgttccgcctgtaagtggacacgccacaatagcacggactccggcaaaaaacttggccccacatcacgcgagtcccgatcctccagctcctccagcttcggccagtgatccccatcgagagaaaacccaatctaagcccttctcaattcaagaactcgagctccggtcactagggtatcacggatcttcttactctcctgagggcgtcgagccagtgtcccccgtgagctctccttctctaacccacgataaggggcttccgaagcacctcgaggaactcgataagtcacatctggagggagaactgaggccaaaacagcccggtcccgtgaagttggggggagaagcggcacacctgccccatctacggccactgcccgagagccagccaagttcttcgcctcttctgcagactgctccaggggtgaagggccaccaacgggtggtaacccttgcccagcacatcagtgaggtgattactcaagactatactcggcatcatcctcaacaattgtccgccccattacctgccccattgtattcatttccgggagcaagctgtcccgtgctggatctgagaagacctcccagcgatctgtacctaccaccccctgatcatggcgcaccagccagaggatccccacacagtgagggcggaaaacggagcccagagcccaataagacttccgtccttgggggtggcgaagacggcatagagccagtaagtcccccagaggggatgacggagccagggcactcacgctcggccgtgtaccccttgttgtaccgtgatggagagcaaaccgagccctctagaatgggatctaagagccccggaaacacgagtcagccgccagcgttcttcagtaaattgactgagagcaacagcgctatggtgaagtcaaagaaacaagaaataaataagaaactgaacacccataatcggaacgagcctgaatacaatattagccaaccgggtaccgagattttcaatatgccagctataaccggcaccggactcatgacgtacaggtctcaggccgtgcaggaacacgcaagcacgaatatgggattggaagccattataaggaaggctctcatgggcaagtacgatcagtgggaggaaagcccacctcttagtgctaatgccttcaatcccctcaacgcgtccgcctctctgcctgccgcaatgccaattacagcggctgacggtaggtccgatcataccttgaccagccccggtggcggaggaaaagctaaagtctcaggtcgtccttcctctagaaaagccaaaagtcccgctccgggtctcgcctccggtgacaggcccccttctgtgagttctgtgcattcggagggcgactgtaacagaagaaccccactcacgaatagagtctgggaggatcggcctagttcagctggatcgacgcccttcccttataacccgttgattatgagactgcaggccggagtaatggccagtcctccccctccagggcttccagctggcagtggtcccttggctggtcctcaccatgcatgggatgaggaaccaaagcccctgttgtgtagccagtacgagactttaagcgatagcgaata

SEQ ID NO: 82304 - DNA, 1821 bp, Artificial Sequence
  derived and/or modified sequence
ctgcaatccggtgctactcattgcccgttaggagggacactcgacggcgtttaccccaccctgatggaacccgttctgcttccgaaggaggcacctcgcgtcgcaagaccagaacggccacgggcagatacgggccatgcctttctggcaaagccaccggcaagatccgggctggaacccgcatcttcgccctcgaaaggatcggagcctagacccctggtgccacctgtgtcaggacatgccactatcgcacgaacacccgcaaaaaatttagccccacatcacgcttctcctgacccccctgcccctcccgctagcgcaagcgacccccatcgcgagaagacacagagcaaacctttcagcattcaagagcttgaactgagatccctgggctaccatggctcctcctacagccccgaaggtgtggagcccgtgtctcctgtctccagcccctcactaacacatgacaaaggtttgcccaaacatctcgaggaactggataaatcccatctggagggggagcttcgaccaaaacagccaggccctgtgaagcttggaggcgaggcagcacaccttccccatctgcggccattgcctgaatcgcaaccctcaagctcgcccctgctgcaaacagccccaggtgtgaagggccatcagcgggtcgtgaccctagcccagcacatttccgaggtgattacacaggattataccagacaccatcctcagcagctgagcgcaccgctgcctgcgccattgtactctttccctggagccagctgccccgttctggacttgagaaggccaccatcagatctgtatctgccacctccagaccatggtgctcccgctcggggaagcccccattcagagggaggaaaaaggtctccggagcccaacaagacttcggtgttaggaggaggagaggacggcatcgagcccgtgtccccacctgaagggatgaccgaaccaggacatagccgctcagccgtgtatccactcctgtatcgcgatggcgaacaaacagagcccagccggatggggtccaagagcccaggcaacacttcgcagccccctgcgttcttcagcaaattgaccgagagcaacagcgctatggtgaaatcaaaaaagcaggagattaataaaaagctgaatacccacaatcggaacgagcccgaatacaatatctcacagccgggaacagagatcttcaacatgcccgctataacaggaacaggactcatgacgtaccggtcccaagcagtccaagagcacgcatccaccaacatgggcctagaggccatcatacgaaaggctctgatgggcaagtacgatcagtgggaggaatctcctccactcagcgccaacgcgtttaatcctctgaatgcatcggcatctctgcctgcagccatgcccataactgctgcagacggacgcagcgaccacactctaacctctccaggtggcggtggcaaagccaaagtgtccggaaggcccagctcccgaaaggcaaaatcgcctgctcccggactagcgtcgggcgaccgccctcccagtgtttccagcgtgcatagtgaaggcgactgtaacaggaggacacctcttactaatagagtgtgggaggacagaccttccagtgcagggagcaccccttttccttataaccctttgatcatgaggctgcaagctggtgtcatggcttcccctccaccccctgggcttcccgcagggagcggcccactcgctggaccccaccatgcctgggacgaggagcctaagccattgctttgttcccagtatgagacgctgtccgattccgaatag

SEQ ID NO: 82305 - DNA, 7566 bp, Artificial Sequence
  derived and/or modified sequence
atgagcggcagcacccagcccgtggcccagacctggagagccaccgagcccagataccccccccacagcctgagctaccccgtgcagatcgccagaacccacaccgacgtgggcctgctggagtaccagcaccacagcagagactacgccagccacctgagccccggcagcatcatccagccccagagaagaagacccagcctgctgagcgagttccagcccggcaacgagagaagccaggagctgcacctgagacccgagagccacagctacctgcccgagctgggcaagagcgagatggagttcatcgagagcaagagacccagactggagctgctgcccgaccccctgctgagacccagccccctgctggccaccggccagcccgccggcagcgaggacctgaccaaggacagaagcctgaccggcaagctggagcccgtgagcccccccagccccccccacaccgaccccgagctggagctggtgccccccagactgagcaaggaggagctgatccagaacatggacagagtggacagagagatcaccatggtggagcagcagatcagcaagctgaagaagaagcagcagcagctggaggaggaggccgccaagccccccgagcccgagaagcccgtgagccccccccccatcgagagcaagcacagaagcctggtgcagatcatctacgacgagaacagaaagaaggccgaggccgcccacagaatcctggagggcctgggcccccaggtggagctgcccctgtacaaccagcccagcgacaccagacagtaccacgagaacatcaagatcaaccaggccatgagaaagaagctgatcctgtacttcaagagaagaaaccacgccagaaagcagtgggagcagaagttctgccagagatacgaccagctgatggaggcctgggagaagaaggtggagagaatcgagaacaaccccagaagaagagccaaggagagcaaggtgagagagtactacgagaagcagttccccgagatcagaaagcagagagagctgcaggagagaatgcagagcagagtgggccagagaggcagcggcctgagcatgagcgccgccagaagcgagcacgaggtgagcgagatcatcgacggcctgagcgagcaggagaacctggagaagcagatgagacagctggccgtgatcccccccatgctgtacgacgccgaccagcagagaatcaagttcatcaacatgaacggcctgatggccgaccccatgaaggtgtacaaggacagacaggtgatgaacatgtggagcgagcaggagaaggagaccttcagagagaagttcatgcagcaccccaagaacttcggcctgatcgccagcttcctggagagaaagaccgtggccgagtgcgtgctgtactactacctgaccaagaagaacgagaactacaagagcctggtgagaagaagctacagaagaagaggcaagagccagcagcagcagcagcagcagcagcagcagcagcagcagcagcagcagcagcccatgcccagaagcagccaggaggagaaggacgagaaggagaaggagaaggaggccgagaaggaggaggagaagcccgaggtggagaacgacaaggaggacctgctgaaggagaagaccgacgacaccagcggcgaggacaacgacgagaaggaggccgtggccagcaagggcagaaagaccgccaacagccagggcagaagaaagggcagaatcaccagaagcatggccaacgaggccaacagcgaggaggccatcaccccccagcagagcgccgagctggccagcatggagctgaacgagagcagcagatggaccgaggaggagatggagaccgccaagaagggcctgctggagcacggcagaaactggagcgccatcgccagaatggtgggcagcaagaccgtgagccagtgcaagaacttctacttcaactacaagaagagacagaacctggacgagatcctgcagcagcacaagctgaagatggagaaggagagaaacgccagaagaaagaagaagaaggcccccgccgccgccagcgaggaggccgccttcccccccgtggtggaggacgaggagatggaggccagcggcgtgagcggcaacgaggaggagatggtggaggaggccgaggccctgcacgccagcggcaacgaggtgcccagaggcgagtgcagcggccccgccaccgtgaacaacagcagcgacaccgagagcatccccagcccccacaccgaggccgccaaggacaccggccagaacggccccaagccccccgccaccctgggcgccgacggccccccccccggcccccccacccccccccccgaggacatccccgcccccaccgagcccacccccgccagcgaggccaccggcgcccccacccccccccccgccccccccagccccagcgcccccccccccgtggtgcccaaggaggagaaggaggaggagaccgccgccgccccccccgtggaggagggcgaggagcagaagccccccgccgccgaggagctggccgtggacaccggcaaggccgaggagcccgtgaagagcgagtgcaccgaggaggccgaggagggccccgccaagggcaaggacgccgaggccgccgaggccaccgccgagggcgccctgaaggccgagaagaaggagggcggcagcggcagagccaccaccgccaagagcagcggcgccccccaggacagcgacagcagcgccacctgcagcgccgacgaggtggacgaggccgagggcggcgacaagaacagactgctgagccccagacccagcctgctgacccccaccggcgaccccagagccaacgccagcccccagaagcccctggacctgaagcagctgaagcagagagccgccgccatcccccccatcgtgaccaaggtgcacgagccccccagagaggacgccgcccccaccaagcccgccccccccgcccccccccccccccagaacctgcagcccgagagcgacgccccccagcagcccggcagcagccccagaggcaagagcagaagccccgccccccccgccgacaaggaggccgagaagcccgtgttcttccccgccttcgccgccgaggcccagaagctgcccggcgaccccccctgctggaccagcggcctgcccttccccgtgccccccagagaggtgatcaaggccagcccccacgcccccgaccccagcgccttcagctacgccccccccggccaccccctgcccctgggcctgcacgacaccgccagacccgtgctgcccagaccccccaccatcagcaaccccccccccctgatcagcagcgccaagcaccccagcgtgctggagagacagatcggcgccatcagccagggcatgagcgtgcagctgcacgtgccctacagcgagcacgccaaggcccccgtgggccccgtgaccatgggcctgcccctgcccatggaccccaagaagctggcccccttcagcggcgtgaagcaggagcagctgagccccagaggccaggccggcccccccgagagcctgggcgtgcccaccgcccaggaggccagcgtgctgagaggcaccgccctgggcagcgtgcccggcggcagcatcaccaagggcatccccagcaccagagtgcccagcgacagcgccatcacctacagaggcagcatcacccacggcacccccgccgacgtgctgtacaagggcaccatcaccagaatcatcggcgaggacagccccagcagactggacagaggcagagaggacagcctgcccaagggccacgtgatctacgagggcaagaagggccacgtgctgagctacgagggcggcatgagcgtgacccagtgcagcaaggaggacggcagaagcagcagcggccccccccacgagaccgccgcccccaagagaacctacgacatgatggagggcagagtgggcagagccatcagcagcgccagcatcgagggcctgatgggcagagccatcccccccgagagacacagcccccaccacctgaaggagcagcaccacatcagaggcagcatcacccagggcatccccagaagctacgtggaggcccaggaggactacctgagaagagaggccaagctgctgaagagagagggcaccccccccccccccccccccagcagagacctgaccgaggcctacaagacccaggccctgggccccctgaagctgaagcccgcccacgagggcctggtggccaccgtgaaggaggccggcagaagcatccacgagatccccagagaggagctgagacacacccccgagctgcccctggcccccagacccctgaaggagggcagcatcacccagggcacccccctgaagtacgacaccggcgccagcaccaccggcagcaagaagcacgacgtgagaagcctgatcggcagccccggcagaaccttcccccccgtgcaccccctggacgtgatggccgacgccagagccctggagagagcctgctacgaggagagcctgaagagcagacccggcaccgccagcagcagcggcggcagcatcgccagaggcgcccccgtgatcgtgcccgagctgggcaagcccagacagagccccctgacctacgaggaccacggcgcccccttcgccggccacctgcccagaggcagccccgtgaccaccagagagcccacccccagactgcaggagggcagcctgagcagcagcaaggccagccaggacagaaagctgaccagcacccccagagagatcgccaagagcccccacagcaccgtgcccgagcaccacccccaccccatcagcccctacgagcacctgctgagaggcgtgagcggcgtggacctgtacagaagccacatccccctggccttcgaccccaccagcatccccagaggcatccccctggacgccgccgccgcctactacctgcccagacacctggcccccaaccccacctacccccacctgtaccccccctacctgatcagaggctaccccgacaccgccgccctggagaacagacagaccatcatcaacgactacatcaccagccagcagatgcaccacaacgccgccaccgccatggcccagagagccgacatgctgagaggcctgagccccagagagagcagcctggccctgaactacgccgccggccccagaggcatcatcgacctgagccaggtgccccacctgcccgtgctggtgccccccacccccggcacccccgccaccgccatggacagactggcctacctgcccaccgccccccagcccttcagcagcagacacagcagcagccccctgagccccggcggccccacccacctgaccaagcccaccaccaccagcagcagcgagagagagagagacagagacagagagagagacagagacagagagagagagaagagcatcctgaccagcaccaccaccgtggagcacgcccccatctggagacccggcaccgagcagagcagcggcagcagcggcggcggcggcggcagcagcagcagacccgccagccacagccacgcccaccagcacagccccatcagccccagaacccaggacgccctgcagcagagacccagcgtgctgcacaacaccggcatgaagggcatcatcaccgccgtggagcccagcacccccaccgtgctgagaagcaccagcaccagcagccccgtgagacccgccgccaccttcccccccgccacccactgccccctgggcggcaccctggacggcgtgtaccccaccctgatggagcccgtgctgctgcccaaggaggcccccagagtggccagacccgagagacccagagccgacaccggccacgccttcctggccaagccccccgccagaagcggcctggagcccgccagcagccccagcaagggcagcgagcccagacccctggtgccccccgtgagcggccacgccaccatcgccagaacccccgccaagaacctggccccccaccacgccagccccgacccccccgccccccccgccagcgccagcgacccccacagagagaagacccagagcaagcccttcagcatccaggagctggagctgagaagcctgggctaccacggcagcagctacagccccgagggcgtggagcccgtgagccccgtgagcagccccagcctgacccacgacaagggcctgcccaagcacctggaggagctggacaagagccacctggagggcgagctgagacccaagcagcccggccccgtgaagctgggcggcgaggccgcccacctgccccacctgagacccctgcccgagagccagcccagcagcagccccctgctgcagaccgcccccggcgtgaagggccaccagagagtggtgaccctggcccagcacatcagcgaggtgatcacccaggactacaccagacaccacccccagcagctgagcgcccccctgcccgcccccctgtacagcttccccggcgccagctgccccgtgctggacctgagaagaccccccagcgacctgtacctgcccccccccgaccacggcgcccccgccagaggcagcccccacagcgagggcggcaagagaagccccgagcccaacaagaccagcgtgctgggcggcggcgaggacggcatcgagcccgtgagcccccccgagggcatgaccgagcccggccacagcagaagcgccgtgtaccccctgctgtacagagacggcgagcagaccgagcccagcagaatgggcagcaagagccccggcaacaccagccagccccccgccttcttcagcaagctgaccgagagcaacagcgccatggtgaagagcaagaagcaggagatcaacaagaagctgaacacccacaacagaaacgagcccgagtacaacatcagccagcccggcaccgagatcttcaacatgcccgccatcaccggcaccggcctgatgacctacagaagccaggccgtgcaggagcacgccagcaccaacatgggcctggaggccatcatcagaaaggccctgatgggcaagtacgaccagtgggaggagagcccccccctgagcgccaacgccttcaaccccctgaacgccagcgccagcctgcccgccgccatgcccatcaccgccgccgacggcagaagcgaccacaccctgaccagccccggcggcggcggcaaggccaaggtgagcggcagacccagcagcagaaaggccaagagccccgcccccggcctggccagcggcgacagaccccccagcgtgagcagcgtgcacagcgagggcgactgcaacagaagaacccccctgaccaacagagtgtgggaggacagacccagcagcgccggcagcacccccttcccctacaaccccctgatcatgagactgcaggccggcgtgatggccagcccccccccccccggcctgcccgccggcagcggccccctggccggcccccaccacgcctgggacgaggagcccaagcccctgctgtgcagccagtacgagaccctgagcgacagcgagtag

SEQ ID NO: 82306 - DNA, 6228 bp, Artificial Sequence
  derived and/or modified sequence
atgtggagcgagcaggagaaggagaccttcagagagaagttcatgcagcaccccaagaacttcggcctgatcgccagcttcctggagagaaagaccgtggccgagtgcgtgctgtactactacctgaccaagaagaacgagaactacaagagcctggtgagaagaagctacagaagaagaggcaagagccagcagcagcagcagcagcagcagcagcagcagcagcagcagcagcagcagcccatgcccagaagcagccaggaggagaaggacgagaaggagaaggagaaggaggccgagaaggaggaggagaagcccgaggtggagaacgacaaggaggacctgctgaaggagaagaccgacgacaccagcggcgaggacaacgacgagaaggaggccgtggccagcaagggcagaaagaccgccaacagccagggcagaagaaagggcagaatcaccagaagcatggccaacgaggccaacagcgaggaggccatcaccccccagcagagcgccgagctggccagcatggagctgaacgagagcagcagatggaccgaggaggagatggagaccgccaagaagggcctgctggagcacggcagaaactggagcgccatcgccagaatggtgggcagcaagaccgtgagccagtgcaagaacttctacttcaactacaagaagagacagaacctggacgagatcctgcagcagcacaagctgaagatggagaaggagagaaacgccagaagaaagaagaagaaggcccccgccgccgccagcgaggaggccgccttcccccccgtggtggaggacgaggagatggaggccagcggcgtgagcggcaacgaggaggagatggtggaggaggccgaggccaccgtgaacaacagcagcgacaccgagagcatccccagcccccacaccgaggccgccaaggacaccggccagaacggccccaagccccccgccaccctgggcgccgacggccccccccccggcccccccacccccccccccgaggacatccccgcccccaccgagcccacccccgccagcgaggccaccggcgcccccacccccccccccgccccccccagccccagcgcccccccccccgtggtgcccaaggaggagaaggaggaggagaccgccgccgccccccccgtggaggagggcgaggagcagaagccccccgccgccgaggagctggccgtggacaccggcaaggccgaggagcccgtgaagagcgagtgcaccgaggaggccgaggagggccccgccaagggcaaggacgccgaggccgccgaggccaccgccgagggcgccctgaaggccgagaagaaggagggcggcagcggcagagccaccaccgccaagagcagcggcgccccccaggacagcgacagcagcgccacctgcagcgccgacgaggtggacgaggccgagggcggcgacaagaacagactgctgagccccagacccagcctgctgacccccaccggcgaccccagagccaacgccagcccccagaagcccctggacctgaagcagctgaagcagagagccgccgccatcccccccatccaggtgaccaaggtgcacgagccccccagagaggacgccgcccccaccaagcccgccccccccgcccccccccccccccagaacctgcagcccgagagcgacgccccccagcagcccggcagcagccccagaggcaagagcagaagccccgccccccccgccgacaaggaggccgagaagcccgtgttcttccccgccttcgccgccgaggcccagaagctgcccggcgaccccccctgctggaccagcggcctgcccttccccgtgccccccagagaggtgatcaaggccagcccccacgcccccgaccccagcgccttcagctacgccccccccggccaccccctgcccctgggcctgcacgacaccgccagacccgtgctgcccagaccccccaccatcagcaaccccccccccctgatcagcagcgccaagcaccccagcgtgctggagagacagatcggcgccatcagccagggcatgagcgtgcagctgcacgtgccctacagcgagcacgccaaggcccccgtgggccccgtgaccatgggcctgcccctgcccatggaccccaagaagctggcccccttcagcggcgtgaagcaggagcagctgagccccagaggccaggccggcccccccgagagcctgggcgtgcccaccgcccaggaggccagcgtgctgagaggcaccgccctgggcagcgtgcccggcggcagcatcaccaagggcatccccagcaccagagtgcccagcgacagcgccatcacctacagaggcagcatcacccacggcacccccgccgacgtgctgtacaagggcaccatcaccagaatcatcggcgaggacagccccagcagactggacagaggcagagaggacagcctgcccaagggccacgtgatctacgagggcaagaagggccacgtgctgagctacgagggcggcatgagcgtgacccagtgcagcaaggaggacggcagaagcagcagcggccccccccacgagaccgccgcccccaagagaacctacgacatgatggagggcagagtgggcagagccatcagcagcgccagcatcgagggcctgatgggcagagccatcccccccgagagacacagcccccaccacctgaaggagcagcaccacatcagaggcagcatcacccagggcatccccagaagctacgtggaggcccaggaggactacctgagaagagaggccaagctgctgaagagagagggcaccccccccccccccccccccagcagagacctgaccgaggcctacaagacccaggccctgggccccctgaagctgaagcccgcccacgagggcctggtggccaccgtgaaggaggccggcagaagcatccacgagatccccagagaggagctgagacacacccccgagctgcccctggcccccagacccctgaaggagggcagcatcacccagggcacccccctgaagtacgacaccggcgccagcaccaccggcagcaagaagcacgacgtgagaagcctgatcggcagccccggcagaaccttcccccccgtgcaccccctggacgtgatggccgacgccagagccctggagagagcctgctacgaggagagcctgaagagcagacccggcaccgccagcagcagcggcggcagcatcgccagaggcgcccccgtgatcgtgcccgagctgggcaagcccagacagagccccctgacctacgaggaccacggcgcccccttcgccggccacctgcccagaggcagccccgtgaccaccagagagcccacccccagactgcaggagggcagcctgagcagcagcaaggccagccaggacagaaagctgaccagcacccccagagagatcgccaagagcccccacagcaccgtgcccgagcaccacccccaccccatcagcccctacgagcacctgctgagaggcgtgagcggcgtggacctgtacagaagccacatccccctggccttcgaccccaccagcatccccagaggcatccccctggacgccgccgccgcctactacctgcccagacacctggcccccaaccccacctacccccacctgtaccccccctacctgatcagaggctaccccgacaccgccgccctggagaacagacagaccatcatcaacgactacatcaccagccagcagatgcaccacaacgccgccaccgccatggcccagagagccgacatgctgagaggcctgagccccagagagagcagcctggccctgaactacgccgccggccccagaggcatcatcgacctgagccaggtgccccacctgcccgtgctggtgccccccacccccggcacccccgccaccgccatggacagactggcctacctgcccaccgccccccagcccttcagcagcagacacagcagcagccccctgagccccggcggccccacccacctgaccaagcccaccaccaccagcagcagcgagagagagagagacagagacagagagagagacagagacagagagagagagaagagcatcctgaccagcaccaccaccgtggagcacgcccccatctggagacccggcaccgagcagagcagcggcagcagcggcggcggcggcggcagcagcagcagacccgccagccacagccacgcccaccagcacagccccatcagccccagaacccaggacgccctgcagcagagacccagcgtgctgcacaacaccggcatgaagggcatcatcaccgccgtggagcccagcacccccaccgtgctgagaagcaccagcaccagcagccccgtgagacccgccgccaccttcccccccgccacccactgccccctgggcggcaccctggacggcgtgtaccccaccctgatggagcccgtgctgctgcccaaggaggcccccagagtggccagacccgagagacccagagccgacaccggccacgccttcctggccaagccccccgccagaagcggcctggagcccgccagcagccccagcaagggcagcgagcccagacccctggtgccccccgtgagcggccacgccaccatcgccagaacccccgccaagaacctggccccccaccacgccagccccgacccccccgccccccccgccagcgccagcgacccccacagagagaagacccagagcaagcccttcagcatccaggagctggagctgagaagcctgggctaccacggcagcagctacagccccgagggcgtggagcccgtgagccccgtgagcagccccagcctgacccacgacaagggcctgcccaagcacctggaggagctggacaagagccacctggagggcgagctgagacccaagcagcccggccccgtgaagctgggcggcgaggccgcccacctgccccacctgagacccctgcccgagagccagcccagcagcagccccctgctgcagaccgcccccggcgtgaagggccaccagagagtggtgaccctggcccagcacatcagcgaggtgatcacccaggactacaccagacaccacccccagcagctgagcgcccccctgcccgcccccctgtacagcttccccggcgccagctgccccgtgctggacctgagaagaccccccagcgacctgtacctgcccccccccgaccacggcgcccccgccagaggcagcccccacagcgagggcggcaagagaagccccgagcccaacaagaccagcgtgctgggcggcggcgaggacggcatcgagcccgtgagcccccccgagggcatgaccgagcccggccacagcagaagcgccgtgtaccccctgctgtacagagacggcgagcagaccgagcccagcagaatgggcagcaagagccccggcaacaccagccagccccccgccttcttcagcaagctgaccgagagcaacagcgccatggtgaagagcaagaagcaggagatcaacaagaagctgaacacccacaacagaaacgagcccgagtacaacatcagccagcccggcaccgagatcttcaacatgcccgccatcaccggcaccggcctgatgacctacagaagccaggccgtgcaggagcacgccagcaccaacatgggcctggaggccatcatcagaaaggccctgatgggcaagtacgaccagtgggaggagagcccccccctgagcgccaacgccttcaaccccctgaacgccagcgccagcctgcccgccgccatgcccatcaccgccgccgacggcagaagcgaccacaccctgaccagccccggcggcggcggcaaggccaaggtgagcggcagacccagcagcagaaaggccaagagccccgcccccggcctggccagcggcgacagaccccccagcgtgagcagcgtgcacagcgagggcgactgcaacagaagaacccccctgaccaacagagtgtgggaggacagacccagcagcgccggcagcacccccttcccctacaaccccctgatcatgagactgcaggccggcgtgatggccagcccccccccccccggcctgcccgccggcagcggccccctggccggcccccaccacgcctgggacgaggagcccaagcccctgctgtgcagccagtacgagaccctgagcgacagcgagtag

SEQ ID NO: 82307 - DNA, 7515 bp, Artificial Sequence
  derived and/or modified sequence
atgagcggcagcacccagcccgtggcccagacctggagagccaccgagcccagataccccccccacagcctgagctaccccgtgcagatcgccagaacccacaccgacgtgggcctgctggagtaccagcaccacagcagagactacgccagccacctgagccccggcagcatcatccagccccagagaagaagacccagcctgctgagcgagttccagcccggcaacgagagaagccaggagctgcacctgagacccgagagccacagctacctgcccgagctgggcaagagcgagatggagttcatcgagagcaagagacccagactggagctgctgcccgaccccctgctgagacccagccccctgctggccaccggccagcccgccggcagcgaggacctgaccaaggacagaagcctgaccggcaagctggagcccgtgagcccccccagccccccccacaccgaccccgagctggagctggtgccccccagactgagcaaggaggagctgatccagaacatggacagagtggacagagagatcaccatggtggagcagcagatcagcaagctgaagaagaagcagcagcagctggaggaggaggccgccaagccccccgagcccgagaagcccgtgagccccccccccatcgagagcaagcacagaagcctggtgcagatcatctacgacgagaacagaaagaaggccgaggccgcccacagaatcctggagggcctgggcccccaggtggagctgcccctgtacaaccagcccagcgacaccagacagtaccacgagaacatcaagatcaaccaggccatgagaaagaagctgatcctgtacttcaagagaagaaaccacgccagaaagcagtgggagcagaagttctgccagagatacgaccagctgatggaggcctgggagaagaaggtggagagaatcgagaacaaccccagaagaagagccaaggagagcaaggtgagagagtactacgagaagcagttccccgagatcagaaagcagagagagctgcaggagagaatgcagagagtgggccagagaggcagcggcctgagcatgagcgccgccagaagcgagcacgaggtgagcgagatcatcgacggcctgagcgagcaggagaacctggagaagcagatgagacagctggccgtgatcccccccatgctgtacgacgccgaccagcagagaatcaagttcatcaacatgaacggcctgatggccgaccccatgaaggtgtacaaggacagacaggtgatgaacatgtggagcgagcaggagaaggagaccttcagagagaagttcatgcagcaccccaagaacttcggcctgatcgccagcttcctggagagaaagaccgtggccgagtgcgtgctgtactactacctgaccaagaagaacgagaactacaagagcctggtgagaagaagctacagaagaagaggcaagagccagcagcagcagcagcagcagcagcagcagcagcagcagcagcagcagcagcccatgcccagaagcagccaggaggagaaggacgagaaggagaaggagaaggaggccgagaaggaggaggagaagcccgaggtggagaacgacaaggaggacctgctgaaggagaagaccgacgacaccagcggcgaggacaacgacgagaaggaggccgtggccagcaagggcagaaagaccgccaacagccagggcagaagaaagggcagaatcaccagaagcatggccaacgaggccaacagcgaggaggccatcaccccccagcagagcgccgagctggccagcatggagctgaacgagagcagcagatggaccgaggaggagatggagaccgccaagaagggcctgctggagcacggcagaaactggagcgccatcgccagaatggtgggcagcaagaccgtgagccagtgcaagaacttctacttcaactacaagaagagacagaacctggacgagatcctgcagcagcacaagctgaagatggagaaggagagaaacgccagaagaaagaagaagaaggcccccgccgccgccagcgaggaggccgccttcccccccgtggtggaggacgaggagatggaggccagcggcgtgagcggcaacgaggaggagatggtggaggaggccgaggccaccgtgaacaacagcagcgacaccgagagcatccccagcccccacaccgaggccgccaaggacaccggccagaacggccccaagccccccgccaccctgggcgccgacggccccccccccggcccccccacccccccccccgaggacatccccgcccccaccgagcccacccccgccagcgaggccaccggcgcccccacccccccccccgccccccccagccccagcgcccccccccccgtggtgcccaaggaggagaaggaggaggagaccgccgccgccccccccgtggaggagggcgaggagcagaagccccccgccgccgaggagctggccgtggacaccggcaaggccgaggagcccgtgaagagcgagtgcaccgaggaggccgaggagggccccgccaagggcaaggacgccgaggccgccgaggccaccgccgagggcgccctgaaggccgagaagaaggagggcggcagcggcagagccaccaccgccaagagcagcggcgccccccaggacagcgacagcagcgccacctgcagcgccgacgaggtggacgaggccgagggcggcgacaagaacagactgctgagccccagacccagcctgctgacccccaccggcgaccccagagccaacgccagcccccagaagcccctggacctgaagcagctgaagcagagagccgccgccatcccccccatccaggtgaccaaggtgcacgagccccccagagaggacgccgcccccaccaagcccgccccccccgcccccccccccccccagaacctgcagcccgagagcgacgccccccagcagcccggcagcagccccagaggcaagagcagaagccccgccccccccgccgacaaggaggccgagaagcccgtgttcttccccgccttcgccgccgaggcccagaagctgcccggcgaccccccctgctggaccagcggcctgcccttccccgtgccccccagagaggtgatcaaggccagcccccacgcccccgaccccagcgccttcagctacgccccccccggccaccccctgcccctgggcctgcacgacaccgccagacccgtgctgcccagaccccccaccatcagcaaccccccccccctgatcagcagcgccaagcaccccagcgtgctggagagacagatcggcgccatcagccagggcatgagcgtgcagctgcacgtgccctacagcgagcacgccaaggcccccgtgggccccgtgaccatgggcctgcccctgcccatggaccccaagaagctggcccccttcagcggcgtgaagcaggagcagctgagccccagaggccaggccggcccccccgagagcctgggcgtgcccaccgcccaggaggccagcgtgctgagaggcaccgccctgggcagcgtgcccggcggcagcatcaccaagggcatccccagcaccagagtgcccagcgacagcgccatcacctacagaggcagcatcacccacggcacccccgccgacgtgctgtacaagggcaccatcaccagaatcatcggcgaggacagccccagcagactggacagaggcagagaggacagcctgcccaagggccacgtgatctacgagggcaagaagggccacgtgctgagctacgagggcggcatgagcgtgacccagtgcagcaaggaggacggcagaagcagcagcggccccccccacgagaccgccgcccccaagagaacctacgacatgatggagggcagagtgggcagagccatcagcagcgccagcatcgagggcctgatgggcagagccatcccccccgagagacacagcccccaccacctgaaggagcagcaccacatcagaggcagcatcacccagggcatccccagaagctacgtggaggcccaggaggactacctgagaagagaggccaagctgctgaagagagagggcaccccccccccccccccccccagcagagacctgaccgaggcctacaagacccaggccctgggccccctgaagctgaagcccgcccacgagggcctggtggccaccgtgaaggaggccggcagaagcatccacgagatccccagagaggagctgagacacacccccgagctgcccctggcccccagacccctgaaggagggcagcatcacccagggcacccccctgaagtacgacaccggcgccagcaccaccggcagcaagaagcacgacgtgagaagcctgatcggcagccccggcagaaccttcccccccgtgcaccccctggacgtgatggccgacgccagagccctggagagagcctgctacgaggagagcctgaagagcagacccggcaccgccagcagcagcggcggcagcatcgccagaggcgcccccgtgatcgtgcccgagctgggcaagcccagacagagccccctgacctacgaggaccacggcgcccccttcgccggccacctgcccagaggcagccccgtgaccaccagagagcccacccccagactgcaggagggcagcctgagcagcagcaaggccagccaggacagaaagctgaccagcacccccagagagatcgccaagagcccccacagcaccgtgcccgagcaccacccccaccccatcagcccctacgagcacctgctgagaggcgtgagcggcgtggacctgtacagaagccacatccccctggccttcgaccccaccagcatccccagaggcatccccctggacgccgccgccgcctactacctgcccagacacctggcccccaaccccacctacccccacctgtaccccccctacctgatcagaggctaccccgacaccgccgccctggagaacagacagaccatcatcaacgactacatcaccagccagcagatgcaccacaacgccgccaccgccatggcccagagagccgacatgctgagaggcctgagccccagagagagcagcctggccctgaactacgccgccggccccagaggcatcatcgacctgagccaggtgccccacctgcccgtgctggtgccccccacccccggcacccccgccaccgccatggacagactggcctacctgcccaccgccccccagcccttcagcagcagacacagcagcagccccctgagccccggcggccccacccacctgaccaagcccaccaccaccagcagcagcgagagagagagagacagagacagagagagagacagagacagagagagagagaagagcatcctgaccagcaccaccaccgtggagcacgcccccatctggagacccggcaccgagcagagcagcggcagcagcggcggcggcggcggcagcagcagcagacccgccagccacagccacgcccaccagcacagccccatcagccccagaacccaggacgccctgcagcagagacccagcgtgctgcacaacaccggcatgaagggcatcatcaccgccgtggagcccagcacccccaccgtgctgagaagcaccagcaccagcagccccgtgagacccgccgccaccttcccccccgccacccactgccccctgggcggcaccctggacggcgtgtaccccaccctgatggagcccgtgctgctgcccaaggaggcccccagagtggccagacccgagagacccagagccgacaccggccacgccttcctggccaagccccccgccagaagcggcctggagcccgccagcagccccagcaagggcagcgagcccagacccctggtgccccccgtgagcggccacgccaccatcgccagaacccccgccaagaacctggccccccaccacgccagccccgacccccccgccccccccgccagcgccagcgacccccacagagagaagacccagagcaagcccttcagcatccaggagctggagctgagaagcctgggctaccacggcagcagctacagccccgagggcgtggagcccgtgagccccgtgagcagccccagcctgacccacgacaagggcctgcccaagcacctggaggagctggacaagagccacctggagggcgagctgagacccaagcagcccggccccgtgaagctgggcggcgaggccgcccacctgccccacctgagacccctgcccgagagccagcccagcagcagccccctgctgcagaccgcccccggcgtgaagggccaccagagagtggtgaccctggcccagcacatcagcgaggtgatcacccaggactacaccagacaccacccccagcagctgagcgcccccctgcccgcccccctgtacagcttccccggcgccagctgccccgtgctggacctgagaagaccccccagcgacctgtacctgcccccccccgaccacggcgcccccgccagaggcagcccccacagcgagggcggcaagagaagccccgagcccaacaagaccagcgtgctgggcggcggcgaggacggcatcgagcccgtgagcccccccgagggcatgaccgagcccggccacagcagaagcgccgtgtaccccctgctgtacagagacggcgagcagaccgagcccagcagaatgggcagcaagagccccggcaacaccagccagccccccgccttcttcagcaagctgaccgagagcaacagcgccatggtgaagagcaagaagcaggagatcaacaagaagctgaacacccacaacagaaacgagcccgagtacaacatcagccagcccggcaccgagatcttcaacatgcccgccatcaccggcaccggcctgatgacctacagaagccaggccgtgcaggagcacgccagcaccaacatgggcctggaggccatcatcagaaaggccctgatgggcaagtacgaccagtgggaggagagcccccccctgagcgccaacgccttcaaccccctgaacgccagcgccagcctgcccgccgccatgcccatcaccgccgccgacggcagaagcgaccacaccctgaccagccccggcggcggcggcaaggccaaggtgagcggcagacccagcagcagaaaggccaagagccccgcccccggcctggccagcggcgacagaccccccagcgtgagcagcgtgcacagcgagggcgactgcaacagaagaacccccctgaccaacagagtgtgggaggacagacccagcagcgccggcagcacccccttcccctacaaccccctgatcatgagactgcaggccggcgtgatggccagcccccccccccccggcctgcccgccggcagcggccccctggccggcccccaccacgcctgggacgaggagcccaagcccctgctgtgcagccagtacgagaccctgagcgacagcgagtag

SEQ ID NO: 82308 - DNA, 1821 bp, Artificial Sequence
  derived and/or modified sequence
ctgcagagcggcgccacccactgccccctgggcggcaccctggacggcgtgtaccccaccctgatggagcccgtgctgctgcccaaggaggcccccagagtggccagacccgagagacccagagccgacaccggccacgccttcctggccaagccccccgccagaagcggcctggagcccgccagcagccccagcaagggcagcgagcccagacccctggtgccccccgtgagcggccacgccaccatcgccagaacccccgccaagaacctggccccccaccacgccagccccgacccccccgccccccccgccagcgccagcgacccccacagagagaagacccagagcaagcccttcagcatccaggagctggagctgagaagcctgggctaccacggcagcagctacagccccgagggcgtggagcccgtgagccccgtgagcagccccagcctgacccacgacaagggcctgcccaagcacctggaggagctggacaagagccacctggagggcgagctgagacccaagcagcccggccccgtgaagctgggcggcgaggccgcccacctgccccacctgagacccctgcccgagagccagcccagcagcagccccctgctgcagaccgcccccggcgtgaagggccaccagagagtggtgaccctggcccagcacatcagcgaggtgatcacccaggactacaccagacaccacccccagcagctgagcgcccccctgcccgcccccctgtacagcttccccggcgccagctgccccgtgctggacctgagaagaccccccagcgacctgtacctgcccccccccgaccacggcgcccccgccagaggcagcccccacagcgagggcggcaagagaagccccgagcccaacaagaccagcgtgctgggcggcggcgaggacggcatcgagcccgtgagcccccccgagggcatgaccgagcccggccacagcagaagcgccgtgtaccccctgctgtacagagacggcgagcagaccgagcccagcagaatgggcagcaagagccccggcaacaccagccagccccccgccttcttcagcaagctgaccgagagcaacagcgccatggtgaagagcaagaagcaggagatcaacaagaagctgaacacccacaacagaaacgagcccgagtacaacatcagccagcccggcaccgagatcttcaacatgcccgccatcaccggcaccggcctgatgacctacagaagccaggccgtgcaggagcacgccagcaccaacatgggcctggaggccatcatcagaaaggccctgatgggcaagtacgaccagtgggaggagagcccccccctgagcgccaacgccttcaaccccctgaacgccagcgccagcctgcccgccgccatgcccatcaccgccgccgacggcagaagcgaccacaccctgaccagccccggcggcggcggcaaggccaaggtgagcggcagacccagcagcagaaaggccaagagccccgcccccggcctggccagcggcgacagaccccccagcgtgagcagcgtgcacagcgagggcgactgcaacagaagaacccccctgaccaacagagtgtgggaggacagacccagcagcgccggcagcacccccttcccctacaaccccctgatcatgagactgcaggccggcgtgatggccagcccccccccccccggcctgcccgccggcagcggccccctggccggcccccaccacgcctgggacgaggagcccaagcccctgctgtgcagccagtacgagaccctgagcgacagcgagtag

SEQ ID NO: 82309 - protein, 613 aa, Artificial Sequence
  derived and/or modified sequence
MGALRPTLLPPSLPLLLLLMLGMGCWAREVLVPEGPLYRVAGTAVSISCNVTGYEGPAQQNFEWFLYRPEAPDTALGIVSTKDTQFSYAVFKSRVVAGEVQVQRLQGDAVVLKIARLQAQDAGIYECHTPSTDTRYLGSYSGKVELRVLPDVLQVSAAPPGPRGRQAPTSPPRMTVHEGQELALGCLARTSTQKHTHLAVSFGRSVPEAPVGRSTLQEVVGIRSDLAVEAGAPYAERLAAGELRLGKEGTDRYRMVVGGAQAGDAGTYHCTAAEWIQDPDGSWAQIAEKRAVLAHVDVQTLSSQLAVTVGPGERRIGPGEPLELLCNVSGALPPAGRHAAYSVGWEMAPAGAPGPGRLVAQLDTEGVGSLGPGYEGRHIAMEKVASRTYRLRLEAARPGDAGTYRCLAKAYVRGSGTRLREAASARSRPLPVHVREEGVVLEAVAWLAGGTVYRGETASLLCNISVRGGPPGLRLAASWWVERPEDGELSSVPAQLVGGVGQDGVAELGVRPGGGPVSVELVGPRSHRLRLHSLGPEDEGVYHCAPSAWVQHADYSWYQAGSARSGPVTVYPYMHALDTLFVPLLVGTGVALVTGATVLGTITCCFMKRLRKR

SEQ ID NO: 82310 - protein, 526 aa, Artificial Sequence
  derived and/or modified sequence
MGALRPTLLPPSLPLLLLLMLGMGCWAREVLVPEGPLYRVAGTAVSISCNVTGYEGPAQQNFEWFLYRPEAPDTALGIVSTKDTQFSYAVFKSRVVAGEVQVQRLQGDAVVLKIARLQAQDAGIYECHTPSTDTRYLGSYSGKVELRVLPDVLQVSAAPPGPRGRQAPTSPPRMTVHEGQELALGCLARTSTQKHTHLAVSFGRSVPEAPVGRSTLQEVVGIRSDLAVEAGAPYAERLAAGELRLGKEGTDRYRMVVGGAQAGDAGTYHCTAAEWIQDPDGSWAQIAEKRAVLAHVDVQTLSSQLAVTVGPGERRIGPGEPLELLCNVSGALPPAGRHAAYSVGWEMAPAGAPGPGRLVAQLDTEGVGSLGPGYEGRHIAMEKVASRTYRLRLEAARPGDAGTYRCLAKAYVRGSGTRLREAASARSRPLPVHVREEGVVLEAVAWLAGGTVYRGETASLLCNISVRGGPPGLRSARSGPVTVYPYMHALDTLFVPLLVGTGVALVTGATVLGTITCCFMKRLRKR

SEQ ID NO: 82311 - DNA, 1842 bp, Artificial Sequence
  derived and/or modified sequence
atgggcgcactaagacccacgctgctgcctccctctcttccattgttacttctgctgatgctaggcatggggtgttgggcacgcgaggttctggtaccagaagggcctctgtacagggtggccggcaccgctgtcagcatttcatgtaatgtgacaggctacgagggccccgcacagcagaacttcgaatggttcctctaccggccggaagctccggacactgcgctgggaattgtcagcacaaaggatacacagttctcttacgccgtcttcaagtcccgggtggtcgctggggaggttcaggtccagcgcttgcaaggtgacgctgtcgtgctcaaaatcgcacgcctgcaggctcaagacgcaggtatatatgagtgtcataccccctccaccgatactcggtatcttggatcttattcaggaaaagttgaactacgcgttttgccagacgtgcttcaggtctctgccgccccacccggcccccggggtagacaggctcctacgtctccgcccaggatgacagtgcatgagggacaggaattggctctgggttgcctagcaaggaccagtactcagaagcatacacacctggccgtctcatttggaagatctgtccctgaggctcctgtaggccgcagtacgctgcaagaggtcgtcgggatccgcagcgatctcgctgtggaggcaggcgccccctatgctgagaggctggcagccggagagttgcggttagggaaagagggaaccgataggtatcggatggttgttggcggggcccaggcaggagacgcagggacttaccactgtacggccgccgagtggatccaggacccagatggcagctgggcacagatagcagagaagcgggcagtgttagctcatgtggatgtccagacactgagctcccaattggcagtcaccgtcggacccggtgagaggagaatcggtccgggggaacctcttgagctcctttgcaacgttagtggggcactaccccctgcagggcgacatgcagcctattcggtgggatgggagatggccccagcaggcgcgcctggtcccggccgactggtcgctcaacttgatactgagggtgtgggttccctcggcccaggctacgagggccgacacattgctatggaaaaggttgccagcagaacctaccgcctgcggctggaagccgcacgaccaggtgacgctgggacttatcgctgtctagctaaggcctatgtccgtgggtcgggaacccgcctccgcgaagcagcttcagcccggtcccgtccactcccagtgcacgtgagagaagagggtgtggtgctcgaagccgtggcctggctggccgggggcactgtgtacagaggcgagactgcatccttgttgtgcaacatcagcgtgcgaggcggcccacctggcctgcgacttgccgcatcctggtgggtagagcgccccgaagacggtgagctttcttcagtcccagcacaacttgtcggaggcgtcgggcaggacggcgtggcagagttaggagtgaggcccggcggcggcccagtctctgtggagctggtgggccctaggtcccatcgcctgcggctccattcactgggacctgaagacgaaggggtgtatcactgcgccccatccgcttgggtgcagcacgccgattattcctggtatcaggcgggcagcgcacggtctggacctgtgaccgtttacccgtacatgcatgctcttgataccctatttgtccctttactggtgggaacaggggtcgccttggtgacaggtgcgacagtcctgggaactatcacctgctgcttcatgaaacgcttgcgcaagcgttag

SEQ ID NO: 82312 - DNA, 1842 bp, Artificial Sequence
  derived and/or modified sequence
atgggggctcttcgtcccactctcctgcccccctctctgccactgctgctgctcctgatgctgggcatggggtgctgggcaagagaggttctggtgcctgagggtccactgtatagagttgctgggaccgccgtgtcaatctcttgcaacgtgacaggttacgaaggtcccgctcagcagaactttgaatggtttttgtacaggcccgaggcacccgatacagccctgggcattgtgtccacaaaggacacccagttttcttacgccgtgtttaaaagccgtgttgttgctggggaagttcaggtgcagaggctgcagggggatgccgtcgtgcttaaaattgcacgcctccaggcccaggacgccggtatctacgaatgccatacgccttctacagatactagatacctggggagctattctggaaaggtggaactccgagtgctaccagacgtgctgcaggtatcggccgccccaccaggacccagggggcgacaggccccaacgtcccctccccggatgacagttcacgaaggtcaagaactggctctggggtgcctcgcacggactagcacccagaagcatacccatctggcagttagctttggccgtagtgtaccagaggcaccagttggaagatcaaccctgcaggaggttgttggaatacggagcgacctcgccgtggaagctggggcaccctatgccgaacggctggcagcgggggaactgcggctgggcaaagaaggtactgatcgctatcggatggtcgtaggaggagcacaggccggcgatgctggaacatatcactgcacagcagctgagtggattcaggatcctgatgggtcttgggctcaaatagccgaaaaaagagcagtgctggctcacgtggatgttcagacgttgtcttcccagttggcagttacggtaggccctggtgagagacgaatcggccctggcgagccactagagttattatgcaatgtgagtggcgctctgccacccgcaggtagacacgcagcctatagtgtgggttgggagatggcccccgccggcgcgccagggcctggtcgcttagtcgcacagctcgacactgaaggagtgggtagtttgggccctggctacgaaggccgacatattgctatggagaaagtagctagtcgcacgtatcgtttacggcttgaggccgccagaccaggcgatgccggaacataccggtgtcttgctaaggcctacgtgcgcggatcaggcactagacttcgggaagctgcttctgctcggtctaggccgctgcccgtacatgtgcgtgaagagggggtcgtgctggaggctgttgcatggcttgccggcggcacagtttatcgaggggaaacagcctccctcctctgtaatatctctgtccgtggagggccacccggactgcgcctagctgcatcatggtgggtggagcgccctgaagatggcgagctgagttccgtgccagctcaacttgtcggcggtgtgggccaggatggtgttgctgaactcggcgtacgcccaggcggcgggcccgtttcggtcgaactagtcggcccgagatctcaccgcctccggcttcactcactcgggcccgaagacgaaggagtataccattgtgctccaagcgcctgggttcagcacgctgactacagctggtatcaggctggtagtgcaagatcgggccccgtcacagtttatccatatatgcatgccctggacacactttttgttcccttgctggttggtaccggagtggcactcgtgactggtgcgactgtgcttggaaccattacctgttgtttcatgaaacgacttcgtaagcgctag

SEQ ID NO: 82313 - DNA, 2343 bp, Artificial Sequence
  derived and/or modified sequence
gccggggcgagaatggtttcagaactgccgagggctggagggaaagcagcgggaggggcggagggaggggattcggcagctccagttcagctcgctcggcgcacccacgcctcgctgccccgcttcctgccctcaacctgggcatgcgccccccacccttccggccccccagaacccgcgccatcccccggagcctccccagagctggccgcgcaggatgggcgccctcaggcccacgctgctgccgccttcgctgccgctgctgctgctgctaatgctaggaatgggatgctgggcccgggaggtgctggtccccgaggggcccttgtaccgcgtggctggcacagctgtctccatctcctgcaatgtgaccggctatgagggccctgcccagcagaacttcgagtggttcctgtataggcccgaggccccagatactgcactgggcattgtcagtaccaaggatacccagttctcctatgctgtcttcaagtcccgagtggtggcgggtgaggtgcaggtgcagcgcctacaaggtgatgccgtggtgctcaagattgcccgcctgcaggcccaggatgccggcatttatgagtgccacaccccctccactgatacccgctacctgggcagctacagcggcaaggtggagctgagagttcttccagatgtcctccaggtgtctgctgcccccccagggccccgaggccgccaggccccaacctcacccccacgcatgacggtgcatgaggggcaggagctggcactgggctgcctggcgaggacaagcacacagaagcacacacacctggcagtgtcctttgggcgatctgtgcccgaggcaccagttgggcggtcaactctgcaggaagtggtgggaatccggtcagacttggccgtggaggctggagctccctatgctgagcgattggctgcaggggagcttcgtctgggcaaggaagggaccgatcggtaccgcatggtagtagggggtgcccaggcaggggacgcaggcacctaccactgcactgccgctgagtggattcaggatcctgatggcagctgggcccagattgcagagaaaagggccgtcctggcccacgtggatgtgcagacgctgtccagccagctggcagtgacagtggggcctggtgaacgtcggatcggcccaggggagcccttggaactgctgtgcaatgtgtcaggggcacttcccccagcaggccgtcatgctgcatactctgtaggttgggagatggcacctgcgggggcacctgggcccggccgcctggtagcccagctggacacagagggtgtgggcagcctgggccctggctatgagggccgacacattgccatggagaaggtggcatccagaacataccggctacggctagaggctgccaggcctggtgatgcgggcacctaccgctgcctcgccaaagcctatgttcgagggtctgggacccggcttcgtgaagcagccagtgcccgttcccggcctctccctgtacatgtgcgggaggaaggtgtggtgctggaggctgtggcatggctagcaggaggcacagtgtaccgcggggagactgcctccctgctgtgcaacatctctgtgcggggtggccccccaggactgcggctggccgccagctggtgggtggagcgaccagaggacggagagctcagctctgtccctgcccagctggtgggtggcgtaggccaggatggtgtggcagagctgggagtccggcctggaggaggccctgtcagcgtagagctggtggggccccgaagccatcggctgagactacacagcttggggcccgaggatgaaggcgtgtaccactgtgcccccagcgcctgggtgcagcatgccgactacagctggtaccaggcgggcagtgcccgctcagggcctgttacagtctacccctacatgcatgccctggacaccctatttgtgcctctgctggtgggtacaggggtggccctagtcactggtgccactgtccttggtaccatcacttgctgcttcatgaagaggcttcgaaaacggtgatcccttactccccaggtcttgcaggtgtcgactgtcttccggcccagctccaagccctcctctggttgcctggacaccctctccctctgtccactcttcctttaatttatttgacctcccactacccagaatgggagacgtgcctccccttccccactccttccctcccaagcccctccctctggccttctgttcttgatctcttagggatcctatagggaggccatttcctgtcctggaattagtttttctaaaatgtgaataaacttgttttataaaaagca

SEQ ID NO: 82314 - DNA, 2366 bp, Artificial Sequence
  derived and/or modified sequence
gccggggcgagaatggtttcagaactgccgagggctggagggaaagcagcgggaggggcggagggaggggattcggcagctccagttcagctcgctcggcgcacccacgcctcgctgccccgcttcctgccctcaacctgggcatgcgccccccacccttccggccccccagaacccgcgccatcccccggagcctccccagagctggccgcgcaggatgggcgccctcaggcccacgctgctgccgccttcgctgccgctgctgctgctgctaatgctaggaatgggatgctgggcccgggaggtgctggtccccgaggggcccttgtaccgcgtggctggcacagctgtctccatctcctgcaatgtgaccggctatgagggccctgcccagcagaacttcgagtggttcctgtataggcccgaggccccagatactgcactgggcattgtcagtaccaaggatacccagttctcctatgctgtcttcaagtcccgagtggtggcgggtgaggtgcaggtgcagcgcctacaaggtgatgccgtggtgctcaagattgcccgcctgcaggcccaggatgccggcatttatgagtgccacaccccctccactgatacccgctacctgggcagctacagcggcaaggtggagctgagagttcttccagatgtcctccaggtgtctgctgcccccccagggccccgaggccgccaggccccaacctcacccccacgcatgacggtgcatgaggggcaggagctggcactgggctgcctggcgaggacaagcacacagaagcacacacacctggcagtgtcctttgggcgatctgtgcccgaggcaccagttgggcggtcaactctgcaggaagtggtgggaatccggtcagacttggccgtggaggctggagctccctatgctgagcgattggctgcaggggagcttcgtctgggcaaggaagggaccgatcggtaccgcatggtagtagggggtgcccaggcaggggacgcaggcacctaccactgcactgccgctgagtggattcaggatcctgatggcagctgggcccagattgcagagaaaagggccgtcctggcccacgtggatgtgcagacgctgtccagccagctggcagtgacagtggggcctggtgaacgtcggatcggcccaggggagcccttggaactgctgtgcaatgtgtcaggggcacttcccccagcaggccgtcatgctgcatactctgtaggttgggagatggcacctgcgggggcacctgggcccggccgcctggtagcccagctggacacagagggtgtgggcagcctgggccctggctatgagggccgacacattgccatggagaaggtggcatccagaacataccggctacggctagaggctgccaggcctggtgatgcgggcacctaccgctgcctcgccaaagcctatgttcgagggtctgggacccggcttcgtgaagcagccagtgcccgttcccggcctctccctgtacatgtgcgggaggaaggtgtggtgctggaggctgtggcatggctagcaggaggcacagtgtaccgcggggagactgcctccctgctgtgcaacatctctgtgcggggtggccccccaggactgcggctggccgccagctggtgggtggagcgaccagaggacggagagctcagctctgtccctgcccagctggtgggtggcgtaggccaggatggtgtggcagagctgggagtccggcctggaggaggccctgtcagcgtagagctggtggggccccgaagccatcggctgagactacacagcttggggcccgaggatgaaggcgtgtaccactgtgcccccagcgcctgggtgcagcatgccgactacagctggtaccaggcgggcagtgcccgctcagggcctgttacagtctacccctacatgcatgccctggacaccctatttgtgcctctgctggtgggtacaggggtggccctagtcactggtgccactgtccttggtaccatcacttgctgcttcatgaagaggcttcgaaaacggtgatcccttactccccagcccacaccgggcacccttttcaggtcttgcaggtgtcgactgtcttccggcccagctccaagccctcctctggttgcctggacaccctctccctctgtccactcttcctttaatttatttgacctcccactacccagaatgggagacgtgcctccccttccccactccttccctcccaagcccctccctctggccttctgttcttgatctcttagggatcctatagggaggccatttcctgtcctggaattagtttttctaaaatgtgaataaacttgttttataaaaagca

SEQ ID NO: 82315 - DNA, 1842 bp, Artificial Sequence
  derived and/or modified sequence
atgggcgccctgcggcccaccctgctgccccccagcctgcccctgctgctgctgctgatgctgggcatgggctgctgggcccgggaggtgctggtgcctgagggccccctgtacagagtggccggcacagctgtgtccatcagctgcaatgtgacaggctatgagggccctgcccagcagaactttgagtggttcctgtacagacctgaggccccagacacagccctgggcatcgtgtccaccaaggacacccagttctcctatgctgtgttcaagagccgggtggtggccggggaggtgcaggtgcagaggctgcagggagatgctgtggtgctgaagatcgcccggctgcaggcccaggatgctggcatctatgagtgccacacccccagcacagacacccgctacctgggcagctacagcggcaaggtggagctgcgggtgctgcctgatgtgctgcaggtgtctgctgcccctcctggcccccggggccggcaggcccccaccagcccccccaggatgacagtgcatgagggccaggagctggccctgggctgcctggcccggaccagcacccagaagcacacccacctggccgtgtcctttggccgctctgtgcctgaggcccctgtgggccgcagcaccctgcaggaggtggtgggcatccgcagtgacctggccgtggaggccggggccccctatgcagagcggctggccgccggggagctgcggctgggcaaggagggcacagaccgctacaggatggtggtgggcggggcccaggccggagatgctggcacctaccactgcacagctgctgagtggatccaggaccctgatggctcctgggcccagattgctgagaagagagctgtgctggcccacgtggatgtgcagaccctgagcagccagctggccgtgacagtgggccctggagagcggcgcatcggccctggagagcccctggagctgctgtgcaatgtgtctggggccctgcccccagctggaagacatgctgcctacagcgtgggctgggagatggccccagctggggcccctggccctggccgcctggtggcccagctggacacagagggcgtgggcagcctgggccctggctatgagggccgccacatcgccatggagaaggtggccagcaggacctaccgcctgcggctggaggccgcccggcctggagatgctggcacctaccgctgcctggccaaggcctacgtgcggggcagcggcacccggctgcgggaggccgccagcgcccggagccggcccctgcctgtgcacgtgcgggaggagggcgtggtgctggaggccgtggcctggctggccggcggcaccgtgtacagaggagaaacagccagcctgctgtgcaacatctctgtgcggggcggccccccaggcctgcggctggccgcctcctggtgggtggagaggccagaagatggagagctgagctctgtgcctgcccagctggtgggcggcgtgggccaggatggagtggccgagctgggcgtgcggcctgggggcggccctgtgtctgtggagctggtgggccccaggagccaccggctgcggctgcacagcctgggcccagaagatgagggcgtgtaccactgtgcccccagcgcctgggtgcagcacgccgactacagctggtaccaggccggcagcgcccggagcggccctgtgacagtgtacccctacatgcacgccctggacaccctgtttgtgcccctgctggtgggcaccggggtggccctggtgactggagccaccgtgctgggcaccatcacctgctgcttcatgaagaggctgaggaagaggtag

SEQ ID NO: 82316 - DNA, 1842 bp, Artificial Sequence
  derived and/or modified sequence
atgggcgccctgcggcccaccctgctgccccccagcctgcccctgctgctgttacttatgctgggcatgggatgctgggcacgcgaagtgttggtccccgagggacccctgtatagagtcgctggaaccgctgtaagtatatcttgtaatgtgacaggctacgaaggtccggcccagcagaactttgagtggttcttatatagaccggaggcccccgacactgctctgggcattgtttccacaaaggacacccagttttcctacgccgtatttaagtcacgagtcgtggccggagaagtgcaggttcagagactgcagggggacgccgtcgtgctcaaaatcgcccgacttcaggcccaggatgccggtatttatgagtgtcatacaccttctacagatacccggtatctgggaagctacagcggtaaggtagagctccgggtcttgccagatgtcttacaggtgagcgctgccccaccgggacccaggggacgccaggcaccaacaagcccaccccgaatgacagtccatgaaggtcaggagcttgccctcgggtgcttggctagaacctctacccagaaacacacacacctggcagtgagcttcggtcgttctgttcctgaggctcccgtgggcaggagtaccttgcaggaagtggttggcatcagatctgacctggccgtcgaggcaggggctccatacgctgagcggctcgctgcgggcgagcttaggttgggcaaagaaggaaccgataggtaccgcatggtggtggggggtgctcaggcgggcgacgcaggcacttaccactgcacagcagccgaatggatccaggaccctgatggctcttgggcacagatcgcggagaagcgggccgttcttgcccatgtcgacgttcaaaccctctctagtcagttagccgtgacagtgggacccggcgaaagacggatcggcccaggcgaacccctggaactgctctgcaatgtgtcaggagcactgccccctgctgggcggcacgctgcatattctgtcgggtgggagatggcacctgccggagcccctggcccgggccgccttgttgcgcaacttgatactgaaggcgtcgggagcctgggtcctgggtacgagggaaggcacatagccatggaaaaggtcgcttcccgaacatatcggcttcgactggaggccgccagaccgggggatgctggcacatacaggtgtctagcaaaggcttatgtcagggggtctgggacccgcctccgcgaagctgcgagcgcacggagccgccctctccccgttcacgttcgggaagaaggcgtggtgctggaagcggtcgcatggcttgcaggcggcaccgtctacaggggtgaaacagcctctctcctgtgtaacataagcgtcagaggcggcccacctgggctccgcctggccgcgtcctggtgggtagaacgccccgaagacggagaactaagcagtgtgcctgcgcagctagtgggtggcgtcggacaggatggcgtcgcagagctcggagttcgccccggaggtggcccggtgtctgtcgaactagtgggcccccgctcccatcgtctgaggttacactctctcggacccgaggacgaaggcgtatatcattgtgctcctagtgcttgggtgcaacatgcagactactcttggtatcaggccggcagcgctcgctctggccctgtgaccgtttacccctacatgcatgctttggatactctgtttgttccccttctcgtgggaaccggagtagcgctcgtcaccggagccactgtcctcggtactatcacatgttgttttatgaagagactaaggaaacgttag

SEQ ID NO: 82317 - DNA, 1842 bp, Artificial Sequence
  derived and/or modified sequence
atgggcgccctgcggcccaccctgctgccccccagcctgcccctgctgttgctgctgatgctcggcatgggatgttgggcccgtgaggtactggtcccagaagggccactctatagggtcgctggtaccgctgtgagcatctcatgcaatgtgaccggatatgagggccccgcccaacagaactttgagtggttcctctacaggcccgaggctccagatacagccctgggaatagtgtccaccaaagacacgcagtttagctacgccgtatttaagtcaagggttgtggccggcgaggtccaggttcagcgtctgcagggtgacgcagtggtactaaaaatcgcccgactgcaagcacaggatgctgggatttatgagtgtcacacaccctccaccgacacacggtacctgggatcatactcaggaaaggtggaactgcgtgtcttacccgacgtgctgcaggtgtcagctgcaccgcctgggccccgagggaggcaagcccctactagtcccccgagaatgacagtacatgagggtcaggaacttgcactgggatgcctcgccaggaccagtacccagaaacacactcatctggctgtctccttcggacgttcagtgcccgaagcgcccgttggccggtccacactgcaagaggtagtggggattcgctccgatctggccgtagaggccggggctccttacgcggaacggttagccgctggggagctgagactgggcaaggaaggcaccgatagataccgtatggtcgtcggaggggcccaggcgggagacgccgggacctatcactgcacagcggccgaatggattcaggaccctgatggaagttgggcccagatcgccgagaaaagggctgtcctcgcccatgtcgacgtgcagactctgtcgagccagctggcagtgaccgtgggcccaggtgagagaaggattggacccggcgaacccttggaattgctatgcaacgtgtcgggtgccctgccccctgctgggcgccatgccgcatacagcgtcggatgggagatggcccctgcaggtgcccccggcccagggcgcctcgtcgcacagctcgacaccgagggggtgggctcgctgggcccgggctatgaaggccgccatatagccatggagaaggtggcgtcacgcacgtaccggctacgcctcgaggccgcacgtcctggcgacgccggtacatacagatgtctggctaaggcttatgtcagagggagtggcacacgattacgggaagctgccagcgctcggtcccggcctcttccggttcacgtaagggaagaaggcgtggtcctggaggcagtggcttggctggcaggaggcaccgtgtacaggggggagacggcgtccctgctatgtaacatcagtgttagggggggtccacccgggctccggctggctgcatcatggtgggtcgaacgaccagaagacggcgagctgagctcggttcccgctcaactggtgggcggagtaggtcaggatggagtcgccgagttgggagttcgccctggcggcggacccgtgtccgtcgaacttgtgggtccgcggtcgcaccgcctgcgtctgcattcactgggccctgaggatgaaggcgtctatcattgtgctccgtccgcttgggtccaacacgccgactacagctggtaccaagctggaagcgcccgcagcggtcctgttacagtctacccgtatatgcatgcactagacactctgttcgtcccgctgttagtgggaacgggagtggctctggtcacgggggctactgtgctgggaactatcacctgttgtttcatgaaaaggctacggaaacggtag

SEQ ID NO: 82318 - DNA, 1842 bp, Artificial Sequence
  derived and/or modified sequence
atgggcgctcttaggcctaccctgttacctcccagcctcccattgctgctcctcctgatgcttgggatgggctgttgggctcgcgaagttctggtaccagaggggcctctgtaccgcgttgcaggaaccgcagtctctatttcttgcaatgtgaccggttatgaggggcctgctcagcagaacttcgagtggttcctgtaccgtccagaggctcccgacacggccctcggtattgtgagcaccaaggacacccagttcagctatgcagtgtttaaatccagggtcgttgctggtgaggttcaagtgcagcgcctacagggtgatgcagttgtgctgaagattgccaggctgcaggctcaagatgcaggaatttacgagtgtcacacccccagcactgatacgcgttatctcgggagctattccggaaaggtcgaactgagggtcctaccagacgtgctacaagtgtcagccgctccacccggaccaagagggagacaggcccctacctcacctccaaggatgacggtccacgaaggtcaggagctggccctaggttgtctcgcaaggacatcaactcaaaagcatactcatcttgctgttagcttcggcagaagcgtccctgaagcccctgtgggacgatccaccttacaggaagtagttggaattcgatcggacctggccgttgaggcgggtgccccatatgccgaaagactggccgcaggggagctgaggcttggcaaggaaggaaccgacaggtatcgtatggtggtggggggagctcaggccggtgatgcgggaacttaccattgtaccgcagccgagtggatccaggacccagatgggtcgtgggctcagatagcggagaagcgtgcagtgctggcccacgttgatgtccagacactgagtagccagttagccgtgacggtcggcccaggcgagcgtcggatcggcccaggagagccgctggaactactatgtaacgtgtccggggctctccctcccgcaggaaggcacgcagcatactctgtcggctgggaaatggcacctgcaggcgcaccaggccctggtaggcttgtggcacagctggatacagagggcgtgggaagcttgggcccagggtatgagggtcggcatatagccatggaaaaggtggcctctcgtacgtatcgactgagactggaagccgctcggccaggggacgctggcacttacaggtgcctggccaaagcttatgtgaggggttcgggcacacgtctgcgcgaggcagcttctgcgagaagccgtcccctgcccgtgcatgtgcgcgaggagggtgtcgtactcgaggccgtcgcttggctcgccggagggactgtctatcgcggtgaaacagcctctttactttgtaacataagcgtgcggggtggacctcctggtctgcggcttgccgcaagctggtgggtcgaacggcctgaagacggagaactatcatctgtgcccgcacaactcgtgggcggtgtagggcaagacggagtggctgagctcggggtccgccctggcggtggaccagtttcggtggagcttgtgggcccacggagccaccggttaagactgcatagtctaggcccagaagacgagggcgtctatcattgtgccccaagcgcctgggtccagcatgcggattattcttggtaccaggctggctccgcccgaagcggaccagtcaccgtgtatccctatatgcacgcgttggatactctgtttgtgccgctccttgtcggaaccggagtcgccctcgtaaccggtgccaccgtgctgggcactatcacctgctgttttatgaagaggctgagaaaacgctag

SEQ ID NO: 82319 - DNA, 1842 bp, Artificial Sequence
  derived and/or modified sequence
atgggtgctctcaggcccacccttttaccacctagcttgccacttctgcttctgctgatgctgggcatgggctgttgggcccgtgaagtgctggtccccgaggggccactgtaccgtgtcgccggaacggccgtctcaatcagctgtaatgtcacaggatacgaggggccagcccagcagaatttcgagtggttcctttatcgcccagaggcaccggacacagccctgggcattgtaagcacaaaagacacacagttttcctatgcggtttttaagtcacgggtcgtggcgggtgaggtgcaggtgcagaggctgcaaggggatgcagtggtcttgaaaattgctcggcttcaggcgcaggatgccggaatatatgagtgccatacaccatcaacagatacacggtatctcggctcatattctggaaaagtcgagctgagagtcctccctgatgtactgcaggttagcgctgcacccccaggtcccaggggacggcaagccccaacctccccccctaggatgacagtgcacgaaggacaggagctcgccctgggctgcttagccagaacatcaacccagaaacacactcatctggccgtcagttttggacggtcggttccagaagcacctgtcggtcggagcactttgcaggaggtggtgggcatccgctcggatctggctgtggaagcaggtgccccttatgctgaaaggcttgcagccggagaactaagactcggcaaagagggcacagacagataccgcatggtggtgggaggagctcaggcgggagatgccggtacctaccattgcactgccgctgaatggatacaagatccagatggctcatgggcgcaaattgcagagaagagagccgtgctggctcatgttgacgtgcagaccttgagtagccagctggctgttaccgtgggaccgggagaaaggagaatcggcccaggcgaacccctcgaacttctgtgtaacgtgtcaggcgcactccccccagctggaagacacgcagcttactccgtaggctgggaaatggctcctgccggtgcccctggcccagggcgactggtggcccaattggatacagaaggagtaggcagccttggacctggctacgagggcaggcacatcgccatggaaaaagtggcttctagaacttacaggttacgcctggaggctgcaaggccaggggatgcagggacttacaggtgcctggccaaggcttacgtgcggggatccggcacccgcttaagggaggcagcgtccgctcgctccaggcctcttccagtgcacgttagagaggagggggtggtactggaggccgtcgcatggctagctggagggactgtgtaccgcggagagaccgcatcactcttgtgcaacattagtgtgcgtggtggcccacccggtctccggcttgcggctagttggtgggttgagcgcccagaagatggcgaacttagttccgtcccggcacaattggttggcggagtcggccaggacggggtcgctgagctgggtgtcagacccggagggggtccggtaagcgttgaactggtcggccctcggagtcacaggctacgactacactcccttggccctgaagacgagggtgtttaccattgtgccccttccgcttgggtccagcatgccgactactcctggtaccaggccggtagtgccagaagcggacccgtcacagtctatccctacatgcacgccctggataccctgttcgtgcctttgctggtgggcacaggcgtggcccttgtaaccggggcaaccgttcttgggaccatcacttgttgcttcatgaagcggctgaggaagaggtag

SEQ ID NO: 82320 - DNA, 1842 bp, Artificial Sequence
  derived and/or modified sequence
atgggcgccctgagacccaccctgctgccccccagcctgcccctgctgctgctgctgatgctgggcatgggctgctgggccagagaggtgctggtgcccgagggccccctgtacagagtggccggcaccgccgtgagcatcagctgcaacgtgaccggctacgagggccccgcccagcagaacttcgagtggttcctgtacagacccgaggcccccgacaccgccctgggcatcgtgagcaccaaggacacccagttcagctacgccgtgttcaagagcagagtggtggccggcgaggtgcaggtgcagagactgcagggcgacgccgtggtgctgaagatcgccagactgcaggcccaggacgccggcatctacgagtgccacacccccagcaccgacaccagatacctgggcagctacagcggcaaggtggagctgagagtgctgcccgacgtgctgcaggtgagcgccgccccccccggccccagaggcagacaggcccccaccagcccccccagaatgaccgtgcacgagggccaggagctggccctgggctgcctggccagaaccagcacccagaagcacacccacctggccgtgagcttcggcagaagcgtgcccgaggcccccgtgggcagaagcaccctgcaggaggtggtgggcatcagaagcgacctggccgtggaggccggcgccccctacgccgagagactggccgccggcgagctgagactgggcaaggagggcaccgacagatacagaatggtggtgggcggcgcccaggccggcgacgccggcacctaccactgcaccgccgccgagtggatccaggaccccgacggcagctgggcccagatcgccgagaagagagccgtgctggcccacgtggacgtgcagaccctgagcagccagctggccgtgaccgtgggccccggcgagagaagaatcggccccggcgagcccctggagctgctgtgcaacgtgagcggcgccctgccccccgccggcagacacgccgcctacagcgtgggctgggagatggcccccgccggcgcccccggccccggcagactggtggcccagctggacaccgagggcgtgggcagcctgggccccggctacgagggcagacacatcgccatggagaaggtggccagcagaacctacagactgagactggaggccgccagacccggcgacgccggcacctacagatgcctggccaaggcctacgtgagaggcagcggcaccagactgagagaggccgccagcgccagaagcagacccctgcccgtgcacgtgagagaggagggcgtggtgctggaggccgtggcctggctggccggcggcaccgtgtacagaggcgagaccgccagcctgctgtgcaacatcagcgtgagaggcggcccccccggcctgagactggccgccagctggtgggtggagagacccgaggacggcgagctgagcagcgtgcccgcccagctggtgggcggcgtgggccaggacggcgtggccgagctgggcgtgagacccggcggcggccccgtgagcgtggagctggtgggccccagaagccacagactgagactgcacagcctgggccccgaggacgagggcgtgtaccactgcgcccccagcgcctgggtgcagcacgccgactacagctggtaccaggccggcagcgccagaagcggccccgtgaccgtgtacccctacatgcacgccctggacaccctgttcgtgcccctgctggtgggcaccggcgtggccctggtgaccggcgccaccgtgctgggcaccatcacctgctgcttcatgaagagactgagaaagagatag

SEQ ID NO: 82321 - protein, 369 aa, Artificial Sequence
  derived and/or modified sequence
MAYSTVQRVALASGLVLALSLLLPKAFLSRGKRQEPPPTPEGKLGRFPPMMHHHQAPSDGQTPGARFQRSHLAEAFAKAKGSGGGAGGGGSGRGLMGQIIPIYGFGIFLYILYILFKLSKGKTTAEDGKCYTAMPGNTHRKITSFELAQLQEKLKETEAAMEKLINRVGPNGESRAQTVTSDQEKRLLHQLREITRVMKEGKFIDRFSPEKEAEEAPYMEDWEGYPEETYPIYDLSDCIKRRQETILVDYPDPKELSAEEIAERMGMIEEEESDHLGWESLPTDPRAQEDNSVTSCDPKPETCSCCFHEDEDPAVLAENAGFSADSYPEQEETTKEEWSQDFKDEGLGISTDKAYTGSMLRKRNPQGLE

SEQ ID NO: 82322 - protein, 320 aa, Artificial Sequence
  derived and/or modified sequence
MMHHHQAPSDGQTPGARFQRSHLAEAFAKAKGSGGGAGGGGSGRGLMGQIIPIYGFGIFLYILYILFKLSKGKTTAEDGKCYTAMPGNTHRKITSFELAQLQEKLKETEAAMEKLINRVGPNGESRAQTVTSDQEKRLLHQLREITRVMKEGKFIDRFSPEKEAEEAPYMEDWEGYPEETYPIYDLSDCIKRRQETILVDYPDPKELSAEEIAERMGMIEEEESDHLGWESLPTDPRAQEDNSVTSCDPKPETCSCCFHEDEDPAVLAENAGFSADSYPEQEETTKEEWSQDFKDEGLGISTDKAYTGSMLRKRNPQGLE

SEQ ID NO: 82323 - DNA, 1110 bp, Artificial Sequence
  derived and/or modified sequence
atggcctacagcaccgtgcagagagtggccctggccagcggcctggtgctggccctgagcctgctgctgcccaaggccttcctgagcagaggcaagagacaggagcccccccccacccccgagggcaagctgggcagattcccccccatgatgcaccaccaccaggcccccagcgacggccagacccccggcgccagattccagagaagccacctggccgaggccttcgccaaggccaagggcagcggcggcggcgccggcggcggcggcagcggcagaggcctgatgggccagatcatccccatctacggcttcggcatcttcctgtacatcctgtacatcctgttcaagctgagcaagggcaagaccaccgccgaggacggcaagtgctacaccgccatgcccggcaacacccacagaaagatcaccagcttcgagctggcccagctgcaggagaagctgaaggagaccgaggccgccatggagaagctgatcaacagagtgggccccaacggcgagagcagagcccagaccgtgaccagcgaccaggagaagagactgctgcaccagctgagagagatcaccagagtgatgaaggagggcaagttcatcgacagattcagccccgagaaggaggccgaggaggccccctacatggaggactgggagggctaccccgaggagacctaccccatctacgacctgagcgactgcatcaagagaagacaggagaccatcctggtggactaccccgaccccaaggagctgagcgccgaggagatcgccgagagaatgggcatgatcgaggaggaggagagcgaccacctgggctgggagagcctgcccaccgaccccagagcccaggaggacaacagcgtgaccagctgcgaccccaagcccgagacctgcagctgctgcttccacgaggacgaggaccccgccgtgctggccgagaacgccggcttcagcgccgacagctaccccgagcaggaggagaccaccaaggaggagtggagccaggacttcaaggacgagggcctgggcatcagcaccgacaaggcctacaccggcagcatgctgagaaagagaaacccccagggcctggagtag

SEQ ID NO: 82324 - DNA, 624 bp, Artificial Sequence
  derived and/or modified sequence
atgtgcagactgaagagacaggagttcgtgatcagcagagcccagaccgtgaccagcgaccaggagaagagactgctgcaccagctgagagagatcaccagagtgatgaaggagggcaagttcatcgacagattcagccccgagaaggaggccgaggaggccccctacatggaggactgggagggctaccccgaggagacctaccccatctacgacctgagcgactgcatcaagagaagacaggagaccatcctggtggactaccccgaccccaaggagctgagcgccgaggagatcgccgagagaatgggcatgatcgaggaggaggagagcgaccacctgggctgggagagcctgcccaccgaccccagagcccaggaggacaacagcgtgaccagctgcgaccccaagcccgagacctgcagctgctgcttccacgaggacgaggaccccgccgtgctggccgagaacgccggcttcagcgccgacagctaccccgagcaggaggagaccaccaaggaggagtggagccaggacttcaaggacgagggcctgggcatcagcaccgacaaggcctacaccggcagcatgctgagaaagagaaacccccagggcctggagtag

SEQ ID NO: 82325 - DNA, 963 bp, Artificial Sequence
  derived and/or modified sequence
atgatgcaccaccaccaggcccccagcgacggccagacccccggcgccagattccagagaagccacctggccgaggccttcgccaaggccaagggcagcggcggcggcgccggcggcggcggcagcggcagaggcctgatgggccagatcatccccatctacggcttcggcatcttcctgtacatcctgtacatcctgttcaagctgagcaagggcaagaccaccgccgaggacggcaagtgctacaccgccatgcccggcaacacccacagaaagatcaccagcttcgagctggcccagctgcaggagaagctgaaggagaccgaggccgccatggagaagctgatcaacagagtgggccccaacggcgagagcagagcccagaccgtgaccagcgaccaggagaagagactgctgcaccagctgagagagatcaccagagtgatgaaggagggcaagttcatcgacagattcagccccgagaaggaggccgaggaggccccctacatggaggactgggagggctaccccgaggagacctaccccatctacgacctgagcgactgcatcaagagaagacaggagaccatcctggtggactaccccgaccccaaggagctgagcgccgaggagatcgccgagagaatgggcatgatcgaggaggaggagagcgaccacctgggctgggagagcctgcccaccgaccccagagcccaggaggacaacagcgtgaccagctgcgaccccaagcccgagacctgcagctgctgcttccacgaggacgaggaccccgccgtgctggccgagaacgccggcttcagcgccgacagctaccccgagcaggaggagaccaccaaggaggagtggagccaggacttcaaggacgagggcctgggcatcagcaccgacaaggcctacaccggcagcatgctgagaaagagaaacccccagggcctggagtag

SEQ ID NO: 82326 - DNA, 1110 bp, Artificial Sequence
  derived and/or modified sequence
atggcctacagcaccgtgcagcgtgtggcgctcgcctcaggcctggttctcgcgttgagcctgctgctcccaaaggcatttctcagtaggggaaagcgtcaggagcccccccccacgcctgaaggaaaactgggacgattcccaccaatgatgcatcaccatcaggcccccagtgatggtcagactccgggagcacgattccagcgctctcacctcgctgaggcattcgccaaggccaagggttccggcggaggagcaggtggcggaggttctggacggggcttgatggggcagatcataccaatttacgggttcggcattttcctgtatatcttgtacattctttttaagctgtcaaaaggaaagactaccgccgaagacgggaagtgctatacagctatgcccggaaacacgcaccgcaaaatcactagcttcgagctcgcgcaactgcaggaaaaattgaaggagaccgaagccgccatggagaaactgattaacagagttggtcccaatggggaatcacgtgctcagactgtaacatccgaccaggaaaagcgcttacttcaccagttgcgagagataacccgggttatgaaggagggcaaattcattgacagattctcacccgagaaggaggctgaggaggccccatatatggaagattgggaaggctatccagaggagacttatcctatctacgatctgagcgactgtattaaacgtagacaagagaccatacttgtcgattaccccgacccgaaagaactgagcgctgaagaaatcgccgaaagaatgggcatgatagaggaggaggagagcgaccacttgggctgggaaagtttgcccaccgatcctagagctcaggaagacaactctgtgactagctgtgaccctaaacctgagacttgtagttgttgtttccatgaagacgaggatcccgcagtgctggcagagaatgccggcttttcagctgacagctaccctgagcaagaggagactactaaagaggagtggagccaggactttaaggatgaagggttaggaatctcaacggataaagcgtataccggctccatgctaaggaagcgaaatccacagggcttagagtag

SEQ ID NO: 82327 - DNA, 624 bp, Artificial Sequence
  derived and/or modified sequence
atgtgtcgattgaaacgccaagaatttgttatctctagggctcagacagtcactagcgatcaggaaaaacgactgctgcatcagctgagggagattactagggtgatgaaagagggtaagtttattgaccggttcagccctgagaaagaggccgaagaggccccatatatggaggactgggagggatacccagaagaaacataccctatctatgatctatcagattgcatcaaacgaagacaggagactatacttgtagactacccagaccctaaggagctttctgccgaagagatcgctgagcgcatggggatgatcgaggaagaggaaagcgatcatctaggttgggagtctctgccaaccgatcctagggcacaggaggacaatagtgttacatcgtgcgatcccaagccagaaacctgttcatgttgctttcacgaggacgaggacccagcagtgctggccgagaacgcaggctttagcgctgactcctatccagaacaggaggaaacgactaaagaggagtggtcccaggattttaaagacgaagggctaggaatctccaccgataaagcttacaccggctcaatgctccggaaacgtaaccctcagggactggagtag

SEQ ID NO: 82328 - DNA, 963 bp, Artificial Sequence
  derived and/or modified sequence
atgatgcaccatcaccaggcaccatcagacggccaaacccccggcgccaggtttcagagaagtcatttggctgaggcgtttgcgaaggccaagggtagtggagggggtgctggcgggggaggctccgggcggggcctgatgggccagattattcccatttacggctttgggatctttttatacattctttatattttgtttaaattgagcaagggcaagactaccgctgaagatgggaaatgttacaccgctatgccgggtaatacccaccgaaagatcacttcatttgagctcgctcagcttcaggagaagttgaaggaaactgaagcagcgatggaaaaactcattaaccgggtgggacctaatggcgaatcccgcgcccaaactgtaaccagcgatcaggagaagcgccttttgcaccagctccgagagattacccgagtcatgaaggagggcaagtttatcgacagattctccccggagaaggaagccgaggaagctccgtatatggaggattgggaaggctatcctgaggagacataccccatctatgacttgtctgattgcatcaaacggagacaagaaaccatcctggtggattatccagatcctaaggaactttctgccgaagaaatagccgaaagaatgggcatgatcgaggaagaggaatctgatcacctgggctgggagtctctccctactgatcctagggcccaggaagacaactccgtcacatcatgcgacccaaaacccgaaacttgcagctgctgttttcatgaagacgaagatcctgccgttctggccgagaacgcggggttttccgctgattcatatcctgagcaagaagagactaccaaggaagaatggtcgcaagactttaaagacgagggactggggatcagcacggataaggcctacactggtagcatgttacggaagcgaaacccgcagggcctcgaatag

SEQ ID NO: 82329 - DNA, 1110 bp, Artificial Sequence
  derived and/or modified sequence
atggcctacagcacagtgcagagggtggccctggccagcggcctggtgctggccctgagcctgctgctgcccaaggccttcctgagccggggcaagaggcaggagcccccacccaccccagagggcaagctgggccgcttcccccccatgatgcaccaccaccaggcccccagtgatggccagacccctggggcccgcttccagaggagccacctggccgaggcctttgccaaggccaagggcagcggcggcggggccggcggcggcggcagcggccggggcctgatgggccagatcatccccatctacggcttcggcatcttcctgtacatcctgtacatcctcttcaagctgagcaagggcaagaccacagcagaagatggcaagtgctacacagccatgcctggcaacacccacaggaagatcaccagctttgagctggcccagctgcaggagaagctgaaggagacagaagctgccatggagaagctgatcaacagagtgggccccaatggagagagccgggcccagacagtgaccagtgaccaggagaagaggctgctgcaccagctgcgggagatcaccagggtgatgaaggagggcaagttcatcgaccgcttcagccctgagaaggaggccgaggaggccccctacatggaggactgggagggctacccagaggagacctaccccatctatgacctgagtgactgcatcaagaggcggcaggagaccatcctggtggactacccagaccccaaggagctgtctgctgaggagattgctgagaggatgggcatgattgaggaggaggagagtgaccacctgggctgggagagcctgcccacagacccccgggcccaggaggacaacagcgtgaccagctgtgaccccaagccagagacctgcagctgctgcttccatgaagatgaagatcctgctgtgctggccgagaatgccggcttctctgctgacagctacccagagcaggaggagaccaccaaggaggagtggagccaggacttcaaggatgagggcctgggcatcagcacagacaaggcctacacaggctccatgctgaggaagaggaacccccagggcctggagtag

SEQ ID NO: 82330 - DNA, 624 bp, Artificial Sequence
  derived and/or modified sequence
atgtgccgcctgaagaggcaggagtttgtgatcagccgggcccagacagtgaccagtgaccaggagaagaggctgctgcaccagctgcgggagatcaccagggtgatgaaggagggcaagttcatcgaccgcttcagccctgagaaggaggccgaggaggccccctacatggaggactgggagggctacccagaggagacctaccccatctatgacctgagtgactgcatcaagaggcggcaggagaccatcctggtggactacccagaccccaaggagctgtctgctgaggagattgctgagaggatgggcatgattgaggaggaggagagtgaccacctgggctgggagagcctgcccacagacccccgggcccaggaggacaacagcgtgaccagctgtgaccccaagccagagacctgcagctgctgcttccatgaagatgaagatcctgctgtgctggccgagaatgccggcttctctgctgacagctacccagagcaggaggagaccaccaaggaggagtggagccaggacttcaaggatgagggcctgggcatcagcacagacaaggcctacacaggctccatgctgaggaagaggaacccccagggcctggagtag

SEQ ID NO: 82331 - DNA, 963 bp, Artificial Sequence
  derived and/or modified sequence
atgatgcaccaccaccaggcccccagtgatggccagacccctggggcccgcttccagaggagccacctggccgaggcctttgccaaggccaagggcagcggcggcggggccggcggcggcggcagcggccggggcctgatgggccagatcatccccatctacggcttcggcatcttcctgtacatcctgtacatcctcttcaagctgagcaagggcaagaccacagcagaagatggcaagtgctacacagccatgcctggcaacacccacaggaagatcaccagctttgagctggcccagctgcaggagaagctgaaggagacagaggccgccatggagaagctgatcaacagagtgggccccaacggggagagccgggcccagacagtgaccagtgaccaggagaagaggctgctgcaccagctgcgggagatcaccagggtgatgaaggagggcaagttcatcgaccgcttcagccctgagaaggaggccgaggaggccccctacatggaggactgggagggctacccagaggagacctaccccatctatgacctgagtgactgcatcaagaggcggcaggagaccatcctggtggactacccagaccccaaggagctgtctgctgaggagattgctgagaggatgggcatgattgaggaggaggagagtgaccacctgggctgggagagcctgcccacagacccccgggcccaggaggacaacagcgtgaccagctgtgaccccaagccagagacctgcagctgctgcttccatgaagatgaggaccctgctgtgctggctgaaaatgccggcttctctgctgacagctacccagagcaggaggagaccaccaaggaggagtggagccaggacttcaaggatgagggcctgggcatcagcacagacaaggcctacacaggctccatgctgaggaagaggaacccccagggcctggagtag

SEQ ID NO: 82332 - DNA, 1110 bp, Artificial Sequence
  derived and/or modified sequence
atggcctacagcaccgtgcagcgggtggccctggccagcggcctggtattagctctttccttactactgccgaaggccttcctgtctagagggaaacgccaagagcccccccctacgccagaggggaaactcggaaggtttccgcctatgatgcatcaccaccaggctcctagcgatggccagacccccggtgctagattccagaggtcccatcttgccgaagccttcgccaaagccaagggctccggaggaggagcaggtggtggcgggtccggaaggggattgatgggtcagatcatccccatctacggcttcgggattttcctgtatattttgtacatcctttttaaactgtccaagggtaaaaccactgcggaagacgggaaatgctatactgctatgcctggcaacacacatagaaagatcacatccttcgagttagcccagctccaggagaagttaaaggagacggaagccgctatggaaaaattgataaatcgggttggccctaatggtgaatcccgggcccagactgtgactagtgatcaggaaaagcggcttcttcatcagctgcgggaaattaccagggtcatgaaagagggcaagtttattgataggttttcccccgaaaaggaggctgaggaagccccttacatggaggactgggaagggtatcctgaggagacctatccaatctacgacctaagtgactgcataaaacgccgccaggagaccatcctggtcgactatcctgatcccaaagaactgtccgccgaagagattgctgagcgcatgggcatgatagaggaggaggagtccgatcacttgggctgggagagtttaccaactgaccccagggcccaggaagataactctgtaacatcttgcgaccccaagccagagacttgttcttgttgtttccacgaagatgaagaccccgctgtgttagcagaaaacgcaggattctccgcagactcctacccagagcaagaggagaccaccaaagaagaatggtctcaggactttaaagacgagggtctgggcattagcaccgataaggcctacaccgggagtatgctaaggaaacgcaacccacaaggattggaatag

SEQ ID NO: 82333 - DNA, 624 bp, Artificial Sequence
  derived and/or modified sequence
atgtgccggctgaagcggcaggagttcgtgatcagccgggcccagacagtgacatctgaccaagagaagcgactcttacaccagcttagggaaataactcgcgttatgaaagaaggcaaattcattgatcggttttctcctgagaaggaggcagaggaagctccatacatggaggattgggaggggtatcctgaagagacctatccaatttatgatctgtcagactgcataaagcgcagacaggagacaatcctcgtggactacccagatcccaaggagctctcagccgaggaaatagctgagcggatgggcatgattgaagaagaggagtctgaccacctgggatgggaatccctcccaacagacccacgagcccaagaggataacagcgtgacctcctgcgaccctaagcctgagacgtgtagctgttgtttccatgaagacgaggatcctgcagtgcttgcagaaaatgcaggcttttcagccgattcatacccggaacaggaagaaaccacgaaagaggagtggtcacaggactttaaggatgaaggcctggggatctccacagacaaagcgtatactggatccatgctgagaaagagaaacccccagggcttggagtag

SEQ ID NO: 82334 - DNA, 963 bp, Artificial Sequence
  derived and/or modified sequence
atgatgcaccaccaccaggcccccagcgacggccagacccccggcgcacggtttcagcgctcccatttggcagaagcttttgcaaaggccaaaggctccgggggcggagctgggggtggaggttctggaaggggattaatgggtcagataattccaatctacggtttcggcattttcctgtatatactttacattctgttcaaactgtccaaaggcaaaaccactgccgaggacgggaaatgttatacggcgatgccaggcaatacgcatcggaaaatcaccagctttgaactggcacagttacaggagaagctgaaggagacagaggcagccatggagaagctgatcaaccgcgttggccctaatggcgagagtagagctcagaccgtaacaagtgatcaggagaaacgattacttcaccagttacgggagattacccgagttatgaaagaaggcaagtttattgatcgctttagcccagaaaaggaagccgaggaggcaccctacatggaagattgggagggctatccagaggagacgtaccccatatacgacctatcagattgtatcaagaggcgtcaggagaccattctggtggattacccagaccctaaggagctttcagcggaggagatcgccgagcggatgggcatgattgaagaggaagagtcagatcacctgggatgggagtccctgccaactgacccccgggcccaggaggataatagcgtcacatcctgtgatccaaagccagagacatgtagctgctgttttcacgaggatgaggaccctgccgtccttgcagagaatgccggattctctgccgactcttaccccgaacaagaggaaaccaccaaagaagagtggagtcaagacttcaaggatgagggcctcggaatctcaactgacaaggcttacaccggctcgatgctgagaaagcgaaaccctcaagggcttgaatag

SEQ ID NO: 82335 - DNA, 1110 bp, Artificial Sequence
  derived and/or modified sequence
atggcttacagtaccgtccagcgggtggctttggcttcgggtctcgtgcttgccctcagccttctcctaccaaaggcttttctgtcaaggggcaaacggcaggagccccctccaacccccgaggggaagctaggcaggtttcctcccatgatgcaccatcatcaagcacccagcgacggccagacaccaggtgcccgattccagcgttcacatttagcagaagcgttcgccaaagccaaagggagcgggggtggagctggaggtggtggctctgggcgaggactaatggggcagattataccaatatacggattcggtatttttttgtatattttgtacatactgtttaagctaagcaaggggaaaaccactgccgaggacggcaaatgctatacggcaatgccaggaaacacacaccgaaaaattacgtcctttgagctggcacaactgcaggagaagctgaaggagaccgaggccgcaatggagaagctgatcaatcgcgttgggcctaatggcgagagcagggcacagacagtcacgagcgaccaggagaaacggctcctccatcagttgagggaaatcacaagggtcatgaaagaaggcaaatttattgataggttttcaccggaaaaggaggcggaagaagcaccatacatggaagactgggaggggtaccctgaggagacttaccccatctacgatctttcagactgtatcaagcgcagacaagagactattctggtggactaccccgatcccaaagaactatctgctgaagagatcgcagaacggatgggtatgattgaagaagaggagagcgatcacctgggttgggaatcactaccaacggacccacgcgctcaggaagacaactcagttacaagttgcgatcccaagcccgagacatgtagctgctgctttcacgaggatgaggatccggcagttcttgctgagaatgcaggattctcagcagatagttatccagaacaggaggagacaaccaaggaagagtggtcccaggattttaaggatgaagggttaggtatttcaaccgacaaagcatatacagggagcatgctgaggaagagaaacccacagggtctggagtag

SEQ ID NO: 82336 - DNA, 624 bp, Artificial Sequence
  derived and/or modified sequence
atgtgtaggctgaaacgccaggagtttgtgatttcaagagcccagaccgtcacatcggaccaggaaaagcgactgttgcaccagcttcgggagatcacccgcgtcatgaaagaaggcaaatttatcgataggttctctcctgaaaaagaggctgaggaagcgccatatatggaggactgggaaggctaccccgaagaaacctaccctatctatgacctgtccgactgcatcaaacgcagacaagagactatcctggtcgattatcccgatcctaaggagctgtccgctgaggagatcgccgagaggatgggaatgattgaggaggaagagagcgaccaccttggttgggagagtctgcccaccgacccacgcgctcaggaagacaactccgtcacatcgtgcgatcctaaacccgaaacatgcagttgctgttttcatgaagatgaggatccggctgtacttgccgaaaacgctgggtttagcgccgattcatatcctgagcaggaggaaaccaccaaagaggagtggtcgcaggattttaaagatgaaggactgggcatttcaacggataaggcttacactggctctatgctccgcaagagaaacccgcagggccttgagtag

SEQ ID NO: 82337 - DNA, 963 bp, Artificial Sequence
  derived and/or modified sequence
atgatgcaccaccaccaggccccttcagatggccagaccccaggggcaagattccagcgatctcacttagcggaagcctttgctaaagcaaagggctccgggggaggggctggtggtgggggttcaggcagggggctgatgggacagatcatccccatttatggctttgggatctttctctatattttgtatatcctcttcaagctatcaaaaggcaaaaccactgccgaagatggaaaatgctacacagcaatgcctggaaacacccaccggaagataacatcgttcgaattagcccaacttcaggagaagttaaaagaaaccgaggccgctatggaaaaacttataaacagggtcgggccaaacggagaatcccgagcgcagactgtgaccagcgaccaggagaagcggctcctacaccagcttcgtgagattacaagggttatgaaagagggcaaattcattgatcgcttttcacctgaaaaggaggctgaagaagccccatacatggaggactgggaggggtatcccgaagaaacttacccgatctatgacttatcagactgcatcaaacggaggcaggagactatcttggtagactatcccgaccctaaggagctgagcgctgaggaaattgcggagcgcatgggtatgattgaagaggaagagtcagatcatctgggatgggaatccctgcccaccgatccaagggcgcaggaggataatagcgttacaagctgcgacccaaagcccgaaacatgctcctgttgttttcatgaagatgaggatccggcagtattagctgaaaatgccggtttctcagcggattcctatcccgaacaggaggaaaccacaaaggaagagtggagccaggacttcaaggacgaaggcctggggatctctactgacaaggcatacacaggcagcatgctgaggaagaggaaccctcagggcctggagtag

SEQ ID NO: 82338 - DNA, 2859 bp, Artificial Sequence
  derived and/or modified sequence
atggcgtactccacagtgcagagagtcgctctggcttctgggcttgtcctggctctgtcgctgctgctgcccaaggccttcctgtcccgcgggaagcggcaggagccgccgccgacacctgaaggaaaattgggccgatttccacctatgatgcatcatcaccaggcaccctcagatggccagactcctggggctcgtttccagaggtctcaccttgccgaggcatttgcaaaggccaaaggatcaggtggaggtgctggaggaggaggtagtggaagaggtctgatggggcagattattccaatctacggttttgggatttttttatatatactgtacattctatttaagctctcaaaggggaaaacaactgcagaggatgggaaatgctatactgccatgcctggaaacacccacaggaaaattaccagttttgagcttgctcaactgcaagaaaaactgaaggagacagaagcagccatggaaaaattaatcaacagagtgggacctaatggtgagagcagagcacagactgtgacttctgaccaagagaaacggttgctacatcagctccgagaaatcaccagggtcatgaaagaaggaaaattcattgacagattttctccagagaaagaagctgaggaggccccttacatggaggactgggaaggttaccctgaagagacttacccaatttatgacctttcagactgtatcaagcgtaggcaagaaacaatcttggtggattaccctgacccaaaagaactttctgctgaagaaatagctgaaagaatgggaatgatagaagaggaagaatcagatcatttgggttgggaaagtctgcccactgaccccagagcccaggaagataattctgttacctcgtgtgatccaaagccagaaacatgttcctgctgttttcatgaagacgaggatcctgctgtcttggcagagaatgctggattcagtgcagatagctaccctgagcaagaggaaaccaccaaagaagagtggtcccaagactttaaagatgaagggttgggcatcagcaccgataaagcatatacaggcagcatgctgaggaagcgtaacccccagggtttagagtgaaaacagccagtctgaagtatccattactcaagtcccaaggtgacctctctctcctcagatttccttcttggccctgtgccctgcactttcttcactgtgttcaagtgtcatagctatcaggccactatcatggatatcatgtatccttcctggtgctcacacacctgtcaccttgtaaaacacggacattagtgtgaacacaggacagcttcgctctttctcttcctgcctttcctctatcagagaagttgatccattaagtaattatgtttggtctattgtaattacagatgggaccactcaggggcaaaggtctgactcttcctggtaggtgtaacagatagttcacctgtgaacgaacatcagcttacagatgatgaggacttaaggttgcaagaatgaagatttcagactccaagatcccttattctttgggccttgagcaggttagtagtcccctggtgagaagagaacattttgtttgtggggctaatgggcccagaggagggtaagactctgctgtctaagctgaagcctcttcctcgcagcgagggtcttcctaggaacattgatgctgcctcagacatcctcttttctccagagtagggaagactcccactgatctgagaatgagcccagaggcttgtttggggactgttttactctgatactacctggatatctagcttcctttacccctgttctgcttaacagaactgccaagcccagaagtacctttgcactcctggttttcagtggacagaggaagctttagatagagactttagaccctgccctgcagagtcaagacttgaggccattgaagctgcaggaagccctgcccagggatggtcctgccatgaggaggctgcaaccctataagagggctcaagattgtgaattctgctcctgccatgaggagctcagaaggccaggaagccagcaataggggagagaatctgtgtgcttatggacagtccttacctaaagctgtttctgaatgttgcaccctttgagaaatttcttctcagaaccataaattgaaacaaatgaggactgatcttgtatacaaagtgccaactcaagagggaagttggagtatgtctgttgcagagaaccaatatagcagtgcccaggggtagagaccatgtgttccatactcggatatttgggtctttttgagagagctggggaaagtagcagcaactagattaagactgggaggattttgaccaaactaaaggccttttctccttactgcatctgacgtgtgtcttcttgagacaagatagcacccatgaattacatcatgaggtatgcgtgaattcagtttacatgtaagacctgagagttcgaagagggcacattcccaaagacattcccagtcatgaaatgtagaagactggaaaattaagacattatgtaaaggtagatatggcttttagagttacattatgcttggcatgaataaggtgccaggaaaacagtttaaaattatacatcagcatacagactgctgttagaaggtatgggatcatattaagataatctgtcagctactactaggcatttattgttaattgagttacagaaagtcattcaagactgagtttatagaaagcatattgcatctatctctgtgtagaacatttgattcacattgtgaagaatgcagtttaaaatatactgaatgcaatctagatgtattgtacacgaaaggtgaaaaataacaggtgctctttactgttt

SEQ ID NO: 82339 - DNA, 5272 bp, Artificial Sequence
  derived and/or modified sequence
atgtgccgcctgaagagacaagagtttgtgataagcagagcacagactgtgacttctgaccaagagaaacggttgctacatcagctccgagaaatcaccagggtcatgaaagaaggaaaattcattgacagattttctccagagaaagaagctgaggaggccccttacatggaggactgggaaggttaccctgaagagacttacccaatttatgacctttcagactgtatcaagcgtaggcaagaaacaatcttggtggattaccctgacccaaaagaactttctgctgaagaaatagctgaaagaatgggaatgatagaagaggaagaatcagatcatttgggttgggaaagtctgcccactgaccccagagcccaggaagataattctgttacctcgtgtgatccaaagccagaaacatgttcctgctgttttcatgaagacgaggatcctgctgtcttggcagagaatgctggattcagtgcagatagctaccctgagcaagaggaaaccaccaaagaagagtggtcccaagactttaaagatgaagggttgggcatcagcaccgataaagcatatacaggcagcatgctgaggaagcgtaacccccagggtttagagtgaaaacagccagtctgaagtatccattactcaagtcccaaggtgacctctctctcctcagatttccttcttggccctgtgccctgcactttcttcactgtgttcaagtgtcatagctatcaggccactatcatggatatcatgtatccttcctggtgctcacacacctgtcaccttgtaaaacacggacattagtgtgaacacaggacagcttcgctctttctcttcctgcctttcctctatcagagaagttgatccattaagtaattatgtttggtctattgtaattacagatgggaccactcaggggcaaaggtctgactcttcctggtaggtgtaacagatagttcacctgtgaacgaacatcagcttacagatgatgaggacttaaggttgcaagaatgaagatttcagactccaagatcccttattctttgggccttgagcaggttagtagtcccctggtgagaagagaacattttgtttgtggggctaatgggcccagaggagggtaagactctgctgtctaagctgaagcctcttcctcgcagcgagggtcttcctaggaacattgatgctgcctcagacatcctcttttctccagagtagggaagactcccactgatctgagaatgagcccagaggcttgtttggggactgttttactctgatactacctggatatctagcttcctttacccctgttctgcttaacagaactgccaagcccagaagtacctttgcactcctggttttcagtggacagaggaagctttagatagagactttagaccctgccctgcagagtcaagacttgaggccattgaagctgcaggaagccctgcccagggatggtcctgccatgaggaggctgcaaccctataagagggctcaagattgtgaattctgctcctgccatgaggagctcagaaggccaggaagccagcaataggggagagaatctgtgtgcttatggacagtccttacctaaagctgtttctgaatgttgcaccctttgagaaatttcttctcagaaccataaattgaaacaaatgaggactgatcttgtatacaaagtgccaactcaagagggaagttggagtatgtctgttgcagagaaccaatatagcagtgcccaggggtagagaccatgtgttccatactcggatatttgggtctttttgagagagctggggaaagtagcagcaactagattaagactgggaggattttgaccaaactaaaggccttttctccttactgcatctgacgtgtgtcttcttgagacaagatagcacccatgaattacatcatgaggtatgcgtgaattcagtttacatgtaagacctgagagttcgaagagggcacattcccaaagacattcccagtcatgaaatgtagaagactggaaaattaagacattatgtaaaggtagatatggcttttagagttacattatgcttggcatgaataaggtgccaggaaaacagtttaaaattatacatcagcatacagactgctgttagaaggtatgggatcatattaagataatctgtcagctactactaggcatttattgttaattgagttacagaaagtcattcaagactgagtttatagaaagcatattgcatctatctctgtgtagaacatttgattcacattgtgaagaatgcagtttaaaatatactgaatgcaatctagatgtattgtacacgaaaggtgaaaaataacaggtgctctttactgtttagataaattgttttctgtgttatttcccttcgttcactgtgaggggttgattcatgaggagagccctgggttcctggctcaggtttacttttggccttaggataggattcccttattagagataaatactgctgttctcttctagctcattcattcatttagcagtcaattgctcagtgccaggtgctaggaacagaggctcaatctctaccctcagaaaactcagtgtgacgagagagagcctgacagataaaatgaactatgaccctgtaagagggctcaggatcgtgaatcctgcaggcagagaaacatgagccataatctgtccctgcattttctagctgtggaatcttgggtcagctccttaactggtctgagctttggcttcagggtagtaaagggaggggtattaaaggtcctggttaaatgaaatcatcagtgtgtgtaaaacagcattggttctagctcatacatgataaccactcattaagtggtaattatgtttttattataagggctatgctgtaattcagacatgggcccaaaactacaggaaagataaattgtttttgctaaagtattgccaagaaacttcacagtttcttgggaggtgggccttgaggcatgcaaagaacttcttcaggtaggcaaagaagagaggacactcttggcagaaagagttgttgaaaaaagcagtagggtgtgaaaatacatggatgttcaagtattttggtgaggctgttatgtaaagtgttgttggtctttggggaaaattggcttatggaaattcctgccagaagtactaagcccttatggtggttcttcctgccctagctcttggttggtttatatataaggaatatatttgtgtatttatatatcagacatttggatgtacctttcagttatttaggatttagaaaattctttttggattttccagaattattttatccttcggggatgacagttatatgtgtatatacaacccaggatgacaaaatcatgggtccggtttttgttgccagggctgctgtctcttttcttgcggtcttcatttctcacgagggtgctgggaacttgatcagtcccctggccttttggcactgtggcagagtacacaagtcatacctttatggacagttagctcacaaaacaactgcataatctgggatcactcttggtaaatcaggtgggtggtgcagccaggagatcccctttcctggtcacaacaggagcacaaagaaaccattatctccatgactagctccagaagctgggcccagggagtcgtgatgaggagtggaggtgtatttggcctgtagaatcaacggcctttgagaaccatacaatgcaccttatatggcttgggtgatcaaataacttaaggtccaaattcaaacactttggaaaaagggagctttaatataattatgccaaggtgataggcataaactaagactgtcctggacgtagggtcacccctgtctatagccatttaagatttttgaacctgatgactaaacaaacaaaaccctctttcctttttagaatatcctgtatgcgctatttcccaccagaggcagaggccacaggagataggccatggttcaggtaggaaatgctcttggtcacatcagaactctagatctgggggaataaacaaacccgaattattaccacactctcaaagttctcttcaatctggactatttgtattccaaagaaaaatttagtgctttagctattcagcaatattgagaaaaaacatgaacacatttatgactttgccttgaccattgacttttctaaaatgtgcttccttttcctttatttccctttttttatacaaagaaaatagcccaaatttctcctcttaggtcattccttaacctctcagagaaccagtttccccatgaattgggaataatgctctatttacagggctgtttggattaaataagatgctgtttataaagtgtctgtgccagggcaaagcatgtggtaggtgcttggtgacagcatgatccctgtcaccactctgtcaagtccagtgttgctgagatgtcacacctgacaccctctaaggctaccctgattgccaggagtggcccagggcccttctgcagtctccgggtgcctttagttataacctcttgtctgggtcagaccattagctttcatgtctgcttctagctacaactgtagcctcccttccttttgccttcaaatctgccacagctgcccggcaacaaaaaaagattcctaagcatctcgaggtcctgtttaaatgggttagggtccaagcaagccctgagacatcaagtggttgggtcttttatacctttttcatctctacagccctgttctcttcctaaggccaggcccacaggggatactgaggaaccaccagccccttcaggcggcacagcagaccctgaagagaactgctctaacttaagtaccttctgacttcaccatttttccagcctctgggtgtggttctgatgaaccttaaacttgaaaggcacaggccagaggaaggacagtgttgacccacatgtcattggtgaggttatgatctctttgctattatcacctacttacccacctgaggctcctaggaaacaatgaatgaaaggtatagaaaaaaattaggaagtaaacagggcttttttcccctttatgaaaaaagtacacagaagtgttgaaacgattcaagtttaatttgttgatatatgtgtgtacttagacaaacactaaattctacaacatacataatgtcaacatgggaaaataccaagtttgtcattgcacataccaataaataaatacatttgctccagaataccaaagtttattcaaaaagtcaataaaagcacagttttgcaaatttgtc

SEQ ID NO: 82340 - DNA, 1211 bp, Artificial Sequence
  derived and/or modified sequence
gcgaccaccgtgagcagtcatggcgtactccacagtgcagagagtcgctctggcttctgggcttgtcctggctctgtcgctgctgctgcccaaggccttcctgtcccgcgggaagcggcaggagccgccgccgacacctgaagaaaactaagagtgagaactgacaaaaagccattggatttgacggttaaggaaaattgggccgatttccacctatgatgcatcatcaccaggcaccctcagatggccagactcctggggctcgtttccagaggtctcaccttgccgaggcatttgcaaaggccaaaggatcaggtggaggtgctggaggaggaggtagtggaagaggtctgatggggcagattattccaatctacggttttgggatttttttatatatactgtacattctatttaagctctcaaaggggaaaacaactgcagaggatgggaaatgctatactgccatgcctggaaacacccacaggaaaattaccagttttgagcttgctcaactgcaagaaaaactgaaggagacagaagcagccatggaaaaattaatcaacagagtgggacctaatggtgagagcagagcacagactgtgacttctgaccaagagaaacggttgctacatcagctccgagaaatcaccagggtcatgaaagaaggaaaattcattgacagattttctccagagaaagaagctgaggaggccccttacatggaggactgggaaggttaccctgaagagacttacccaatttatgacctttcagactgtatcaagcgtaggcaagaaacaatcttggtggattaccctgacccaaaagaactttctgctgaagaaatagctgaaagaatgggaatgatagaagaggaagaatcagatcatttgggttgggaaagtctgcccactgaccccagagcccaggaagataattctgttacctcgtgtgatccaaagccagaaacatgttcctgctgttttcatgaagacgaggatcctgctgtcttggcagagaatgctggattcagtgcagatagctaccctgagcaagaggaaaccaccaaagaagagtggtcccaagactttaaagatgaagggttgggcatcagcaccgataaagcatatacaggcagcatgctgaggaagcgtaacccccagggtttagagtgaaaacagccagtctgaagtatccattactcaagt

SEQ ID NO: 82341 - protein, 288 aa, Artificial Sequence
  derived and/or modified sequence
MAYSTVQRVALASGLVLALSLLLPKAFLSRGKRQEPPPTPEGKLGRFPPMMHHHQAPSDGQTPGARFQRSHLAEAFAKAKGSGGGAGGGGSGRGLMGQIIPIYGFGIFLYILYILFKLSKGKTTAEDGKCYTAMPGNTHRKISYPEETYPIYDLSDCIKRRQETILVDYPDPKELSAEEIAERMGMIEEEESDHLGWESLPTDPRAQEDNSVTSCDPKPETCSCCFHEDEDPAVLAENAGFSADSYPEQEETTKEEWSQDFKDEGLGISTDKAYTGSMLRKRNPQGLE

SEQ ID NO: 82342 - DNA, 867 bp, Artificial Sequence
  derived and/or modified sequence
atggcctacagcaccgtgcagagagtggccctggccagcggcctggtgctggccctgagcctgctgctgcccaaggccttcctgagcagaggcaagagacaggagcccccccccacccccgagggcaagctgggcagattcccccccatgatgcaccaccaccaggcccccagcgacggccagacccccggcgccagattccagagaagccacctggccgaggccttcgccaaggccaagggcagcggcggcggcgccggcggcggcggcagcggcagaggcctgatgggccagatcatccccatctacggcttcggcatcttcctgtacatcctgtacatcctgttcaagctgagcaagggcaagaccaccgccgaggacggcaagtgctacaccgccatgcccggcaacacccacagaaagatcagctaccccgaggagacctaccccatctacgacctgagcgactgcatcaagagaagacaggagaccatcctggtggactaccccgaccccaaggagctgagcgccgaggagatcgccgagagaatgggcatgatcgaggaggaggagagcgaccacctgggctgggagagcctgcccaccgaccccagagcccaggaggacaacagcgtgaccagctgcgaccccaagcccgagacctgcagctgctgcttccacgaggacgaggaccccgccgtgctggccgagaacgccggcttcagcgccgacagctaccccgagcaggaggagaccaccaaggaggagtggagccaggacttcaaggacgagggcctgggcatcagcaccgacaaggcctacaccggcagcatgctgagaaagagaaacccccagggcctggagtag

SEQ ID NO: 82343 - DNA, 867 bp, Artificial Sequence
  derived and/or modified sequence
atggcttattctacagtccaaagggtcgcactggcgagcggtttggtgcttgcgctcagtcttctgttaccgaaggctttcttaagcagaggtaaaaggcaagagcctccacctacaccagagggcaagcttggccgctttccacctatgatgcatcaccatcaggcaccctcagatgggcagacacccggtgctcggttccaacggtcacacctggccgaggccttcgccaaagctaaaggctccggtggcggagcagggggcggtgggagcggacgagggctcatgggccagataatacctatctatggttttggtatcttcttatacatcttgtatatcctgttcaagctatcaaaagggaaaactactgcagaggatggtaaatgttatacagcgatgcccgggaatacccacaggaaaatttcgtaccctgaagaaacttatcctatctacgatttatcagactgtattaaacgacggcaggaaacaatcctggtggactaccctgatccgaaagaactgtctgccgaagagattgcagagcgtatgggcatgatcgaagaagaggagagcgatcacctcgggtgggaatcactgcccactgaccccagggcacaagaagataactcagtcacctcctgcgaccccaaacccgaaacctgctcctgttgtttccacgaagatgaggatccagctgtactggccgagaacgccgggttttccgccgacagctacccagaacaggaggagacaactaaagaggagtggagtcaagacttcaaggacgaaggtctgggaatcagcaccgacaaagcatacaccggcagcatgttgcgaaagcggaacccccagggcctggaatag

SEQ ID NO: 82344 - DNA, 867 bp, Artificial Sequence
  derived and/or modified sequence
atggcctacagcacagtgcagagggtggccctggccagcggcctggtgctggccctgagcctgctgctgcccaaggccttcctgagccggggcaagaggcaggagcccccacccaccccagagggcaagctgggccgcttcccccccatgatgcaccaccaccaggcccccagtgatggccagacccctggggcccgcttccagaggagccacctggccgaggcctttgccaaggccaagggcagcggcggcggggccggcggcggcggcagcggccggggcctgatgggccagatcatccccatctacggcttcggcatcttcctgtacatcctgtacatcctcttcaagctgagcaagggcaagaccacagcagaagatggcaagtgctacacagccatgcctggcaacacccacaggaagatctcctacccagaggagacctaccccatctatgacctgagtgactgcatcaagaggcggcaggagaccatcctggtggactacccagaccccaaggagctgtctgctgaggagattgctgagaggatgggcatgattgaggaggaggagagtgaccacctgggctgggagagcctgcccacagacccccgggcccaggaggacaacagcgtgaccagctgtgaccccaagccagagacctgcagctgctgcttccatgaagatgaggaccctgctgtgctggctgaaaatgccggcttctctgctgacagctacccagagcaggaggagaccaccaaggaggagtggagccaggacttcaaggatgagggcctgggcatcagcacagacaaggcctacacaggctccatgctgaggaagaggaacccccagggcctggagtag

SEQ ID NO: 82345 - DNA, 867 bp, Artificial Sequence
  derived and/or modified sequence
atggcctacagcaccgtgcagcgggtggccctggccagcggcctggttctggcactgtcattgctgttacccaaagccttcctgtctaggggcaaacgccaagagcccccccccacaccggagggaaagctcgggcgcttccccccaatgatgcatcatcaccaggccccctctgatggccagacccccggcgcgcggtttcagaggagtcacctcgccgaggccttcgctaaagctaaggggagtggaggtggcgccggcgggggcggcagcggccgcggcctgatgggtcaaattataccaatctacgggtttgggatctttttgtacattctgtacatcctgtttaagctctcaaaggggaaaactacggctgaggacgggaagtgttacactgccatgcctggaaatactcacaggaaaatctcctatccagaagagacgtacccgatttacgatttgtctgactgtataaagaggaggcaagaaaccatactagtggactatccagaccccaaggagctgtcagcagaagaaatcgctgaacgtatgggtatgatagaagaggaggaaagcgatcatcttggttgggaatccctgcctacagaccctcgcgcccaggaggacaatagcgtgacgtcgtgcgatcccaaacctgaaacctgctcctgttgttttcatgaggatgaagaccctgccgtcctcgccgagaatgcagggttcagtgctgattcctatccagagcaggaagaaaccacgaaggaggagtggtcacaagacttcaaggatgagggactgggtattagcacagacaaggcatacacaggcagcatgctgaggaagcgcaatccgcagggactggaatag

SEQ ID NO: 82346 - DNA, 867 bp, Artificial Sequence
  derived and/or modified sequence
atggcctatagcacagtgcagcgggtagcccttgccagtggcctggtcctggcactgtcgttattactgcctaaagcctttcttagccgcggaaaacgtcaagaaccacccccaactccagaaggcaaactagggcgatttccccctatgatgcatcaccaccaagctccctcggatggacagaccccaggcgctaggtttcagagatcgcacctggccgaagcgtttgcaaaagcaaagggctctggaggcggagctggcggagggggatctgggaggggcctcatgggacagatcatcccgatatacggatttgggatctttctgtacattctctatatactgttcaaactgagcaagggcaagactacagctgaggacggtaagtgttacaccgcaatgccaggaaatacacatcgaaagatttcctatcccgaggaaacttacccaatctatgatctttctgactgtattaaacgcaggcaggagacaatcctcgtggactacccagatcctaaggagctgtccgcagaagagattgctgaaaggatgggcatgattgaagaagaagagagtgaccatcttggttgggaatctcttccaacagacccccgtgcgcaagaggataattcagtcacaagctgtgatccaaaacccgagacctgtagctgttgttttcacgaggatgaggaccccgcagtgttggccgaaaacgccggattttccgcggacagctaccccgagcaggaggagacaacgaaggaagagtggagtcaggatttcaaagacgagggcctgggcatctctactgataaagcctacaccggatctatgctcagaaagaggaacccacaagggttggagtag

SEQ ID NO: 82347 - DNA, 867 bp, Artificial Sequence
  derived and/or modified sequence
atggcgtactccacagtgcagagagtcgctctggcttctgggcttgtcctggctctgtcgctgctgctgcccaaggccttcctgtcccgcgggaagcggcaggagccgccgccgacacctgaaggaaaattgggccgatttccacctatgatgcatcatcaccaggcaccctcagatggccagactcctggggctcgtttccagaggtctcaccttgccgaggcatttgcaaaggccaaaggatcaggtggaggtgctggaggaggaggtagtggaagaggtctgatggggcagattattccaatctacggttttgggatttttttatatatactgtacattctatttaagctctcaaaggggaaaacaactgcagaggatgggaaatgctatactgccatgcctggaaacacccacaggaaaattagttaccctgaagagacttacccaatttatgacctttcagactgtatcaagcgtaggcaagaaacaatcttggtggattaccctgacccaaaagaactttctgctgaagaaatagctgaaagaatgggaatgatagaagaggaagaatcagatcatttgggttgggaaagtctgcccactgaccccagagcccaggaagataattctgttacctcgtgtgatccaaagccagaaacatgttcctgctgttttcatgaagacgaggatcctgctgtcttggcagagaatgctggattcagtgcagatagctaccctgagcaagaggaaaccaccaaagaagagtggtcccaagactttaaagatgaagggttgggcatcagcaccgataaagcatatacaggcagcatgctgaggaagcgtaacccccagggtttagagtga

SEQ ID NO: 82348 - protein, 362 aa, Artificial Sequence
  derived and/or modified sequence
MDAQDCQAAASPEPPGPPARSCVAAWWDMVDRNLRYFPHSCSMLGRKIAALYDSFTSKSLKEHVFLPLIDMLIYFNFFKAPFLVDLKKPELKIPHTVNFYLRVEPGVMLGIWHTVPSCRGEDAKGKDCCWYEAALRDGNPIIVYLHGSAEHRAASHRLKLVKVLSDGGFHVLSVDYRGFGDSTGKPTEEGLTTDAICVYEWTKARSGITPVCLWGHSLGTGVATNAAKVLEEKGCPVDAIVLEAPFTNMWVASINYPLLKIYRNIPGFLRTLMDALRKDKIIFPNDENVKFLSSPLLILHGEDDRTVPLEYGKKLYEIARNAYRNKERVKMVIFPPGFQHNLLCKSPTLLITVRDFLSKQWS

SEQ ID NO: 82349 - DNA, 1089 bp, Artificial Sequence
  derived and/or modified sequence
atggacgcccaggactgccaggccgccgccagccccgagccccccggcccccccgccagaagctgcgtggccgcctggtgggacatggtggacagaaacctgagatacttcccccacagctgcagcatgctgggcagaaagatcgccgccctgtacgacagcttcaccagcaagagcctgaaggagcacgtgttcctgcccctgatcgacatgctgatctacttcaacttcttcaaggcccccttcctggtggacctgaagaagcccgagctgaagatcccccacaccgtgaacttctacctgagagtggagcccggcgtgatgctgggcatctggcacaccgtgcccagctgcagaggcgaggacgccaagggcaaggactgctgctggtacgaggccgccctgagagacggcaaccccatcatcgtgtacctgcacggcagcgccgagcacagagccgccagccacagactgaagctggtgaaggtgctgagcgacggcggcttccacgtgctgagcgtggactacagaggcttcggcgacagcaccggcaagcccaccgaggagggcctgaccaccgacgccatctgcgtgtacgagtggaccaaggccagaagcggcatcacccccgtgtgcctgtggggccacagcctgggcaccggcgtggccaccaacgccgccaaggtgctggaggagaagggctgccccgtggacgccatcgtgctggaggcccccttcaccaacatgtgggtggccagcatcaactaccccctgctgaagatctacagaaacatccccggcttcctgagaaccctgatggacgccctgagaaaggacaagatcatcttccccaacgacgagaacgtgaagttcctgagcagccccctgctgatcctgcacggcgaggacgacagaaccgtgcccctggagtacggcaagaagctgtacgagatcgccagaaacgcctacagaaacaaggagagagtgaagatggtgatcttcccccccggcttccagcacaacctgctgtgcaagagccccaccctgctgatcaccgtgagagacttcctgagcaagcagtggagctag

SEQ ID NO: 82350 - DNA, 1708 bp, Artificial Sequence
  derived and/or modified sequence
gggacacggcgcgggatggacgcgcaggactgccaggcggccgcatcgcccgagccgcccgggcccccagcccgtagctgcgtggccgcctggtgggacatggtcgaccgcaacctgcgatattttccacactcctgttcaatgctcggaagaaaaattgctgctctgtatgacagctttactagtaaatccttaaaagaacacgttttccttcctctgatagacatgctaatttattttaattttttcaaagccccatttcttgtggatttaaagaaaccagagttaaagattcctcacacagtgaacttctacctgagagttgaacctggggtgatgctagggatctggcacacagtccccagctgccggggggaagatgccaaggggaaggactgttgctggtatgaagcagcccttcgtgatgggaacccaattattgtttatcttcatggcagtgcagaacacagggcagcttcgcacagactgaagctggtaaaggtgctgagtgatggtggctttcatgtcttgtctgttgactacagaggatttggggactctacaggtaagcccacagaggagggactgactacggatgccatttgtgtctatgagtggaccaaggcaagaagtggcatcactcccgtgtgtctctggggccactctctgggtacaggagttgcaacaaatgctgcaaaagtgctagaagaaaaaggatgcccagttgatgctattgtcttggaagctccatttaccaacatgtgggttgcaagtatcaattatcccttgttaaagatttaccggaacattccaggatttttacgtacacttatggatgccctgagaaaagacaaaataatctttcctaatgatgaaaatgttaaattcctttcttctcctcttctcatcttacatggagaggatgacaggacagtgcctttggagtatgggaaaaagctctatgaaattgcacgcaatgcatacaggaacaaagagagggtcaagatggttatctttcctcctggcttccaacacaacctgctttgtaaaagccccacactgttaataaccgtgagagatttcctgagcaagcagtggtcatgagtctgggaggagtggaaatcttcaatgaagacttggcccaaacaccacctgtgatgtatattgttctaatgtaaaattgtactgggctggtcggatgagctgaggccattgacttctctacaaatcacttgccattttaacaacagaaagtacgaatgttaggcagtatggaatgttcttatttagcttatcataatctactttgtaaaacatgctgaaacctcactgtggagaaccagaatttggtaaaatctagatcctatctaaaaatatgtagttattaaacattctgtggatatttgtgaataaggtagttgctatggtccgaatatctgggcctgcccccccaaattatgctgaaacctaatcaccagtgtgatggtaataggaggtgggactgagctctgatgaatgagattagtgcccttataaattatgaccaaaagagctcttcactcctcctaccatttgaggatacagtgagaagccttcatctatgaaccacaaagtagccctcatcagacactgaatcagccagtgccttgctcttggacttcccagcccccagaactgtgagaaataaatttctgttgtttataagcta

SEQ ID NO: 82351 - DNA, 1089 bp, Artificial Sequence
  derived and/or modified sequence
atggatgcacaggactgccaagcggctgcttctcctgagcccccgggcccccccgcaaggagttgcgttgccgcctggtgggacatggtggaccgaaatctgcgctactttccacactcttgctcaatgcttggtaggaaaattgccgccctgtacgacagttttacgagcaagtccctcaaggagcatgtgttcctgcccttaatcgatatgctgatatattttaattttttcaaggctccattcctagtggaccttaagaaacccgagctgaaaattccacacaccgtgaacttctacctcagggttgagccaggcgtgatgttgggcatctggcatacagtgccctcgtgcagaggggaagacgcaaaagggaaagattgttgctggtacgaggctgcccttagagacggcaacccaattattgtatatctccacggaagtgctgaacatcgcgcggcttcacacagactgaagctcgtaaaggttctctccgacggtgggttccatgttctcagcgtcgattatcggggcttcggcgactcaaccgggaagcctacggaggaagggcttaccacagacgccatctgcgtatacgagtggacaaaggcaaggagtggaattacccctgtgtgcctttgggggcactccctcggtacaggagttgccactaatgccgccaaggttttggaggaaaaaggatgccccgtggatgctatcgtgctggaggccccattcaccaatatgtgggtcgctagtattaattatccactcctaaaaatctacaggaacatccccggatttctaagaaccttgatggacgcactgaggaaggataaaattatatttcccaacgatgagaatgtcaaattcctgtcctctcctcttctgatcttgcacggcgaggatgatcgaaccgtcccactggaatacgggaaaaagctgtacgaaatcgcccgcaacgcgtacaggaacaaggagagggtgaaaatggtcatcttccctccgggcttccagcataacctcctatgcaagtctcctactttgctgattaccgtgcgagattttctatccaagcaatggtcgtag

SEQ ID NO: 82352 - DNA, 1089 bp, Artificial Sequence
  derived and/or modified sequence
atggatgcccaggactgccaggccgccgccagccctgagcccccaggccccccagcccggagctgtgtggccgcctggtgggacatggtggacaggaacctgcgctacttcccccacagctgcagcatgctgggcaggaagattgctgccctgtatgacagcttcaccagcaagagcctgaaggagcacgtgttcctgcccctgattgacatgctgatctacttcaacttcttcaaggcccccttcctggtggacctgaagaagccagagctgaagatcccccacacagtgaacttctacctgcgggtggagcccggggtgatgctgggcatctggcacacagtgcccagctgcagaggagaagatgccaagggcaaggactgctgctggtatgaagctgccctgagagatggcaaccccatcatcgtgtacctgcacggcagcgctgagcacagagctgccagccaccggctgaagctggtgaaggtgctgagtgatggcggcttccacgtgctgtctgtggactaccggggctttggagacagcacaggcaagcccacagaggagggcctgaccacagatgccatctgtgtgtatgagtggaccaaggcccggagcggcatcacccctgtgtgcctgtggggccacagcctgggcaccggggtggccaccaatgctgccaaggtgctggaggagaagggctgccctgtggatgccatcgtgctggaggcccccttcaccaacatgtgggtggccagcatcaactaccccctgctgaagatctacagaaacatccctggcttcctgcggaccctgatggatgccctgaggaaggacaagatcatcttccccaatgatgaaaatgtgaagttcctgagcagccccctgctgatcctgcacggggaggatgacagaacagtgcccctggagtatggcaagaagctgtatgagatcgccagaaatgcctacagaaacaaggagcgggtgaagatggtgatcttccccccaggcttccagcacaacctgctgtgcaagagccccaccctgctgatcaccgtgcgggacttcctgagcaagcagtggagctag

SEQ ID NO: 82353 - DNA, 1089 bp, Artificial Sequence
  derived and/or modified sequence
atggacgcccaggactgccaggccgccgccagccccgagccccccggccccccagccaggtcttgcgttgccgcctggtgggacatggtcgacaggaatctgagatactttccccattcatgcagcatgttgggtagaaagattgccgctctatatgacagctttacgtcgaagtcattgaaagagcatgtgttcctccccctgatcgatatgcttatatatttcaacttctttaaggccccttttctggtggatctcaagaagccagagttgaaaatccctcataccgtgaatttttacctccgtgtggagcccggtgtaatgctgggcatttggcatactgtgccgagctgtagaggcgaagatgcgaagggtaaagattgctgctggtacgaagccgccttgagggacggcaaccccataatcgtatatctccatgggtctgctgaacatagggcagcctcgcaccggctgaaactggtcaaagtgctgtccgatggcggcttccatgtattgtccgttgattaccggggatttggcgattccacagggaagcccaccgaagagggactgaccaccgacgccatttgcgtatatgagtggaccaaggcgaggagcggaattactcccgtgtgcctctggggtcatagcttaggcaccggggtagccaccaatgctgccaaggtcctcgaagaaaagggttgtcccgtagacgcaatcgtcctggaagcacctttcacgaacatgtgggtggcaagtatcaactacccactgctgaaaatttataggaacatccccgggttcctgaggacacttatggacgccttaaggaaagacaagataatttttcccaacgatgaaaacgtgaagttcttgtctagtccgcttcttatcctgcacggcgaagatgacaggacagtgcccttggaatacgggaagaagttatacgaaatagcgcgcaatgcatacaggaacaaagaaagggtgaagatggtgatttttccacccggctttcagcataacctcctgtgcaagtcacctacgctcctcattacggttagagatttcctgtctaagcaatggtcatag

SEQ ID NO: 82354 - DNA, 1089 bp, Artificial Sequence
  derived and/or modified sequence
atggatgcccaggattgccaggccgctgcttccccagaaccaccgggacctccagcacgctcttgtgtggcagcttggtgggatatggtggatcgaaacttgaggtacttcccacactcttgctcaatgctgggcagaaagatcgctgcactgtacgactccttcacctccaagtctcttaaagagcatgtgtttctgcctctgatcgacatgctcatctatttcaatttttttaaagctccatttcttgtggatttaaagaagccagagttaaagattccacacacagtgaatttctatcttagggtcgagccgggtgtcatgcttgggatatggcacaccgtcccttcctgccggggtgaagatgccaagggtaaggattgttgctggtatgaggctgctctacgcgacgggaaccccataattgtctatctgcacggttcggccgagcatagagcggcttctcaccgcctaaagctcgtaaaggtgcttagcgacggagggttccacgttcttagcgtggattatcgaggctttggagattcgaccggtaagccaacagaagaaggactcacgaccgatgcaatctgcgtatatgagtggaccaaagcacgtagcggaattaccccagtttgcctgtgggggcacagcctcgggactggcgtggcaaccaatgcagccaaggtgttggaagagaaaggatgtcctgttgatgcaatcgtgctggaagccccattcaccaacatgtgggtcgcgtccatcaattatcctttactcaagatctaccgtaatatacccggatttttaaggactctcatggatgccctgagaaaggacaagattatcttcccgaacgatgagaacgttaaattcctgtcatcaccgctgctgatacttcacggggaagacgacagaactgtgcctctggaatacggaaaaaagttatacgaaatcgctcgcaatgcgtatcggaacaaagagcgggtgaaaatggtgatttttcccccagggtttcagcataatctcttgtgcaagagtcctaccctgctgataaccgtcagagacttcctcagtaaacagtggagttag

SEQ ID NO: 82355 - protein, 117 aa, Artificial Sequence
  derived and/or modified sequence
MGDDRPFVCNAPGCGQRFTNEDHLAVHKHKHEMTLKFGPARTDSVIIADQTPTPTRFLKNCEEVGLFNELASSFEHEFKKAADEDEKKARSRTVAKKLVVFRPRLFLLCFGIIFLIG

SEQ ID NO: 82356 - DNA, 354 bp, Artificial Sequence
  derived and/or modified sequence
atgggggacgacaggccctttgtatgtaacgctcctggctgcggacagagatttaccaacgaagaccatctagccgtgcacaagcacaagcatgaaatgacactgaaatttggcccggcacggaccgactcagtgatcatcgctgaccagaccccaaccccaactagatttctgaagaactgtgaggaagtgggcctcttcaacgagttggcgtcttcattcgaacatgaatttaagaaagcagctgacgaggatgaaaaaaaggctcgcagtcgcactgttgccaaaaagttagtagtttttcggcctaggctgttcttgctctgcttcggcataatcttcctcattggctag

SEQ ID NO: 82357 - DNA, 354 bp, Artificial Sequence
  derived and/or modified sequence
atgggtgacgatcgaccttttgtgtgcaatgctcccggatgcggtcagcggttcactaatgaggatcacttagccgtgcacaaacataaacacgagatgacactcaagttcggacccgcccgtaccgactcagtgattattgctgaccaaacccccactccgactaggtttttaaaaaactgtgaggaagtcggattgttcaatgaattagccagttctttcgagcacgagttcaaaaaggcggccgatgaggacgagaagaaggctcgctcccggactgtagctaagaagctggtcgtgttccggccgcggctcttcttactctgcttcggcatcatttttctgatcggctag

SEQ ID NO: 82358 - DNA, 354 bp, Artificial Sequence
  derived and/or modified sequence
atgggagatgaccggccctttgtgtgcaatgcccctggctgcggccagcgcttcaccaatgaagaccacctggccgtgcacaagcacaagcatgagatgaccctgaagtttggacctgccaggacagacagcgtcatcatcgctgaccagacccccacccccacccgcttcctgaagaactgtgaggaggtgggcctcttcaatgagctggccagcagctttgagcacgagttcaagaaggccgcagatgaagatgagaagaaggcccggagcaggacagtggccaagaagctggtggtgttccggcccaggctcttcctgctgtgcttcggcatcatcttcctgattggatag

SEQ ID NO: 82359 - DNA, 354 bp, Artificial Sequence
  derived and/or modified sequence
atgggcgacgaccggcccttcgtgtgcaacgcccccggctgcggccagaggtttacgaatgaggatcacctcgctgtgcacaagcataaacacgaaatgaccctcaagttcggcccggccaggactgatagtgtcatcatagccgatcaaacaccaactccgacacgcttcctgaagaactgtgaagaggtgggccttttcaatgagctggcatcctccttcgaacatgagtttaaaaaggccgccgacgaggacgaaaaaaaagctaggtcccggaccgtagccaaaaagctagtggtctttaggccgcgcctcttcctcttgtgtttcggaataatcttcctcatagggtag

SEQ ID NO: 82360 - DNA, 354 bp, Artificial Sequence
  derived and/or modified sequence
atgggcgacgaccggcccttcgtgtgcaacgcccccggctgcggccaacgcttcactaatgaggaccacttagcagttcacaaacacaaacacgaaatgaccctcaagtttggcccggctaggacagacagcgtcatcatcgccgaccagacccctacccccactcgctttcttaaaaactgtgaagaggtggggttatttaatgagttggccagcagcttcgaacacgagtttaaaaaagctgcagatgaagatgagaagaaagcaagatctcggacagtagctaagaagctggtggtcttcagaccaagattgttcctcctgtgttttggaatcatattcctcattggatag

SEQ ID NO: 82361 - DNA, 354 bp, Artificial Sequence
  derived and/or modified sequence
atgggagacgatcgccctttcgtctgcaatgcacccggatgtggccagagatttaccaacgaggaccatctggccgtccataagcacaagcacgaaatgacgctgaagtttggcccagctcgaacagattcagtgataatcgccgaccagaccccgacccccacccggtttcttaagaattgcgaggaggtgggcttgttcaacgaactcgctagttcttttgaacacgagtttaagaaggccgctgacgaggacgagaagaaagctcgtagccggaccgttgccaaaaaactggtggttttccgcccacgattattccttctctgcttcggaatcattttccttattggttag

SEQ ID NO: 82362 - DNA, 354 bp, Artificial Sequence
  derived and/or modified sequence
atgggtgacgatagaccgttcgtgtgtaacgcgccaggctgtggccaaaggttcacaaacgaagatcacctcgcggtacacaaacataaacacgagatgacactgaagtttggcccagctcgcaccgactcagtgatcatcgccgatcaaacccccactcctactcgctttctgaagaattgtgaagaagtggggttattcaacgaactcgcttcttccttcgagcacgaattcaaaaaggctgccgacgaagatgagaagaaagcaagatcacgcaccgtggccaaaaagttggtggtgtttaggccccgtttgttcctcctatgctttggcataatattcctcatcggatag

SEQ ID NO: 82363 - DNA, 354 bp, Artificial Sequence
  derived and/or modified sequence
atgggcgacgacagacccttcgtgtgcaacgcccccggctgcggccagagattcaccaacgaggaccacctggccgtgcacaagcacaagcacgagatgaccctgaagttcggccccgccagaaccgacagcgtgatcatcgccgaccagacccccacccccaccagattcctgaagaactgcgaggaggtgggcctgttcaacgagctggccagcagcttcgagcacgagttcaagaaggccgccgacgaggacgagaagaaggccagaagcagaaccgtggccaagaagctggtggtgttcagacccagactgttcctgctgtgcttcggcatcatcttcctgatcggctag

SEQ ID NO: 82364 - DNA, 774 bp, Artificial Sequence
  derived and/or modified sequence
ggggggaaggcggggccagaggcttgaagtgtggggagaacttggtctcctctctgctatatgaaatatgggagacgacagaccgtttgtgtgcaatgccccgggctgtggacagagatttacaaacgaggaccacctggcagttcataaacacaagcatgagatgacattgaaatttggcccagcccgaactgactcagtcatcattgcagatcaaacgcctactccaactagattcctgaagaactgtgaggaggtgggactcttcaatgaactagctagctcctttgaacatgaattcaagaaagctgcagatgaggatgagaaaaaggcaagaagcaggactgttgccaaaaaactggtggtattcagacctaggctatttttattgtgctttgggataattttcttaattggttaaaacacaaaatcatgggcttagtagagtaaaaccagtaaaaccagatagtagtcactaatcccagtcagccattcaggtctttaggagttccagatgatggatcagcacaagtctgtcgtcaccgaaaattagtcctcttgttcttccaggggagtattagtttaataatcggttttttaaaaaatatttatattataaatatgttgaagatgttaaaaggtgataaattactcagattttgttggataacatatttgttgccaaattccactcttttctgagctgatcagacttctcagctacactgtttttttgaatcagcaagtcaataaacatttatcaaatttccactc

SEQ ID NO: 82365 - DNA, 860 bp, Artificial Sequence
  derived and/or modified sequence
ttctcgcgagagttgagcgcgcctggccggacgggaggaaagtatccgttccgccaaggggggaaaggaggagctggagacagattgtaggaccgagcgcgggcaggcgggaggcaacggagctaccagccgctcctctctgctatatgaaatatgggagacgacagaccgtttgtgtgcaatgccccgggctgtggacagagatttacaaacgaggaccacctggcagttcataaacacaagcatgagatgacattgaaatttggcccagcccgaactgactcagtcatcattgcagatcaaacgcctactccaactagattcctgaagaactgtgaggaggtgggactcttcaatgaactagctagctcctttgaacatgaattcaagaaagctgcagatgaggatgagaaaaaggcaagaagcaggactgttgccaaaaaactggtggtattcagacctaggctatttttattgtgctttgggataattttcttaattggttaaaacacaaaatcatgggcttagtagagtaaaaccagtaaaaccagatagtagtcactaatcccagtcagccattcaggtctttaggagttccagatgatggatcagcacaagtctgtcgtcaccgaaaattagtcctcttgttcttccaggggagtattagtttaataatcggttttttaaaaaatatttatattataaatatgttgaagatgttaaaaggtgataaattactcagattttgttggataacatatttgttgccaaattccactcttttctgagctgatcagacttctcagctacactgtttttttgaatcagcaagtcaataaacatttatcaaatttccactc

SEQ ID NO: 82366 - protein, 744 aa, Artificial Sequence
  derived and/or modified sequence
MIKRRAHPGAGGDRTRPRRRRSTESWIERCLNESENKRYSSHTSLGNVSNDENEEKENNRASKPHSTPATLQWLEENYEIAEGVCIPRSALYMHYLDFCEKNDTQPVNAASFGKIIRQQFPQLTTRRLGTRGQSKYHYYGIAVKESSQYYDVMYSKKGAAWVSETGKKEVSKQTVAYSPRSKLGTLLPEFPNVKDLNLPASLPEEKVSTFIMMYRTHCQRILDTVIRANFDEVQSFLLHFWQGMPPHMLPVLGSSTVVNIVGVCDSILYKAISGVLMPTVLQALPDSLTQVIRKFAKQLDEWLKVALHDLPENLRNIKFELSRRFSQILRRQTSLNHLCQASRTVIHSADITFQMLEDWRNVDLNSITKQTLYTMEDSRDEHRKLITQLYQEFDHLLEEQSPIESYIEWLDTMVDRCVVKVAAKRQGSLKKVAQQFLLMWSCFGTRVIRDMTLHSAPSFGSFHLIHLMFDDYVLYLLESLHCQERANELMRAMKGEGSTAEVREEIILTEAAAPTPSPVPSFSPAKSATSVEVPPPSSPVSNPSPEYTGLSTTGAMQSYTWSLTYTVTTAAGSPAENSQQLPCMRNTHVPSSSVTHRIPVYPHREEHGYTGSYNYGSYGNQHPHPMQSQYPALPHDTAISGPLHYAPYHRSSAQYPFNSPTSRMEPCLMSSTPRLHPTPVTPRWPEVPSANTCYTSPSVHSARYGNSSDMYTPLTTRRNSEYEHMQHFPGFAYINGEASTGWAK

SEQ ID NO: 82367 - DNA, 2188 bp, Artificial Sequence
  derived and/or modified sequence
tggagaggccacagctgctggcttcctgggcttctccaaactcctgtgtgtcgccactgccaccggcagggagccaggagagagacagaaaggggctgagacagaatgatcaaaaggagagcccaccctggtgcgggaggcgacaggaccaggcctcgacggcgccgttccactgagagctggattgaaagatgtctcaacgaaagtgaaaacaaacgttattccagccacacatctctggggaatgtttctaatgatgaaaatgaggaaaaagaaaataatagagcatccaagccccactccactcctgctactctgcaatggctggaggagaactatgagattgcagagggggtctgcatccctcgcagtgccctctatatgcattacctggatttctgcgagaagaatgatacccaacctgtcaatgctgccagctttggaaagatcataaggcagcagtttcctcagttaaccaccagaagactcgggacccgaggacagtcaaagtaccattactatggcattgcagtgaaagaaagctcccaatattatgatgtgatgtattccaagaaaggagctgcctgggtgagtgagacgggcaagaaagaagtgagcaaacagacagtggcatattcaccccggtccaaactcggaacactgctgccagaatttcccaatgtcaaagatctaaatctgccagccagcctgcctgaggagaaggtttctacctttattatgatgtacagaacacactgtcagagaatactggacactgtaataagagccaactttgatgaggttcaaagtttccttctgcacttttggcaaggaatgccgccccacatgctgcctgtgctgggctcctccacggtggtgaacattgtcggcgtgtgtgactccatcctctacaaagctatctccggggtgctgatgcccactgtgctgcaggcattacctgacagcttaactcaggtgattcgaaagtttgccaagcaactggatgagtggctaaaagtggctctccacgacctcccagaaaacttgcgaaacatcaagttcgaattgtcgagaaggttctcccaaattctgagacggcaaacatcactaaatcatctctgccaggcatctcgaacagtgatccacagtgcagacatcacgttccaaatgctggaagactggaggaacgtggacctgaacagcatcaccaagcaaaccctttacaccatggaagactctcgcgatgagcaccggaaactcatcacccaattatatcaggagtttgaccatctcttggaggagcagtctcccatcgagtcctacattgagtggctggataccatggttgaccgctgtgttgtgaaggtggctgccaagagacaagggtccttgaagaaagtggcccagcagttcctcttgatgtggtcctgtttcggcacaagggtgatccgggacatgaccttgcacagcgcccccagcttcgggtcttttcacctaattcacttaatgtttgatgactacgtgctctacctgttagaatctctgcactgtcaggagcgggccaatgagctcatgcgagccatgaagggagaaggaagcactgcagaagtccgagaagagatcatcttgacagaggctgccgcaccaaccccttcaccagtgccatcgttttctccagcaaaatctgccacatctgtggaagtgccacctccctcttcccctgttagcaatccttcccctgagtacactggcctcagcactacaggtaatggaaagtccttcaaaaactttgggtagttaatgtttgaagaaagggctttctgccagcctgggcaacatagtgagacttcatttccacacacacaaaaagccagacatcttggctcacacctgtagtcccagctacttgggaggctgaggtgggagaattgcttgagcccaggagctacgatcgcaccactgcattctagccttagtgatacagtgagaccttgtctcaaaaaaagaaaaacagggctttctggaaaaacattcttctcccacaatctccaaaagataatgccaaaacctgggtatcttcctggatttgtgaatgacgtacaggtattcatttattcattggtacacattctgtatgctgctgttttcaagttggcaaattaagcatatgataaaatcccaaaactaa

SEQ ID NO: 82368 - DNA, 2235 bp, Artificial Sequence
  derived and/or modified sequence
atgattaaacgccgtgcacacccgggcgccggcggggaccgcaccaggccacgccgccggcgctccacagagtcttggatcgagcggtgcctgaacgaaagtgagaataagaggtattccagccatacctcgctagggaacgtgtcaaatgatgagaatgaggaaaaggagaacaatcgggccagcaaaccacatagcacccctgcaactctccagtggctggaggagaactacgagattgccgagggcgtgtgtattcctcgttcggctctctacatgcactacctggacttttgcgaaaagaatgacactcagcctgtgaacgcggcttcgttcggaaagattataagacagcagtttccccagttgacaacaagaaggctgggcacacgtggtcagtctaagtaccattattatggcatcgccgtcaaagaaagttctcaatattacgacgtcatgtactctaagaaaggcgccgcatgggtgagcgagaccgggaagaaagaggtgtctaaacagacagtggcttacagccccaggagtaaattgggcactctcctgcctgagttcccaaacgtgaaagacttaaacttgcctgctagcctgcccgaggagaaggttagcaccttcattatgatgtatcgaacccattgtcaaagaattctggataccgtgataagagcaaacttcgacgaagtgcagtcttttctgctgcatttttggcaaggaatgcccccgcatatgctgccagtgctagggtcgagcaccgtggtgaacattgtaggggtctgcgattctatattgtataaggccataagtggcgttcttatgcctacagtgctacaggcactacccgacagcctgactcaggttatccgcaaatttgccaaacagctcgacgagtggcttaaggtggctctgcacgatctcccggaaaatttgagaaacattaagttcgaattatcccgcaggttcagccagatattaaggcgccaaacttcacttaatcatctgtgtcaggcttcccgcactgttatccactccgctgatatcaccttccaaatgctagaagactggcgcaatgtagacctgaattcaattaccaagcagacactctacacaatggaggacagcagagacgaacacagaaaattgattacacagctgtatcaagagtttgaccatttacttgaagagcagtcccccattgaaagctatatcgaatggctggacaccatggtcgatagatgtgtcgtcaaggtggccgctaaaagacaggggagcctgaagaaggtggcacaacagtttctcttaatgtggtcatgttttggcacaagagtaatccgggacatgacgctccacagcgccccgtccttcggaagttttcacctgatccaccttatgttcgatgactacgtgctgtatttgttggaatcactgcattgtcaggaacgagctaatgaactcatgagggcaatgaagggggaaggttccacagccgaggtgcgagaggagatcatcctaaccgaggcagcagcccctaccccctctcccgtgcctagtttttcacccgctaaatctgccacatcggttgaggtgccaccacctagttcaccggttagtaatccgagtcccgaatatactggtcttagtacaaccggcgcaatgcagtcttatacatggtcgctgacatacaccgttaccacagcggctgggtcacctgctgagaattctcaacagctgccatgtatgagaaacacccacgttccgagctcttctgtaacccaccgtattcctgtatacccccatcgggaagagcacggatatacagggtcctacaactatggttcatatggcaatcagcatcctcatccgatgcaatcccagtacccagcactgccacatgacacagcgatctctggacccctccattacgctccctaccatcgctcaagcgcacagtacccattcaactcccctacttccaggatggaaccttgtctcatgtccagcacgcctcgtctccatccgaccccagtaacgccacgctggcctgaggtcccatcagccaacacctgttatactagcccatcagttcactctgccaggtacggaaactcctcggatatgtacacgccacttactacccgacgcaattccgagtacgagcacatgcagcatttcccaggcttcgcctacatcaacggagaggcttccacgggatgggccaaatag

SEQ ID NO: 82369 - DNA, 2235 bp, Artificial Sequence
  derived and/or modified sequence
atgatcaagaggcgggcccaccctggggccggcggggacaggacccggcccaggagaagaagaagcacagagagctggattgagcgctgcctgaatgaaagtgagaacaagcgctacagcagccacaccagcctgggcaatgtgtccaatgatgaaaatgaggagaaggagaacaacagagccagcaagccccacagcaccccagccaccctgcagtggctggaggagaactatgaaattgctgagggcgtgtgcatccccaggtctgccctgtacatgcactacctggacttctgtgagaagaatgacacccagcctgtgaatgctgccagctttgggaagatcatccggcagcagttcccccagctgaccacccggcggctgggcacccggggccagagcaagtaccactactatggaattgctgtgaaggagagcagccagtactatgatgtgatgtacagcaagaagggagctgcctgggtgtctgaaacaggcaagaaggaggtgtccaagcagacagtggcctacagccccaggagcaagctgggcaccctgctgcctgagttccccaacgtgaaggacctgaacctgcctgccagcctgcctgaggagaaggtgtccaccttcatcatgatgtaccgcacccactgccagaggatcctggacaccgtcatccgggccaactttgatgaggtgcagagcttcctgctgcacttctggcagggcatgccaccccacatgctgcctgtgctgggcagcagcacagtggtgaacatcgtgggcgtgtgtgacagcatcctgtacaaggccatctctggagtgctgatgcccaccgtgctgcaggccctgcctgacagcctgacccaggtgatcaggaagtttgccaagcagctggatgagtggctgaaggtggccctgcatgacctgcctgagaacctgaggaacatcaagtttgagctgagccgccgcttcagccagatcctgcggcggcagaccagcctgaaccacctgtgccaggccagcaggacagtcatccacagcgctgacatcaccttccagatgctggaggactggagaaatgtggacctgaacagcatcaccaagcagaccctgtacaccatggaggacagcagagatgagcacaggaagctgatcacccagctgtaccaggagtttgaccacctgctggaggagcagagccccatcgagagctacatcgagtggctggacaccatggtggacagatgtgtggtgaaggtggccgccaagaggcagggcagcctgaagaaggtggcccagcagttcctgctgatgtggagctgcttcggcaccagggtcatccgggacatgaccctgcacagcgcccccagctttggcagcttccacctgatccacctgatgtttgatgattatgtgctgtacctgctggagagcctgcactgccaggagcgggccaatgagctgatgagggccatgaagggggagggcagcacagctgaggtgcgggaggagatcatcctgacagaagctgctgcccccacccccagccctgtgcccagcttcagccctgccaagagcgccacctctgtggaggtgcccccacccagcagccctgtgagcaaccccagccctgagtacacaggcctgagcaccactggagccatgcagagctacacctggagcctgacctacacagtgaccacagctgctggcagccctgctgagaacagccagcagctgccctgcatgaggaacacccacgtgcccagcagctctgtgacccaccgcatccctgtgtacccccaccgggaggagcacggctacacaggcagctacaactacggcagctatggcaaccagcacccccaccccatgcagagccagtacccagccctgccccatgacacagccatcagcggccccctgcactacgccccctaccacaggagcagcgcccagtaccccttcaacagccccaccagcaggatggagccctgcctgatgagcagcaccccccggctgcaccccacccctgtgaccccccgctggccagaggtgcccagcgccaacacctgctacaccagccccagcgtgcacagcgcccgctatggcaacagcagtgacatgtacacccccctgaccaccaggaggaacagtgaatatgagcacatgcagcacttccctggctttgcctacatcaatggagaggccagcacaggctgggccaagtag

SEQ ID NO: 82370 - DNA, 2565 bp, Artificial Sequence
  derived and/or modified sequence
gttgccatggcaacccactgacctgagccaccccctggagaggccacagctgctggcttcctgggcttctccaaactcctgtgtgtcgccactgccaccggcagggagccaggagagagacagaaaggggctgagacagaatgatcaaaaggagagcccaccctggtgcgggaggcgacaggaccaggcctcgacggcgccgttccactgagagctggattgaaagatgtctcaacgaaagtgaaaacaaacgttattccagccacacatctctggggaatgtttctaatgatgaaaatgaggaaaaagaaaataatagagcatccaagccccactccactcctgctactctgcaatggctggaggagaactatgagattgcagagggggtctgcatccctcgcagtgccctctatatgcattacctggatttctgcgagaagaatgatacccaacctgtcaatgctgccagctttggaaagatcataaggcagcagtttcctcagttaaccaccagaagactcgggacccgaggacagtcaaagtaccattactatggcattgcagtgaaagaaagctcccaatattatgatgtgatgtattccaagaaaggagctgcctgggtgagtgagacgggcaagaaagaagtgagcaaacagacagtggcatattcaccccggtccaaactcggaacactgctgccagaatttcccaatgtcaaagatctaaatctgccagccagcctgcctgaggagaaggtttctacctttattatgatgtacagaacacactgtcagagaatactggacactgtaataagagccaactttgatgaggttcaaagtttccttctgcacttttggcaaggaatgccgccccacatgctgcctgtgctgggctcctccacggtggtgaacattgtcggcgtgtgtgactccatcctctacaaagctatctccggggtgctgatgcccactgtgctgcaggcattacctgacagcttaactcaggtgattcgaaagtttgccaagcaactggatgagtggctaaaagtggctctccacgacctcccagaaaacttgcgaaacatcaagttcgaattgtcgagaaggttctcccaaattctgagacggcaaacatcactaaatcatctctgccaggcatctcgaacagtgatccacagtgcagacatcacgttccaaatgctggaagactggaggaacgtggacctgaacagcatcaccaagcaaaccctttacaccatggaagactctcgcgatgagcaccggaaactcatcacccaattatatcaggagtttgaccatctcttggaggagcagtctcccatcgagtcctacattgagtggctggataccatggttgaccgctgtgttgtgaaggtggctgccaagagacaagggtccttgaagaaagtggcccagcagttcctcttgatgtggtcctgtttcggcacaagggtgatccgggacatgaccttgcacagcgcccccagcttcgggtcttttcacctaattcacttaatgtttgatgactacgtgctctacctgttagaatctctgcactgtcaggagcgggccaatgagctcatgcgagccatgaagggagaaggaagcactgcagaagtccgagaagagatcatcttgacagaggctgccgcaccaaccccttcaccagtgccatcgttttctccagcaaaatctgccacatctgtggaagtgccacctccctcttcccctgttagcaatccttcccctgagtacactggcctcagcactacaggagcaatgcagtcttacacgtggtctctaacatacacagtgacgacggctgctgggtccccagctgagaactcccaacagctgccctgtatgaggaacactcatgtgccttcttcctccgtcacacacaggataccagtttatccccacagagaggaacatggatacacgggaagctataactatgggagctatggcaaccagcatcctcaccccatgcagagccagtatccggccctccctcatgacacagctatctctgggccactccactatgccccttaccacaggagctctgcacagtacccttttaatagccccacttcccggatggaaccttgtttgatgagcagtactcccagactgcatcctaccccagtcactccccgctggccagaggtgccctcagccaacacgtgctacacaagcccgtctgtgcattctgcgaggtacggaaactctagtgacatgtatacacctctgacaacgcgcaggaattctgaatatgagcacatgcaacactttcctggctttgcttacatcaacggagaggcctctacaggatgggctaaatgactgctatcataggcatccatatttaatattaataataataattaataataataataaacccaacacccatcccccagaagactttatctctatacattgtaactcatgggctattcctaagtgcccattttcctaatgaacatgaggatgggatcaatgtgggatgaataaactttagttcagaaacagg

SEQ ID NO: 82371 - DNA, 2235 bp, Artificial Sequence
  derived and/or modified sequence
atgatcaagcggcgggcccaccccggcgccggcggcgaccggaccagacctagacgtagacggtccacagaatcctggattgaaaggtgcctgaacgagtccgaaaacaagaggtatagcagccacacctctctcgggaacgttagcaatgatgagaatgaggaaaaggaaaacaatcgggcatctaaaccccactctacacctgcaaccctgcagtggttggaagagaattacgagatcgcagagggcgtgtgcattcccaggtcggccctgtatatgcattatctggatttctgtgagaagaatgatactcagccagttaatgctgccagctttggaaaaattatcaggcagcagtttcctcaactgacaacaaggagacttggtacgcgtggccagtccaagtaccattattacggcattgctgttaaagaatcatcccagtattacgacgttatgtactccaagaaaggagctgcctgggtgagcgaaaccgggaagaaagaggtttccaagcagaccgtcgcctactctcccaggtctaaactaggaacactgcttccggagttcccaaacgtgaaggacctgaacctcccagctagcctaccggaggaaaaggttagtaccttcatcatgatgtatcggacgcactgccagaggatcctagatacagtaatacgggccaatttcgacgaggtgcagagcttcctgctgcacttctggcagggcatgccacctcacatgttaccagttttagggagcagcacagtggttaatatcgtcggcgtttgtgacagcatcttgtataaagccatttccggggtgctcatgccaaccgtactgcaagccctgcccgattcccttactcaagtgatacgcaaattcgcaaaacagctagacgaatggctgaaggtcgccctacatgatctgccggagaatctgcggaacatcaaatttgagctaagccgcaggttttcccagatactgcggaggcagacaagtctgaaccacctctgtcaggcttcccggactgtgatccattcagccgatataacatttcagatgctagaggattggcgtaatgtcgatctgaattctatcactaagcagacgctgtacacaatggaggactctcgagacgagcatcgtaagctcatcacacagctttatcaggagttcgatcacttgctggaagagcaaagccccattgaatcatatattgagtggctggacacaatggttgatcggtgcgtggttaaagtggcggccaagcgccagggttctttgaagaaggtcgcccagcagtttctgttgatgtggtcctgcttcggaactcgtgtcatccgcgacatgacactgcattctgctccttcattcggctcttttcacctgattcatcttatgtttgacgactacgtcctttatttgttggagagtctgcactgccaggaacgcgccaatgagctaatgcgcgctatgaaaggcgaaggatctaccgctgaagtgagggaggagatcattcttactgaggccgctgcccctacacccagtccagtccccagcttttcacctgccaaaagcgcgacatcagtggaagtgccacctccctctagtccggtcagcaacccttcccccgaatacaccggcctgagcaccaccggcgctatgcagagttatacatggagtcttacctataccgtcaccactgcagctggcagcccagcggaaaattcgcaacagctaccatgtatgcgtaacacacacgtgcccagcagctccgtaacacatcgcattcccgtctacccccaccgggaggaacacggatacacgggcagctacaactacggctcctacggaaaccaacatccccatcccatgcagtcgcagtaccctgcattacctcacgataccgcgatctccggaccccttcattatgccccctaccaccgctcttcagcccagtatcctttcaacagtccaacaagtagaatggagccctgcctgatgtccagcacgcctagactgcatccgacccctgttactcccagatggcccgaagtgccatccgccaacacctgttacacgagtcccagtgtgcacagtgcccggtacggaaattcctccgacatgtataccccactgacaactcgtcgtaactcagagtacgaacatatgcaacatttccccggtttcgcatacatcaatggcgaggccagcaccggatgggccaagtag

SEQ ID NO: 82372 - DNA, 2235 bp, Artificial Sequence
  derived and/or modified sequence
atgattaaacgtagagcacatccgggtgcagggggtgacaggacccggccacgacgtagacgctccaccgagtcctggatagaacggtgtctgaatgaatccgaaaataagaggtattcaagtcatacgtccttaggcaatgtgagtaatgatgaaaacgaggagaaggaaaataaccgagcctctaaaccacactccactcctgctacactccaatggctggaggagaattacgagatcgccgaaggggtgtgcatcccccgttcagctctctacatgcactatctcgacttttgtgagaagaacgacacccagcccgtgaacgctgcttccttcggaaaaataatccgtcagcagtttccacaactgacaacccgacggctcggcacacgcggtcagtcaaagtatcattactatgggatcgctgtgaaagagtcctctcagtattacgacgtcatgtactcaaaaaagggcgctgcgtgggtgtccgaaaccggcaaaaaggaggtcagtaaacagacggtggcttacagtcctcgcagcaagcttgggacgttgttacccgaattccctaatgtgaaggatctgaatctgccggcatctctaccagaggaaaaggtgtctacctttataatgatgtacaggactcactgccagcgcatcctggacacagttattcgagcaaactttgacgaggtccagtcattcctgctgcacttctggcagggtatgcctccccacatgctgcccgtcttggggagctcgactgtggtcaacattgttggtgtatgcgactccattctttacaaagctataagcggtgtcctgatgcctactgtcttacaagccctgcctgattctctgacacaggttatccgaaagttcgccaagcagctggatgagtggcttaaggtggcgcttcacgacttgccggaaaaccttcgcaatatcaaattcgagctgtccaggcgcttctctcaaatccttcgcaggcaaacttcacttaaccacctctgccaggcttcaagaacagtcatccactccgcagacatcacatttcagatgctagaggattggcgtaacgtcgatctcaacagtattacaaaacagaccttatataccatggaagactctagggacgagcataggaagttgatcacccagctgtatcaggagtttgaccatctgctagaagagcagtctccaattgagagctatatagagtggctggacaccatggtagatcggtgtgtcgtaaaggttgccgcaaagcgacagggttctctcaaaaaagtggcccaacagtttctgcttatgtggagttgcttcgggactagagttatccgtgacatgacattacattcggcacccagttttggttcattccaccttatccatctgatgtttgacgactacgtgctctatctcctcgaatcgctgcactgccaggaacgagcgaacgagctgatgcgcgcaatgaagggcgagggttctacggccgaggtcagagaagagataattctgaccgaggctgccgcacctacacccagcccagtgccctcattcagtccggctaagtcagctaccagtgtggaagttcccccacctagttcccccgtgtccaatcccagtccagagtatactgggctgtccactactggagctatgcaatcttacacctggtccttgacgtacactgtaacaaccgcggctggtagcccagctgaaaactctcaacagttaccttgcatgcggaatacccatgtcccgtcctcaagtgtgacacaccggatccccgtctatccacatcgggaagagcatggctacactgggtcttataactatgggtcttatgggaaccagcaccctcaccccatgcaaagccagtatccagcactgcctcacgacaccgcaatcagtgggccactgcattatgctccttaccataggagtagcgcccagtacccgtttaactcacccacatcccgaatggagccatgtctgatgtcctccactcctagattgcatcccacccccgtcacaccgagatggccggaagtgcctagcgcaaacacttgctatacaagcccttcagtgcacagcgcccgatacgggaactccagcgatatgtacacaccacttaccacgcgaaggaattccgaatatgaacatatgcagcatttcccgggtttcgcttacatcaatggcgaggccagcacaggctgggccaaatag

SEQ ID NO: 82373 - DNA, 2235 bp, Artificial Sequence
  derived and/or modified sequence
atgatcaagagaagagcccaccccggcgccggcggcgacagaaccagacccagaagaagaagaagcaccgagagctggatcgagagatgcctgaacgagagcgagaacaagagatacagcagccacaccagcctgggcaacgtgagcaacgacgagaacgaggagaaggagaacaacagagccagcaagccccacagcacccccgccaccctgcagtggctggaggagaactacgagatcgccgagggcgtgtgcatccccagaagcgccctgtacatgcactacctggacttctgcgagaagaacgacacccagcccgtgaacgccgccagcttcggcaagatcatcagacagcagttcccccagctgaccaccagaagactgggcaccagaggccagagcaagtaccactactacggcatcgccgtgaaggagagcagccagtactacgacgtgatgtacagcaagaagggcgccgcctgggtgagcgagaccggcaagaaggaggtgagcaagcagaccgtggcctacagccccagaagcaagctgggcaccctgctgcccgagttccccaacgtgaaggacctgaacctgcccgccagcctgcccgaggagaaggtgagcaccttcatcatgatgtacagaacccactgccagagaatcctggacaccgtgatcagagccaacttcgacgaggtgcagagcttcctgctgcacttctggcagggcatgcccccccacatgctgcccgtgctgggcagcagcaccgtggtgaacatcgtgggcgtgtgcgacagcatcctgtacaaggccatcagcggcgtgctgatgcccaccgtgctgcaggccctgcccgacagcctgacccaggtgatcagaaagttcgccaagcagctggacgagtggctgaaggtggccctgcacgacctgcccgagaacctgagaaacatcaagttcgagctgagcagaagattcagccagatcctgagaagacagaccagcctgaaccacctgtgccaggccagcagaaccgtgatccacagcgccgacatcaccttccagatgctggaggactggagaaacgtggacctgaacagcatcaccaagcagaccctgtacaccatggaggacagcagagacgagcacagaaagctgatcacccagctgtaccaggagttcgaccacctgctggaggagcagagccccatcgagagctacatcgagtggctggacaccatggtggacagatgcgtggtgaaggtggccgccaagagacagggcagcctgaagaaggtggcccagcagttcctgctgatgtggagctgcttcggcaccagagtgatcagagacatgaccctgcacagcgcccccagcttcggcagcttccacctgatccacctgatgttcgacgactacgtgctgtacctgctggagagcctgcactgccaggagagagccaacgagctgatgagagccatgaagggcgagggcagcaccgccgaggtgagagaggagatcatcctgaccgaggccgccgcccccacccccagccccgtgcccagcttcagccccgccaagagcgccaccagcgtggaggtgcccccccccagcagccccgtgagcaaccccagccccgagtacaccggcctgagcaccaccggcgccatgcagagctacacctggagcctgacctacaccgtgaccaccgccgccggcagccccgccgagaacagccagcagctgccctgcatgagaaacacccacgtgcccagcagcagcgtgacccacagaatccccgtgtacccccacagagaggagcacggctacaccggcagctacaactacggcagctacggcaaccagcacccccaccccatgcagagccagtaccccgccctgccccacgacaccgccatcagcggccccctgcactacgccccctaccacagaagcagcgcccagtaccccttcaacagccccaccagcagaatggagccctgcctgatgagcagcacccccagactgcaccccacccccgtgacccccagatggcccgaggtgcccagcgccaacacctgctacaccagccccagcgtgcacagcgccagatacggcaacagcagcgacatgtacacccccctgaccaccagaagaaacagcgagtacgagcacatgcagcacttccccggcttcgcctacatcaacggcgaggccagcaccggctgggccaagtag

SEQ ID NO: 82374 - DNA, 1119 bp, Artificial Sequence
  derived and/or modified sequence
atgtacgacgggaccaaggaagtccccatgaatcccgtcaaaatttaccaggtgtgcgacattcctcaaccccaggggtcaatcatcaatccagggagcaccggttcagctccctgggatgaaaaggataacgatgtggatgaagaagacgaggaagatgaactggatcaatcgcagcaccatgtgcctatccaggataccttcccgttcctcaacattaacggttccccgatggcaccggcatctgtgggtaattgttccgtgggcaattgctccccagaagccgtttggcccaagaccgaaccactggagatggaagtccctcaggcgcccattcagccattctatagtagcccagaactgtggataagctcactacccatgactgacttggatatcaaattccagtatcgtggaaaagagtacgggcagaccatgaccgtctcaaatcctcagggctgccggctgttctacggagacctcggtcctatgcctgatcaggaagaactgtttggaccagtttccttagaacaggtgaaattccctggacctgagcacatcacaaatgaaaagcagaagctctttaccagtaagctcctggacgtcatggatagaggtctcattttggaagtctccgggcatgccatttatgctattaggctgtgtcagtgcaaagtttattggtctggcccctgtgcgccaagccttgtcgctccaaacctaattgaacgccagaaaaaggttaaactattttgtcttgagacttttctgtcagatctgattgctcaccaaaaggggcaaatcgaaaagcagccccccttcgagatttacctatgtttcggggaggaatggccggacggtaagccactggagcgtaaactcatcttagtgcaggttataccagtggtcgctcgtatgatctatgagatgttctctggagatttcacaaggtcctttgattctggaagcgttcggctgcaaatctccacacctgatattaaagataacattgtcgcacaactcaagcagctttacaggatcctacaaacccaggaaagctggcagccgatgcagcctactccttccatgcagctgccccccgcgctcccacctcagtag

SEQ ID NO: 82375 - DNA, 1119 bp, Artificial Sequence
  derived and/or modified sequence
atgtatgatggcaccaaggaggtgcccatgaaccctgtgaagatctaccaggtgtgtgacatcccccagccccagggcagcatcatcaaccctggcagcacaggcagcgccccctgggatgagaaggacaatgatgtggatgaagaagatgaggaggatgagctggaccagagccagcaccacgtgcccatccaggacaccttccccttcctgaacatcaatggcagccccatggccccagcctctgtgggcaactgcagcgtgggcaactgcagccctgaggccgtgtggcccaagacagagcccctggagatggaggtgccccaggcccccatccagcccttctacagcagccctgagctgtggatcagcagcctgcccatgacagacctggacatcaagttccagtaccggggcaaggagtatggccagaccatgacagtgagcaacccccagggctgccgcctcttctacggggacctgggccccatgccagaccaggaggagctgtttggacctgtgtccctggagcaggtgaagtttcctggccctgagcacatcaccaatgagaagcagaagctgttcaccagcaagctgctggatgtgatggaccggggcctcatcctggaggtgtctggccacgccatctatgccatccggctgtgccagtgcaaggtgtactggagcggcccctgtgcccccagcctggtggcccccaacctgattgaaaggcagaagaaggtgaagctgttctgcctggagaccttcctgagtgacctgattgcccaccagaagggccagatcgagaagcagcccccatttgagatctacctgtgcttcggggaggagtggccagatggcaagcccctggagaggaagctgatcctggtgcaggtgattcctgtggtggccaggatgatctatgagatgttcagcggggacttcaccaggagctttgattctggctctgtgcggctgcagatcagcaccccagacatcaaggacaacatcgtggcccagctgaagcagctgtaccgcatcctgcagacccaggagagctggcagcccatgcagcccacccccagcatgcagctgcccccagccctgcccccccagtag

SEQ ID NO: 82376 - DNA, 1119 bp, Artificial Sequence
  derived and/or modified sequence
atgtacgacggcaccaaggaggtgcccatgaaccccgtgaagatctaccaagtgtgcgacattccccagccacagggttccattatcaatcctgggagtaccggctcggcgccatgggacgaaaaggacaatgacgtcgatgaggaggacgaggaagatgagctggaccagagccagcaccacgtgccaatacaagacacctttccttttctgaacattaatggctccccaatggcccctgcttcggttggaaactgtagcgtgggtaactgtagccctgaagctgtatggcctaaaaccgaacctctcgaaatggaggtgccacaggccccaattcaacccttttactcatcccctgagctgtggatctcctcactgccgatgaccgatctggacattaagtttcagtacaggggcaaagagtatggccaaaccatgacggtgagtaacccccagggctgtagacttttttacggcgacctggggccaatgccagatcaggaagagctctttggtcccgtgagcctcgaacaggttaagtttccaggtcctgagcatatcaccaatgaaaaacagaaattgttcacttccaagctcctggacgtaatggataggggattgattctcgaggtctctggccatgcgatctatgctattcgcctgtgtcagtgcaaagtatactggagcgggccttgcgctcccagcttggtagcaccaaacctgattgagagacagaagaaggtgaagctcttctgcttagaaacattcctgagcgacttgatcgcacatcagaaaggtcagatcgaaaagcaacctcccttcgaaatatacctctgcttcggtgaggaatggcccgatggtaagccccttgagcgtaaactgattctcgtccaagtgattcccgtggtagctaggatgatttacgaaatgttttctggggactttactaggtctttcgattctgggagcgtgagactgcagattagcacaccggacattaaagataacattgtggcacagctaaaacagctctataggatactgcagactcaggagtcctggcagcccatgcagcctacccccagtatgcagcttcctccagccctccctccccagtag

SEQ ID NO: 82377 - DNA, 1119 bp, Artificial Sequence
  derived and/or modified sequence
atgtacgatggtactaaagaggtacccatgaatcccgtgaagatctatcaagtatgcgacatcccccagccacagggcagcatcattaacccgggttcaactggctcagcgccatgggacgagaaagacaacgatgttgacgaagaggatgaggaggacgaactggatcaatcccagcaccatgtcccaatccaagacacttttccctttttgaacatcaacgggtcacctatggctcccgcatccgtaggaaattgtagtgtcgggaattgtagtcctgaagcagtctggcccaagactgagcctcttgaaatggaggtaccccaggcacccatccaaccgttttacagctcaccagagctctggatttcatccttgccaatgacagaccttgacattaagttccagtataggggcaaagagtatggtcaaactatgaccgtgtctaacccccagggatgccgcctcttctacggcgacctaggccctatgccagatcaggaagaactcttcggcccagtgtcactggagcaggttaagtttccgggtccagagcatattactaacgaaaagcagaagctttttaccagtaaactgttagacgtaatggacagggggctgattctggaagtgtccggccacgccatctacgcaattaggctgtgccagtgcaaggtatattggtccggaccatgtgcccctagccttgtcgcaccaaatctaattgagcgtcagaaaaaagtgaagctgttctgtttagagacattcctcagcgatctcatagctcatcagaagggacaaattgagaagcaacccccttttgaaatctatctgtgttttggggaggaatggccggatggaaaacctttggagcggaaactgattctcgtacaggtgatcccagtggttgctcggatgatctacgagatgtttagtggtgatttcacccgcagtttcgactccggatccgtgcggctccagatctcgactccagatattaaggataatatcgtcgcgcagctgaaacagctgtaccggatcctgcagacacaagagtcttggcagccaatgcagcccaccccttctatgcagctccccccagcccttcctccccagtag

SEQ ID NO: 82378 - DNA, 1119 bp, Artificial Sequence
  derived and/or modified sequence
atgtacgacggcaccaaggaggtgcccatgaaccccgtgaagatctaccaggtgtgcgacatcccccagccccagggcagcatcatcaaccccggcagcaccggcagcgccccctgggacgagaaggacaacgacgtggacgaggaggacgaggaggacgagctggaccagagccagcaccacgtgcccatccaggacaccttccccttcctgaacatcaacggcagccccatggcccccgccagcgtgggcaactgcagcgtgggcaactgcagccccgaggccgtgtggcccaagaccgagcccctggagatggaggtgccccaggcccccatccagcccttctacagcagccccgagctgtggatcagcagcctgcccatgaccgacctggacatcaagttccagtacagaggcaaggagtacggccagaccatgaccgtgagcaacccccagggctgcagactgttctacggcgacctgggccccatgcccgaccaggaggagctgttcggccccgtgagcctggagcaggtgaagttccccggccccgagcacatcaccaacgagaagcagaagctgttcaccagcaagctgctggacgtgatggacagaggcctgatcctggaggtgagcggccacgccatctacgccatcagactgtgccagtgcaaggtgtactggagcggcccctgcgcccccagcctggtggcccccaacctgatcgagagacagaagaaggtgaagctgttctgcctggagaccttcctgagcgacctgatcgcccaccagaagggccagatcgagaagcagccccccttcgagatctacctgtgcttcggcgaggagtggcccgacggcaagcccctggagagaaagctgatcctggtgcaggtgatccccgtggtggccagaatgatctacgagatgttcagcggcgacttcaccagaagcttcgacagcggcagcgtgagactgcagatcagcacccccgacatcaaggacaacatcgtggcccagctgaagcagctgtacagaatcctgcagacccaggagagctggcagcccatgcagcccacccccagcatgcagctgccccccgccctgcccccccagtag

SEQ ID NO: 82379 - protein, 688 aa, Artificial Sequence
  derived and/or modified sequence
MAGGGGDLSTRRLNECISPVANEMNHLPAHSHDLQRMFTEDQGVDDRLLYDIVFKHFKRNKVEISNAIKKTFPFLEGLRDRDLITNKMFEDSQDSCRNLVPVQRVVYNVLSELEKTFNLPVLEALFSDVNMQEYPDLIHIYKGFENVIHDKLPLQESEEEEREERSGLQLSLEQGTGENSFRSLTWPPSGSPSHAGTTPPENGLSEHPCETEQINAKRKDTTSDKDDSLGSQQTNEQCAQKAEPTESCEQIAVQVNNGDAGREMPCPLPCDEESPEAELHNHGIQINSCSVRLVDIKKEKPFSNSKVECQAQARTHHNQASDIIVISSEDSEGSTDVDEPLEVFISAPRSEPVINNDNPLESNDEKEGQEATCSRPQIVPEPMDFRKLSTFRESFKKRVIGQDHDFSESSEEEAPAEASSGALRSKHGEKAPMTSRSTSTWRIPSRKRRFSSSDFSDLSNGEELQETCSSSLRRGSGSQPQEPENKKCSCVMCFPKGVPRSQEARTESSQASDMMDTMDVENNSTLEKHSGKRRKKRRHRSKVNGLQRGRKKDRPRKHLTLNNKVQKKRWQQRGRKANTRPLKRRRKRGPRIPKDENINFKQSELPVTCGEVKGTLYKERFKQGTSKKCIQSEDKKWFTPREFEIEGDRGASKNWKLSIRCGGYTLKVLMENKFLPEPPSTRKKVMIK

SEQ ID NO: 82380 - DNA, 2067 bp, Artificial Sequence
  derived and/or modified sequence
atggccggcggcggcggcgacctgagcaccagaagactgaacgagtgcatcagccccgtggccaacgagatgaaccacctgcccgcccacagccacgacctgcagagaatgttcaccgaggaccagggcgtggacgacagactgctgtacgacatcgtgttcaagcacttcaagagaaacaaggtggagatcagcaacgccatcaagaagaccttccccttcctggagggcctgagagacagagacctgatcaccaacaagatgttcgaggacagccaggacagctgcagaaacctggtgcccgtgcagagagtggtgtacaacgtgctgagcgagctggagaagaccttcaacctgcccgtgctggaggccctgttcagcgacgtgaacatgcaggagtaccccgacctgatccacatctacaagggcttcgagaacgtgatccacgacaagctgcccctgcaggagagcgaggaggaggagagagaggagagaagcggcctgcagctgagcctggagcagggcaccggcgagaacagcttcagaagcctgacctggccccccagcggcagccccagccacgccggcaccaccccccccgagaacggcctgagcgagcacccctgcgagaccgagcagatcaacgccaagagaaaggacaccaccagcgacaaggacgacagcctgggcagccagcagaccaacgagcagtgcgcccagaaggccgagcccaccgagagctgcgagcagatcgccgtgcaggtgaacaacggcgacgccggcagagagatgccctgccccctgccctgcgacgaggagagccccgaggccgagctgcacaaccacggcatccagatcaacagctgcagcgtgagactggtggacatcaagaaggagaagcccttcagcaacagcaaggtggagtgccaggcccaggccagaacccaccacaaccaggccagcgacatcatcgtgatcagcagcgaggacagcgagggcagcaccgacgtggacgagcccctggaggtgttcatcagcgcccccagaagcgagcccgtgatcaacaacgacaaccccctggagagcaacgacgagaaggagggccaggaggccacctgcagcagaccccagatcgtgcccgagcccatggacttcagaaagctgagcaccttcagagagagcttcaagaagagagtgatcggccaggaccacgacttcagcgagagcagcgaggaggaggcccccgccgaggccagcagcggcgccctgagaagcaagcacggcgagaaggcccccatgaccagcagaagcaccagcacctggagaatccccagcagaaagagaagattcagcagcagcgacttcagcgacctgagcaacggcgaggagctgcaggagacctgcagcagcagcctgagaagaggcagcggcagccagccccaggagcccgagaacaagaagtgcagctgcgtgatgtgcttccccaagggcgtgcccagaagccaggaggccagaaccgagagcagccaggccagcgacatgatggacaccatggacgtggagaacaacagcaccctggagaagcacagcggcaagagaagaaagaagagaagacacagaagcaaggtgaacggcctgcagagaggcagaaagaaggacagacccagaaagcacctgaccctgaacaacaaggtgcagaagaagagatggcagcagagaggcagaaaggccaacaccagacccctgaagagaagaagaaagagaggccccagaatccccaaggacgagaacatcaacttcaagcagagcgagctgcccgtgacctgcggcgaggtgaagggcaccctgtacaaggagagattcaagcagggcaccagcaagaagtgcatccagagcgaggacaagaagtggttcacccccagagagttcgagatcgagggcgacagaggcgccagcaagaactggaagctgagcatcagatgcggcggctacaccctgaaggtgctgatggagaacaagttcctgcccgagccccccagcaccagaaagaaggtgatgatcaagtag

SEQ ID NO: 82381 - DNA, 2067 bp, Artificial Sequence
  derived and/or modified sequence
atggctggaggaggcggggacctgagcacgcgtaggctgaatgagtgcattagcccagtggcaaacgagatgaatcacttgcccgctcattcccacgatctgcagagaatgtttacagaggaccagggtgtagacgataggctcctgtatgacattgtgtttaagcacttcaaacgaaacaaggtcgagatatccaatgccatcaagaaaacattcccttttctggaggggttgcgggatagggacctcataaccaataagatgttcgaagatagtcaagacagctgtcgcaatttggtccccgtccagagggtcgtatataacgtgttaagcgagcttgagaaaaccttcaacctgcccgtgctagaggccctcttctctgatgttaatatgcaggaataccccgacctgattcacatctataaggggttcgagaacgttatccatgataagctcccattgcaagagagtgaagaggaggagagggaggagaggagcggtcttcagctgagtctggagcagggtactggagaaaactcctttcgaagtctgacctggcccccctctgggtcgccaagtcacgccggcaccacaccaccggaaaacggtctctctgaacacccatgcgagactgagcagatcaatgcaaagcgtaaggatacaacctccgataaggacgacagcctcgggtcccagcagactaacgaacagtgtgcccagaaggcagagccaaccgaatcctgcgaacagatcgccgttcaagttaataatggagatgctggacgggaaatgccgtgcccactcccatgcgatgaagagtctccagaggccgagctgcataaccatggcattcaaattaacagctgctcagtgaggctcgttgatataaaaaaagagaagccattcagcaacagcaaggttgagtgtcaggcccaggctcggacacaccacaaccaggcaagcgatataattgtaatctcatccgaagactccgaaggatccactgatgtagacgaacccctcgaagtctttatcagtgctccaaggtccgaaccggtcattaacaacgacaatcccctcgagtcaaacgacgagaaagaggggcaagaggccacctgctctaggccccaaatcgtacccgagcctatggatttcagaaagctttccacttttcgcgaatcatttaagaagcgggtcatcgggcaagatcacgactttagcgaaagctccgaggaagaagccccagccgaagcaagctccggagctctgaggagtaagcacggagagaaggccccgatgacatctagatcaactagtacttggcgcataccctccaggaaacggaggtttagttcaagcgatttctccgacttgtcaaatggtgaggagttgcaggagacctgtagttccagcctccgaagagggtccggcagccaacctcaggagccagagaacaagaagtgctcctgtgttatgtgtttcccaaagggagtgcctagatctcaggaggccagaaccgagtcaagtcaggctagcgatatgatggacacaatggacgtcgaaaacaattcaaccctagagaagcatagtggcaagagacggaagaagcgccgtcaccgatctaaggtgaatggcctgcagcgaggaagaaaaaaagatcgcccacgtaaacacctgacgttgaataataaggttcagaagaagaggtggcagcagcgcggcagaaaagcaaataccagacctctgaagcgccgccgtaagcgcggacccagaatccccaaggatgaaaatattaacttcaagcagtccgaattacccgtcacctgtggcgaagtcaaaggcacactgtataaagagcgattcaagcagggaacctccaagaaatgtatccaaagtgaggacaagaaatggttcactcccagagaatttgagatcgagggcgaccggggggcctctaaaaactggaagttgtcaattagatgcggggggtacactcttaaggtcctgatggaaaataagttcctccccgaaccacccagcacaagaaagaaagtgatgataaagtag

SEQ ID NO: 82382 - DNA, 2067 bp, Artificial Sequence
  derived and/or modified sequence
atggccggcggcggcggggacctgagcacccggcggctgaatgaatgcatcagccctgtggccaatgagatgaaccacctgcctgcccacagccatgacctgcagaggatgttcacagaggaccagggcgtggatgaccggctgctgtatgacatcgtgttcaagcacttcaagaggaacaaggtggagatcagcaatgccatcaagaagaccttccccttcctggagggcctgcgggaccgggacctgatcaccaacaagatgtttgaggacagccaggacagctgcaggaacctggtgcctgtgcagagggtggtgtacaacgtgctgtctgagctggagaagaccttcaacctgcctgtgctggaggccctcttcagtgatgtgaacatgcaggagtacccagacctgatccacatctacaagggctttgaaaatgtcatccatgacaagctgcccctgcaggagagcgaggaggaggagcgggaggagaggagcggcctgcagctgagcctggagcagggcaccggggagaacagcttccgcagcctgacctggcccccatctggcagccccagccatgctggcaccaccccaccagaaaatggcctgtctgagcacccctgtgaaacagagcagatcaatgccaagaggaaggacaccaccagtgacaaggatgacagcctgggcagccagcagaccaatgagcagtgtgcccagaaggccgagcccacagagagctgtgagcagattgctgtgcaggtgaacaatggagatgctggccgggagatgccctgccccctgccctgtgatgaggagagccctgaggccgagctgcacaaccacggcatccagatcaacagctgcagcgtgcggctggtggacatcaagaaggagaagcccttcagcaacagcaaggtggagtgccaggcccaggcccggacccaccacaaccaggccagtgacatcatcgtcatcagcagtgaagattctgagggcagcacagatgtggatgagcccctggaggtgttcatcagcgcccccaggtctgagcccgtcatcaacaatgacaaccccctggagagcaatgatgagaaggagggccaggaggccacctgcagccggccccagatcgtgcctgagcccatggacttcaggaagctgagcaccttccgggagagcttcaagaagagggtcatcggccaggaccatgacttcagcgagagcagcgaggaggaggccccagctgaggccagcagcggggccctgcggagcaagcatggagagaaggcccccatgaccagccgcagcaccagcacctggaggatccccagcaggaagaggcgcttcagcagcagtgacttcagtgacctgagcaatggagaggagctgcaggagacctgcagcagcagcctgcggcggggcagcggcagccagccccaggagcctgagaacaagaagtgcagctgtgtgatgtgcttccccaagggcgtgcccaggagccaggaggccaggacagagagcagccaggccagtgacatgatggacaccatggatgtggagaacaacagcaccctggagaagcacagcggcaagaggaggaagaagagaagacacaggagcaaggtgaatggcctgcagaggggcaggaagaaggaccggcccaggaagcacctgaccctgaacaacaaggtgcagaagaagcgctggcagcagaggggcaggaaggccaacacccggcccctgaagagaagaaggaagaggggcccccgcatccccaaggatgagaacatcaacttcaagcagagcgagctgcctgtgacctgtggggaggtgaagggcaccctgtacaaggagcgcttcaagcagggcaccagcaagaagtgcatccagagcgaggacaagaagtggttcaccccccgggagtttgaaattgaaggagacagaggagccagcaagaactggaagctgagcatccgctgtggcggctacaccctgaaggtgctgatggagaacaagttcctgcctgagccccccagcaccaggaagaaggtgatgatcaagtag

SEQ ID NO: 82383 - DNA, 2067 bp, Artificial Sequence
  derived and/or modified sequence
atggccggcggcggcggcgacctgagcacccggcggctgaacgagtgcatctctcccgtggccaatgagatgaaccatttaccggcccactcacacgacctccagcgcatgttcacggaggaccagggcgtggatgacaggctgctctatgacatcgtcttcaaacactttaaaaggaacaaagtggagatcagtaatgcaataaaaaagacttttccattcttagaaggtctgcgtgaccgcgacttaatcaccaataagatgtttgaggactcacaggactcatgtcggaatttggtgcctgttcagagggtcgtgtataacgtactgagcgaattagaaaagaccttcaatctcccagtgctggaagcactcttctcggatgtcaatatgcaggagtatcctgatctgatccacatctataagggattcgaaaacgtcatccacgataagcttccactgcaggaatctgaggaggaggagagagaggaacgttctggtctccaactgtccctggagcagggcaccggcgaaaattccttccgaagcctgacgtggcctccatccggctcccctagtcacgccggcaccaccccccctgagaacggcctctctgagcatccttgcgaaacagaacaaataaatgccaaacgtaaggacaccacaagcgacaaagacgactccctcggtagtcagcagaccaacgagcagtgcgcacaaaaggctgagccaacagaaagctgcgagcaaatcgctgtgcaggtaaataatggcgacgccggacgggagatgccctgtccactgccttgtgacgaggagtcccccgaggctgagttgcacaaccatgggattcaaatcaattcctgttccgtgaggttagtggatattaagaaggaaaagccctttagcaatagtaaggtagagtgtcaggcacaggcgcggactcatcataaccaggctagtgacatcattgtgatctcctccgaggacagtgaaggctctactgacgtggacgaacccctggaggtgttcatcagcgccccacggtctgagccagtgataaataacgataatccactggagagcaatgacgagaaagaagggcaggaggcaacttgctcccggccccagattgtgcccgagcccatggacttccgtaagttgagcacgtttcgggaatcttttaaaaaaagagttataggccaggaccatgacttttccgaaagttctgaggaagaggcaccggccgaagcttccagcggagcccttcgtagcaagcacggcgaaaaagctccaatgacttctaggagcacatctacttggcggatcccctctagaaagcgacggttctcttctagtgacttttctgatctgagcaatggcgaggagctgcaggaaacatgctcttcatctcttagacggggatcaggttctcaaccacaggagcccgagaacaagaagtgtagctgcgtcatgtgttttccgaagggtgttcccagaagccaggaagccaggactgagagtagtcaggcgagtgatatgatggacacaatggacgtggaaaacaacagtaccttggagaagcacagtggcaaacgtcggaagaaacgcagacaccgtagcaaggtcaatgggctccagcgcggacgaaagaaggacagacccagaaaacacctcacactaaacaataaagttcagaaaaagcggtggcagcaacggggaaggaaggccaacacgagacctctgaagcgccgcaggaaaagggggccccgtatccccaaggacgaaaatatcaattttaaacaatctgagcttcctgtgacctgtggcgaggtgaaaggaacgctctacaaggaaagatttaagcaaggaacttccaagaagtgcattcagtccgaagataagaagtggttcacaccacgagagttcgagatagagggagaccgcggagcttctaaaaattggaaactctcaatccgatgtgggggctatacattaaaggttctgatggaaaacaaatttctgcccgagccgccctccacacgcaaaaaggtgatgatcaaatag

SEQ ID NO: 82384 - DNA, 2067 bp, Artificial Sequence
  derived and/or modified sequence
atggcaggtggaggtggagacctgtcaacccggcgtctgaacgagtgtatttctccagttgccaatgaaatgaaccacctcccagctcattcccacgacttgcagcgcatgttcacagaggatcagggggtggatgatagactcctgtacgacatcgtgtttaagcattttaagagaaacaaggtggagatcagcaacgccatcaaaaaaacgttcccctttcttgaaggtctaagggaccgagatttgattaccaataagatgttcgaggattcccaggattcctgccggaacttggtgcccgtgcagcgtgtggtatacaatgtgctttctgagctggagaagacatttaacttgcccgtgcttgaagctctgttctcagatgtcaacatgcaggaataccccgatctgattcacatatacaaagggttcgagaatgtgattcatgacaaattgccacttcaagagtcagaagaggaggagcgagaggaaagatcaggtctgcagctgagtctggaacaggggaccggcgagaatagcttccggtcccttacctggccaccttctgggtccccaagccacgcgggaacaactccgcctgaaaatgggctgtctgaacacccttgcgaaacggaacagatcaacgccaagcggaaggacacaacaagcgacaaagacgacagtctcggctcccaacaaaccaacgagcaatgtgcccaaaaagcggaacctactgagagctgtgagcagatagccgtccaggttaataatggcgacgccggtagagaaatgccttgcccactgccatgtgatgaggaatcccctgaagctgaactgcacaaccacggaattcaaatcaactcttgcagcgtgaggctggttgatatcaagaaagagaagcccttcagcaattctaaggtggagtgccaagcccaggcgaggacccatcacaatcaggcctcggacattattgtcatcagcagcgaggattccgaggggtctaccgatgtagatgagccactcgaggtattcatctcagccccacgctcggaaccagttattaacaatgataaccctctcgagtcaaatgatgagaaggagggacaggaagctacatgctctcggcctcagattgtacccgagccaatggattttcggaaattgtcaacctttcgcgaatcatttaaaaaacgtgtcattggtcaggaccacgatttttccgagtcctctgaagaggaagccccagcagaagcctcttctggcgctctgcgtagtaagcatggagagaaggcccctatgacgtctaggtcgacatcaacgtggcgaatccctagtaggaaacggaggttttcaagttccgattttagcgatctttctaacggggaggaactgcaggagacctgttccagttccttaagacgaggatcaggatcacaaccccaggagcctgaaaataaaaagtgcagctgcgtcatgtgcttcccaaagggtgttccacgctcgcaagaggctagaacagagagctctcaggcctcagacatgatggatacaatggacgtggaaaacaactccaccttagaaaaacattcaggcaagcgaaggaaaaaaagacgacacaggagcaaggtgaacggactgcagagaggccgaaagaaagaccggcctcgcaagcacttaacgctcaataacaaagtacagaagaagcggtggcaacagagggggaggaaggccaacacgaggccactgaagagacgaagaaagcgtggtcccagaattcctaaggatgagaacattaattttaagcagagcgaactccccgtcacatgtggagaagtgaaggggaccctgtacaaagagcgatttaaacaggggacctccaagaagtgcatccagtcagaagataagaagtggttcacaccacgcgagtttgagatcgagggtgatcgcggagcctccaaaaactggaagcttagcataagatgcggcggttatactctgaaagtactaatggagaataaattcctaccagagccaccatctacacggaagaaggtgatgatcaaatag

SEQ ID NO: 82385 - DNA, 2198 bp, Artificial Sequence
  derived and/or modified sequence
ctgaggcccacgcagggcctagggtgggaagatggcaggtgggggcggcgacctgagcaccaggaggctgaatgaatgtatttcaccagtagcaaatgagatgaaccatcttcctgcacacagccacgatttgcaaaggatgttcacggaagaccagggtgtagatgacaggctgctctatgacattgtattcaagcacttcaaaagaaataaggtggagatttcaaatgcaataaaaaagacatttccattcctcgagggcctccgtgatcgtgatctcatcacaaataaaatgtttgaagattctcaagattcttgtagaaacctggtccctgtacagagagtggtgtacaatgttcttagtgaactggagaagacatttaacctgccagttctggaagcactgttcagcgatgtcaacatgcaggaataccccgatttaattcacatttataaaggctttgaaaatgtaatccatgacaaattgcctctccaagaaagtgaagaagaagagagggaggagaggtctggcctccaactaagtcttgaacaaggaactggtgaaaactcttttcgaagcctgacttggccaccttcgggttccccatctcatgctggtacaaccccacctgaaaatggactctcagagcacccctgtgaaacagaacagataaatgcaaagagaaaagatacaaccagtgacaaagatgattcgctaggaagccaacaaacaaatgaacaatgtgctcaaaaggctgagccaacagagtcctgcgaacaaattgctgtccaagtgaataatggggatgctggaagggagatgccctgcccgttgccctgtgatgaagaaagcccagaggcagagctacacaaccatggaatccaaattaattcctgttctgtgcgactggtggatataaaaaaggaaaagccattttctaattcaaaagttgagtgccaagcccaagcaagaactcatcataaccaggcatctgacataatagtcatcagcagtgaggactctgaaggatccactgacgttgatgagcccttagaagtcttcatctcagcaccgagaagtgagcctgtgatcaataatgacaaccctttagaatcaaatgatgaaaaggagggccaagaagccacttgctcacgaccccagattgtaccagagcccatggatttcagaaaattatctacattcagagaaagttttaagaaaagagtgataggacaagaccacgacttttcagaatccagtgaggaggaggcgcccgcagaagcctcgagcggggcactgagaagcaagcatggtgagaaggctcctatgacttctagaagtacatctacttggagaatacccagcaggaagagacgtttcagcagtagtgacttttcagacctgagtaatggagaagagcttcaggaaacctgcagctcatccctaagaagagggtcaggatcacagccacaagaacctgaaaataagaagtgctcctgtgtcatgtgttttccaaaaggtgtgccaagaagccaagaagcaaggactgaaagtagtcaagcatctgacatgatggataccatggatgttgaaaacaattctactttggaaaaacacagtgggaaaagaagaaaaaagagaaggcatagatctaaagtaaatggtctccaaagagggagaaagaaagacagacctagaaaacatttaactctgaataacaaagtccaaaagaaaagatggcaacaaagaggaagaaaagccaacactagacctttgaaaagaagaagaaaaagaggtccaagaattcccaaagatgaaaatattaattttaaacaatctgaacttcctgtgacctgtggtgaggtgaagggcactctatataaggagcgattcaaacaaggaacctcaaagaagtgtatacagagtgaggataaaaagtggttcactcccagggaatttgaaattgaaggagaccgcggagcatccaagaactggaagctaagtatacgctgcggtggatataccctgaaagtcctgatggagaacaaatttctgccagaaccaccaagcacaagaaaaaaggtgatgatcaagtgatcttctgccaatgtctcgtctattatgttgttgattttctatctctgtggacttacagtctttaaattgacccatcatcataaaatttgattttataata

SEQ ID NO: 82386 - DNA, 1422 bp, Artificial Sequence
  derived and/or modified sequence
atggccggcggcggcggcgacctgagcaccagaagactgaacgagtgcatcagccccgtggccaacgagatgaaccacctgcccgcccacagccacgacctgcagagaatgttcaccgaggaccagggcgtggacgacagactgctgtacgacatcgtgttcaagcacttcaagagaaacaaggtggagatcagcaacgccatcaagaagaccttccccttcctggagggcctgagagacagagacctgatcaccaacaagatgttcgaggacagccaggacagctgcagaaacctggtgcccgtgcagagagtggtgtacaacgtgctgagcgagctggagaagaccttcaacctgcccgtgctggaggccctgttcagcgacgtgaacatgcaggagtaccccgacctgatccacatctacaagggcttcgagaacgtgatccacgacaagctgcccctgcaggagagcgaggaggaggagagagaggagagaagcggcctgcagctgagcctggagcagggcaccggcgagaacagcttcagaagcctgacctggccccccagcggcagccccagccacgccggcaccaccccccccgagaacggcctgagcgagcacccctgcgagaccgagcagatcaacgccaagagaaaggacaccaccagcgacaaggacgacagcctgggcagccagcagaccaacgagcagtgcgcccagaaggccgagcccaccgagagctgcgagcagatcgccgtgcaggtgaacaacggcgacgccggcagagagatgccctgccccctgccctgcgacgaggagagccccgaggccgagctgcacaaccacggcatccagatcaacagctgcagcgtgagactggtggacatcaagaaggagaagcccttcagcaacagcaaggtggagtgccaggcccaggccagaacccaccacaaccaggccagcgacatcatcgtgatcagcagcgaggacagcgagggcagcaccgacgtggacgagcccctggaggtgttcatcagcgcccccagaagcgagcccgtgatcaacaacgacaaccccctggagagcaacgacgagaaggagggccaggaggccacctgcagcagaccccagatcgtgcccgagcccatggacttcagaaagctgagcaccttcagagagagcttcaagaagagagtgatcggccaggaccacgacttcagcgagagcagcgaggaggaggcccccgccgaggccagcagcggcgccctgagaagcaagcacggcgagaaggcccccatgaccagcagaagcaccagcacctggagaatccccagcagaaagagacagctgaagaagaagaagaagaagaagcagtgccacccccagccccagccccagagaggcctgctggagcagagctag

SEQ ID NO: 82387 - DNA, 1443 bp, Artificial Sequence
  derived and/or modified sequence
atggccggcggcggcggcgacctgagcaccagaagactgaacgagtgcatcagccccgtggccaacgagatgaaccacctgcccgcccacagccacgacctgcagagaatgttcaccgaggaccagggcgtggacgacagactgctgtacgacatcgtgttcaagcacttcaagagaaacaaggtggagatcagcaacgccatcaagaagaccttccccttcctggagggcctgagagacagagacctgatcaccaacaagatgttcgaggacagccaggacagctgcagaaacctggtgcccgtgcagagagtggtgtacaacgtgctgagcgagctggagaagaccttcaacctgcccgtgctggaggccctgttcagcgacgtgaacatgcaggagtaccccgacctgatccacatctacaagggcttcgagaacgtgatccacgacaagctgcccctgcaggagagcgaggaggaggagagagaggagagaagcggcctgcagctgagcctggagcagggcaccggcgagaacagcttcagaagcctgacctggccccccagcggcagccccagccacgccggcaccaccccccccgagaacggcctgagcgagcacccctgcgagaccgagcagatcaacgccaagagaaaggacaccaccagcgacaaggacgacagcctgggcagccagcagaccaacgagcagtgcgcccagaaggccgagcccaccgagagctgcgagcagatcgccgtgcaggtgaacaacggcgacgccggcagagagatgccctgccccctgccctgcgacgaggagagccccgaggccgagctgcacaaccacggcatccagatcaacagctgcagcgtgagactggtggacatcaagaaggagaagcccttcagcaacagcaaggtggagtgccaggcccaggccagaacccaccacaaccaggccagcgacatcatcgtgatcagcagcgaggacagcgagggcagcaccgacgtggacgagcccctggaggtgttcatcagcgcccccagaagcgagcccgtgatcaacaacgacaaccccctggagagcaacgacgagaaggagggccaggaggccacctgcagcagaccccagatcgtgcccgagcccatggacttcagaaagctgagcaccttcagagagagcttcaagaagagagtgatcggccaggaccacgacttcagcgagagcagcgaggaggaggcccccgccgaggccagcagcggcgccctgagaagcaagcacggcgagaaggcccccatgaccagcagaagcaccagcacctggagaatccccagcagaaagagaagattcagcagcagcgacttcagcgacctgagcaacggcgaggagctgcaggagacctgcagcagcagcctgagaagaggcagcggcaaggaggactag

SEQ ID NO: 82388 - DNA, 1422 bp, Artificial Sequence
  derived and/or modified sequence
atggccggaggaggcggtgatctcagcaccaggcggcttaacgagtgtatttcacctgtcgcgaacgagatgaatcacctgccagcccacagccacgacttacaacggatgtttacagaagaccagggagttgatgaccgtctcctgtacgacatcgtctttaagcacttcaagcgcaataaggttgagatttcaaacgccattaagaagacctttccttttctggaagggctacgagatagggatctgattactaacaaaatgttcgaagacagccaagattcatgtcggaacttggttcccgtgcagagagtcgtctataatgtgcttagtgagctggagaaaactttcaatctgcccgtgttggaggccttgttctctgatgtaaacatgcaagaatacccagacctgatccacatctacaagggcttcgagaatgtgatccacgataaactacccctgcaggagagtgaggaggaggagcgggaggagaggtcagggttgcaactctctctcgaacagggtaccggggaaaattcattccggtctctgacatggccaccttctggttcacccagtcatgcgggcacaacgccccccgaaaatggactgtccgagcacccatgtgagaccgaacagataaatgccaagcgcaaagacaccacctcagataaggacgatagcttgggatcccaacaaacgaacgagcagtgcgcacagaaagcagaaccgaccgaaagttgcgaacaaatcgcagtacaagtaaacaatggagacgcaggccgggagatgccatgtcccctgccttgcgatgaggagtccccggaagcagagttgcacaatcacggaatccaaatcaactcttgctccgtccggctggttgatatcaaaaaagaaaaacctttctctaatagcaaagtggagtgtcaagcccaggctagaacccatcacaatcaggctagtgacataatagtcatcagctcagaggactctgaggggtcgacagacgtggacgagccacttgaagtcttcatctccgctcctcggtccgagccggtaatcaacaacgacaaccccttggaaagtaatgacgagaaagagggccaggaggcaacatgtagccgtccccaaattgtacctgagcccatggacttcagaaaactcagcacttttagggaaagctttaaaaaacgggtgatcggacaagatcacgattttagtgagagcagtgaggaggaggccccagctgaggcatcttcaggagctctgcgttccaaacatggtgagaaagcccctatgacaagtcggagtacatccacttggaggatcccatctcgaaaacgccagttgaaaaagaagaaaaagaagaaacagtgccatccccaaccacagcctcaacgaggactactggagcagtcgtag

SEQ ID NO: 82389 - DNA, 1443 bp, Artificial Sequence
  derived and/or modified sequence
atggcaggggggggtggcgatctgtctacgagacgcctgaacgagtgtatcagccccgtcgccaacgaaatgaatcatctccctgcccattcacacgacctgcagcggatgttcacagaagaccagggggtggacgacagactgttgtacgatattgttttcaagcacttcaaaaggaacaaggttgaaatctcaaatgccatcaaaaaaaccttcccttttctggaggggctgagagaccgtgatcttattactaataagatgttcgaggacagccaggacagctgccggaacctggttccagtgcagcgggtggtgtacaatgtgctgtctgaactggaaaaaactttcaatctcccggtccttgaggccctgttctctgacgtgaacatgcaggaatatcccgatctgatccacatctacaaagggttcgaaaacgtgattcatgacaagctgcccctgcaggagtcagaagaggaagagagggaggagcgcagcggcctgcaactatctctggagcaggggaccggagagaattcttttaggtctctgacatggcctccctccggaagtccgagccacgctggcactacccctcctgaaaatggtctgtccgagcacccttgtgaaactgagcagattaatgccaaacgaaaggacaccacaagcgataaggatgatagccttggtagccaacagaccaatgagcagtgcgctcagaaggccgagccaactgagagttgtgagcaaattgccgtacaggttaataatggggacgctggacgcgaaatgccatgcccactgccctgtgacgaggagagtcctgaagctgagctgcacaaccacggtatccagatcaactcctgctctgtccgcctcgtcgacataaagaaggagaaaccattctctaatagtaaagtcgagtgtcaggcccaggccagaactcaccataatcaggcctccgatataatcgtgatcagcagcgaggattccgagggaagcaccgacgtggacgagccacttgaagtgtttatcagcgcgcctagaagcgaacccgtgataaacaatgataacccactggaatctaatgacgagaaggaggggcaagaagccacttgttcaagacctcaaattgttcccgagcccatggattttcggaaactatccactttccgggagtcattcaagaagagggttataggccaggaccatgacttctctgaaagttctgaagaagaggcaccagccgaggcatcctccggggcgctgaggtccaaacacggggagaaggcacccatgacctctcgcagcactagcacctggcgaattccatctcggaaacgtcggttcagcagtagcgacttctccgatctgtccaatggagaggaactgcaggaaacttgtagcagttctctgcgaagagggagtgggaaggaagattag

SEQ ID NO: 82390 - DNA, 1422 bp, Artificial Sequence
  derived and/or modified sequence
atggccggcggcggcggggacctgagcacccggcggctgaatgaatgcatcagccctgtggccaatgagatgaaccacctgcctgcccacagccatgacctgcagaggatgttcacagaggaccagggcgtggatgaccggctgctgtatgacatcgtgttcaagcacttcaagaggaacaaggtggagatcagcaatgccatcaagaagaccttccccttcctggagggcctgcgggaccgggacctgatcaccaacaagatgtttgaggacagccaggacagctgcaggaacctggtgcctgtgcagagggtggtgtacaacgtgctgtctgagctggagaagaccttcaacctgcctgtgctggaggccctcttcagtgatgtgaacatgcaggagtacccagacctgatccacatctacaagggctttgaaaatgtcatccatgacaagctgcccctgcaggagagcgaggaggaggagcgggaggagaggagcggcctgcagctgagcctggagcagggcaccggggagaacagcttccgcagcctgacctggcccccatctggcagccccagccatgctggcaccaccccaccagaaaatggcctgtctgagcacccctgtgaaacagagcagatcaatgccaagaggaaggacaccaccagtgacaaggatgacagcctgggcagccagcagaccaatgagcagtgtgcccagaaggccgagcccacagagagctgtgagcagattgctgtgcaggtgaacaatggagatgctggccgggagatgccctgccccctgccctgtgatgaggagagccctgaggccgagctgcacaaccacggcatccagatcaacagctgcagcgtgcggctggtggacatcaagaaggagaagcccttcagcaacagcaaggtggagtgccaggcccaggcccggacccaccacaaccaggccagtgacatcatcgtcatcagcagtgaagattctgagggcagcacagatgtggatgagcccctggaggtgttcatcagcgcccccaggtctgagcccgtcatcaacaatgacaaccccctggagagcaatgatgagaaggagggccaggaggccacctgcagccggccccagatcgtgcctgagcccatggacttcaggaagctgagcaccttccgggagagcttcaagaagagggtcatcggccaggaccatgacttcagcgagagcagcgaggaggaggccccagctgaggccagcagcggggccctgcggagcaagcatggagagaaggcccccatgaccagccgcagcaccagcacctggaggatccccagcaggaagaggcagctgaagaagaagaagaagaagaagcagtgccacccccagccccagccccagaggggcctgctggagcagagctag

SEQ ID NO: 82391 - DNA, 1443 bp, Artificial Sequence
  derived and/or modified sequence
atggccggcggcggcggggacctgagcacccggcggctgaatgaatgcatcagccctgtggccaatgagatgaaccacctgcctgcccacagccatgacctgcagaggatgttcacagaggaccagggcgtggatgaccggctgctgtatgacatcgtgttcaagcacttcaagaggaacaaggtggagatcagcaatgccatcaagaagaccttccccttcctggagggcctgcgggaccgggacctgatcaccaacaagatgtttgaggacagccaggacagctgcaggaacctggtgcctgtgcagagggtggtgtacaacgtgctgtctgagctggagaagaccttcaacctgcctgtgctggaggccctcttcagtgatgtgaacatgcaggagtacccagacctgatccacatctacaagggctttgaaaatgtcatccatgacaagctgcccctgcaggagagcgaggaggaggagcgggaggagaggagcggcctgcagctgagcctggagcagggcaccggggagaacagcttccgcagcctgacctggcccccatctggcagccccagccatgctggcaccaccccaccagaaaatggcctgtctgagcacccctgtgaaacagagcagatcaatgccaagaggaaggacaccaccagtgacaaggatgacagcctgggcagccagcagaccaatgagcagtgtgcccagaaggccgagcccacagagagctgtgagcagattgctgtgcaggtgaacaatggagatgctggccgggagatgccctgccccctgccctgtgatgaggagagccctgaggccgagctgcacaaccacggcatccagatcaacagctgcagcgtgcggctggtggacatcaagaaggagaagcccttcagcaacagcaaggtggagtgccaggcccaggcccggacccaccacaaccaggccagtgacatcatcgtcatcagcagtgaagattctgagggcagcacagatgtggatgagcccctggaggtgttcatcagcgcccccaggtctgagcccgtcatcaacaatgacaaccccctggagagcaatgatgagaaggagggccaggaggccacctgcagccggccccagatcgtgcctgagcccatggacttcaggaagctgagcaccttccgggagagcttcaagaagagggtcatcggccaggaccatgacttcagcgagagcagcgaggaggaggccccagctgaggccagcagcggggccctgcggagcaagcatggagagaaggcccccatgaccagccgcagcaccagcacctggaggatccccagcaggaagaggcgcttcagcagcagtgacttcagtgacctgagcaatggagaggagctgcaggagacctgcagcagcagcctgcggcggggcagcggcaaggaggactag

SEQ ID NO: 82392 - DNA, 1422 bp, Artificial Sequence
  derived and/or modified sequence
atggccggcggcggcggcgacctgagcacccggcggctgaacgagtgcatcagcccggttgctaatgagatgaaccatttgcctgctcacagtcacgacctgcaaaggatgttcactgaggatcaaggggtggacgaccggctcctctacgacatcgtgtttaagcatttcaaaaggaataaagtcgagatctccaacgctataaaaaagaccttccccttcctggaggggcttcgagaccgcgacctgatcaccaacaagatgtttgaagacagccaggactcctgcaggaatcttgtcccagtgcaaagggtcgtctacaatgtgttgtccgagctggagaaaacctttaatcttcccgtgctggaggccctgttctccgacgtcaacatgcaggagtaccccgacctcattcacatttataagggattcgagaacgtcattcacgacaagctcccactgcaggaaagcgaagaagaagaaagggaggaaaggagcggactccagctctctttggaacagggcactggtgagaatagctttagatccctcacttggcccccatcgggctctccttcacatgcaggcaccactcctcctgagaatggcctcagcgagcatccttgtgagactgaacagatcaatgcgaaacgcaaagacacaacgtcggataaagacgacagcctgggatcccaacagaccaacgaacagtgcgcccagaaggcagagccgacagaatcctgtgaacaaatagcagttcaggtaaacaacggagacgctggcagggagatgccttgtcctctcccatgcgatgaagagagccctgaggctgagttgcataatcacgggatccagatcaattcgtgtagcgtccggctggtggacatcaagaaggagaaacccttttccaacagtaaggtggagtgtcaggcccaggcgcgtacgcaccacaaccaggccagcgacatcattgtgatttcaagcgaagatagcgagggctcaaccgacgtggacgagccattggaagtgttcatttccgcaccccgcagtgaaccggtaatcaacaacgataaccccttggagagcaacgatgaaaaggaaggacaggaagcaacctgtagcaggcctcaaattgtccctgaaccaatggactttaggaaacttagcacttttcgggagagcttcaagaaaagggtgatcggccaagaccacgactttagtgagtcctcagaagaagaggctccagccgaggctagcagcggagccctgcgtagcaaacacggtgagaaggcaccaatgacttcccggagtacatctacttggagaattccatcacggaagcgccagcttaaaaagaaaaagaaaaagaagcaatgtcaccctcagcctcaaccccagagaggcctcctcgaacaaagctag

SEQ ID NO: 82393 - DNA, 1443 bp, Artificial Sequence
  derived and/or modified sequence
atggccggcggcggcggcgacctgagcacccggcggctgaacgagtgtatttccccggtcgctaatgaaatgaatcacctccccgcacattcccacgaccttcagcggatgtttaccgaggatcagggggtcgatgaccgtctgttgtacgatatagtctttaaacacttcaagaggaacaaagttgagatctccaacgcaattaaaaaaacattccctttcttggaaggtctgcgggatagagatctcattactaacaagatgttcgaagactctcaggacagctgtcgaaatcttgtgccagtgcagcgagtggtgtacaacgtgctgagcgaactggagaaaacgttcaatctaccagtgctcgaggctttattctcggatgtgaacatgcaggaatacccggaccttattcatatttataaggggttcgaaaacgtaatccacgataagctccccctgcaggaatccgaggaggaagagagggaggaaagaagcggactgcagctgtcccttgaacaaggaacgggcgagaactccttccgcagcctgacatggcccccctcgggcagcccttcgcatgcaggaacaaccccgcccgagaatggactgtctgagcatccatgcgaaaccgaacagattaatgctaagcggaaagacacaacaagtgacaaggatgacagcctagggtcgcagcagacaaacgagcagtgtgctcagaaggccgagcctacagagagttgcgaacagattgcagtacaggtaaacaatggcgatgctgggcgcgagatgccctgcccactgccttgcgacgaggagagccccgaagccgagttgcataatcacggcattcagattaattcatgttctgttcggctggtcgacatcaaaaaagagaaaccattttctaatagtaaagtggagtgccaagcacaggcgcggacccatcataaccaggcaagcgatatcatcgtgatctcttcagaggacagcgagggctctactgatgtggacgaaccgctggaggtgttcatttcagctccgaggtcagaacccgtgattaacaacgataatcctctggaaagcaatgatgagaaggaaggacaggaggcaacctgctcacggccccagattgtgccagagcctatggactttaggaagttgagcacatttcgagaaagcttcaaaaagagggtgattggacaggaccacgattttagcgagtctagcgaggaagaggcccccgccgaagcatcaagtggtgcgctccgctccaagcatggcgagaaggccccaatgaccagtaggtcaacatctacttggcgcataccttccagaaagcggcgctttagttccagcgacttttcagacctgtccaatggcgaagagctgcaagagacttgttcatccagtttgagacgcggctccgggaaagaggactag

SEQ ID NO: 82394 - DNA, 1422 bp, Artificial Sequence
  derived and/or modified sequence
atggctggcggagggggagatctttccacccgaagacttaatgaatgtatctctcccgtggcgaatgagatgaaccaccttcccgcacatagccacgacctccagaggatgtttaccgaagaccagggcgtggacgaccgactgctctatgatatcgtcttcaaacacttcaagcgcaacaaagttgagatcagtaacgctattaaaaagactttcccgttcctagagggactgcgcgatcgagatctgattactaataaaatgtttgaggactcccaggactcgtgtcgaaacctggttccggtgcagcgcgtggtttacaacgttctctcggaactggaaaagacctttaatctccccgtgctggaggccctcttcagcgatgtaaacatgcaggagtaccccgaccttatccacatttacaaaggttttgagaatgtcattcacgataaattgcccttacaggaatccgaggaggaggaaagagaggagcgctcaggtcttcagttgagcttggagcagggtacaggagaaaacagcttcagatcactgacatggcccccttctggatctccatctcacgctggcacgaccccccctgagaatggcctaagtgagcacccatgtgagactgagcagataaacgctaaaagaaaagatactacatcagataaggacgactctctgggcagccagcagacaaatgaacagtgcgcacagaaggcagagcctacggagtcctgtgaacagatagcggtacaggtgaacaatggcgacgccggacgcgagatgccctgcccgttgccttgtgatgaggagtcacccgaagcagaactccataaccacggcatccagataaattcatgctccgtacgtttggtcgatattaagaaggaaaagccctttagcaacagcaaggtagagtgccaggcacaagcaagaacccatcacaatcaagctagtgacatcatcgtgatctcttctgaagatagtgagggctccaccgacgtggatgagcccctcgaagtttttatctccgcccctaggagcgagcccgttatcaacaatgataatcctctcgaaagtaatgacgaaaaagagggtcaggaggccacttgttccaggccacagatagtgcccgagcccatggacttccgaaagctaagtactttccgagagagttttaagaagcgggtaattgggcaggaccacgatttcagcgagagctctgaagaggaagcacctgccgaggcctcgtctggagccttgagatctaaacatggagaaaaggcccctatgactagcaggtcaacgagtacatggcgcattcctagcagaaaacggcagctgaagaagaaaaagaaaaagaagcagtgccacccacaacctcaaccacaaagaggactgcttgagcagagctag

SEQ ID NO: 82395 - DNA, 1443 bp, Artificial Sequence
  derived and/or modified sequence
atggctgggggagggggtgatctgagtacccgccgtttgaacgaatgcatatccccggttgcaaacgagatgaatcacctcccagctcacagtcacgacctgcaacgtatgttcactgaagatcagggcgtggatgatcggctgctgtacgacatcgtgttcaaacattttaagagaaataaggtggagatttcgaacgcaatcaagaagacctttccctttttagaaggccttcgggaccgagacctcattaccaacaaaatgttcgaagatagtcaggattcttgccggaacctggtgcccgtccagagagtggtttataacgtgctctcagagctggaaaaaactttcaacctgccagtcctggaagcactcttctctgacgtcaacatgcaagaataccctgatctgatccacatctacaaggggttcgaaaacgtgattcacgataagttacctttgcaggagagcgaggaggaagagcgggaggagcgtagcgggctacagctgagtctggagcagggcactggggagaatagctttagatctctcacatggcccccttccgggtctccatcccatgctggtactactccccctgagaacggtctctcagagcacccatgcgagaccgagcagattaatgcaaaacgcaaggacaccacatctgacaaggacgactccttaggctctcagcagacaaacgagcagtgcgcccagaaagctgaaccgacagagtcatgcgagcagatcgccgttcaggtcaataatggggacgcagggagggagatgccctgccctttaccttgtgacgaggagtcgccggaggcagaacttcataaccatggaatccagattaactcctgctccgtgaggctcgtggatatcaaaaaggaaaaacccttctcgaatagtaaagtggagtgtcaggcccaggctcgtacccatcacaaccaagcttctgacatcattgttatcagctccgaggatagcgaggggtctactgacgtcgatgaaccgctagaggtattcattagtgctccaaggtccgaaccggtcattaataatgacaatcccctggagtccaacgatgagaaggagggccaggaggccacatgctcccgtcctcagattgtccccgaacccatggactttcgaaaacttagcacctttagggaatcttttaagaagcgcgtcattgggcaggaccatgatttttctgagtcttctgaggaggaggcccctgccgaagccagtagtggcgctctgcggagtaagcacggcgagaaagccccaatgacatcacgtagtacttccacatggagaataccatctcgcaagaggcgctttagctcctccgatttcagcgacctctccaacggggaagagctgcaggaaacttgtagcagtagcctgcggaggggtagcggaaaagaggattag

SEQ ID NO: 82396 - DNA, 1453 bp, Artificial Sequence
  derived and/or modified sequence
ctgaggcccacgcagggcctagggtgggaagatggcaggtgggggcggcgacctgagcaccaggaggctgaatgaatgtatttcaccagtagcaaatgagatgaaccatcttcctgcacacagccacgatttgcaaaggatgttcacggaagaccagggtgtagatgacaggctgctctatgacattgtattcaagcacttcaaaagaaataaggtggagatttcaaatgcaataaaaaagacatttccattcctcgagggcctccgtgatcgtgatctcatcacaaataaaatgtttgaagattctcaagattcttgtagaaacctggtccctgtacagagagtggtgtacaatgttcttagtgaactggagaagacatttaacctgccagttctggaagcactgttcagcgatgtcaacatgcaggaataccccgatttaattcacatttataaaggctttgaaaatgtaatccatgacaaattgcctctccaagaaagtgaagaagaagagagggaggagaggtctggcctccaactaagtcttgaacaaggaactggtgaaaactcttttcgaagcctgacttggccaccttcgggttccccatctcatgctggtacaaccccacctgaaaatggactctcagagcacccctgtgaaacagaacagataaatgcaaagagaaaagatacaaccagtgacaaagatgattcgctaggaagccaacaaacaaatgaacaatgtgctcaaaaggctgagccaacagagtcctgcgaacaaattgctgtccaagtgaataatggggatgctggaagggagatgccctgcccgttgccctgtgatgaagaaagcccagaggcagagctacacaaccatggaatccaaattaattcctgttctgtgcgactggtggatataaaaaaggaaaagccattttctaattcaaaagttgagtgccaagcccaagcaagaactcatcataaccaggcatctgacataatagtcatcagcagtgaggactctgaaggatccactgacgttgatgagcccttagaagtcttcatctcagcaccgagaagtgagcctgtgatcaataatgacaaccctttagaatcaaatgatgaaaaggagggccaagaagccacttgctcacgaccccagattgtaccagagcccatggatttcagaaaattatctacattcagagaaagttttaagaaaagagtgataggacaagaccacgacttttcagaatccagtgaggaggaggcgcccgcagaagcctcgagcggggcactgagaagcaagcatggtgagaaggctcctatgacttctagaagtacatctacttggagaatacccagcaggaagagacaattaaaaaaaaaaaagaagaagaaacaatgtcatccccagccccagcctcagagagggctcctggagcaatcttga

SEQ ID NO: 82397 - DNA, 1898 bp, Artificial Sequence
  derived and/or modified sequence
ggggctcagaggccaggctctgaggcccacgcagggcctagggtgggaagatggcaggtgggggcggcgacctgagcaccaggaggctgaatgaatgtatttcaccagtagcaaatgagatgaaccatcttcctgcacacagccacgatttgcaaaggatgttcacggaagaccagggtgtagatgacaggctgctctatgacattgtattcaagcacttcaaaagaaataaggtggagatttcaaatgcaataaaaaagacatttccattcctcgagggcctccgtgatcgtgatctcatcacaaataaaatgtttgaagattctcaagattcttgtagaaacctggtccctgtacagagagtggtgtacaatgttcttagtgaactggagaagacatttaacctgccagttctggaagcactgttcagcgatgtcaacatgcaggaataccccgatttaattcacatttataaaggctttgaaaatgtaatccatgacaaattgcctctccaagaaagtgaagaagaagagagggaggagaggtctggcctccaactaagtcttgaacaaggaactggtgaaaactcttttcgaagcctgacttggccaccttcgggttccccatctcatgctggtacaaccccacctgaaaatggactctcagagcacccctgtgaaacagaacagataaatgcaaagagaaaagatacaaccagtgacaaagatgattcgctaggaagccaacaaacaaatgaacaatgtgctcaaaaggctgagccaacagagtcctgcgaacaaattgctgtccaagtgaataatggggatgctggaagggagatgccctgcccgttgccctgtgatgaagaaagcccagaggcagagctacacaaccatggaatccaaattaattcctgttctgtgcgactggtggatataaaaaaggaaaagccattttctaattcaaaagttgagtgccaagcccaagcaagaactcatcataaccaggcatctgacataatagtcatcagcagtgaggactctgaaggatccactgacgttgatgagcccttagaagtcttcatctcagcaccgagaagtgagcctgtgatcaataatgacaaccctttagaatcaaatgatgaaaaggagggccaagaagccacttgctcacgaccccagattgtaccagagcccatggatttcagaaaattatctacattcagagaaagttttaagaaaagagtgataggacaagaccacgacttttcagaatccagtgaggaggaggcgcccgcagaagcctcgagcggggcactgagaagcaagcatggtgagaaggctcctatgacttctagaagtacatctacttggagaatacccagcaggaagagacgtttcagcagtagtgacttttcagacctgagtaatggagaagagcttcaggaaacctgcagctcatccctaagaagagggtcaggtaaagaagattaggatgccaagacttggcctgcagaatgtcaggaatgtgaattaaaagctgctgtttccagacgctttttattctgagcaccttcactaccttgtatccagttcatctgggaactcctttttgcattttagaaaatggaaagaggcaggaaattatgataaactcatgtttaacagaaagagtttcactgactaaatgtatgtaattatattttgttgttgtagaagaaataaatagcaaatttgtggtattcttttttttaaacctgctctcattcctattaacactaagatcttagatttttatagtgataaatgggttgacatcattgtcatttgtaattgtaaagcctcaaaagacaactgttcctactatgtaattatagacagaaataaaaacttcagatc

SEQ ID NO: 82398 - protein, 452 aa, Artificial Sequence
  derived and/or modified sequence
MAGGGGDLSTRMFTEDQGVDDRLLYDIVFKHFKRNKVEISNAIKKTFPFLEGLRDRDLITNKMFEDSQDSCRNLVPVQRVVYNVLSELEKTFNLPVLEALFSDVNMQEYPDLIHIYKGFENVIHDKLPLQESEEEEREERSGLQLSLEQGTGENSFRSLTWPPSGSPSHAGTTPPENGLSEHPCETEQINAKRKDTTSDKDDSLGSQQTNEQCAQKAEPTESCEQIAVQVNNGDAGREMPCPLPCDEESPEAELHNHGIQINSCSVRLVDIKKEKPFSNSKVECQAQARTHHNQASDIIVISSEDSEGSTDVDEPLEVFISAPRSEPVINNDNPLESNDEKEGQEATCSRPQIVPEPMDFRKLSTFRESFKKRVIGQDHDFSESSEEEAPAEASSGALRSKHAPMTSRSTSTWRIPSRKRRFSSSDFSDLSNGEELQETCSSSLRRGSGKED

SEQ ID NO: 82399 - DNA, 1359 bp, Artificial Sequence
  derived and/or modified sequence
atggccggcggcggcggcgacctgagcaccagaatgttcaccgaggaccagggcgtggacgacagactgctgtacgacatcgtgttcaagcacttcaagagaaacaaggtggagatcagcaacgccatcaagaagaccttccccttcctggagggcctgagagacagagacctgatcaccaacaagatgttcgaggacagccaggacagctgcagaaacctggtgcccgtgcagagagtggtgtacaacgtgctgagcgagctggagaagaccttcaacctgcccgtgctggaggccctgttcagcgacgtgaacatgcaggagtaccccgacctgatccacatctacaagggcttcgagaacgtgatccacgacaagctgcccctgcaggagagcgaggaggaggagagagaggagagaagcggcctgcagctgagcctggagcagggcaccggcgagaacagcttcagaagcctgacctggccccccagcggcagccccagccacgccggcaccaccccccccgagaacggcctgagcgagcacccctgcgagaccgagcagatcaacgccaagagaaaggacaccaccagcgacaaggacgacagcctgggcagccagcagaccaacgagcagtgcgcccagaaggccgagcccaccgagagctgcgagcagatcgccgtgcaggtgaacaacggcgacgccggcagagagatgccctgccccctgccctgcgacgaggagagccccgaggccgagctgcacaaccacggcatccagatcaacagctgcagcgtgagactggtggacatcaagaaggagaagcccttcagcaacagcaaggtggagtgccaggcccaggccagaacccaccacaaccaggccagcgacatcatcgtgatcagcagcgaggacagcgagggcagcaccgacgtggacgagcccctggaggtgttcatcagcgcccccagaagcgagcccgtgatcaacaacgacaaccccctggagagcaacgacgagaaggagggccaggaggccacctgcagcagaccccagatcgtgcccgagcccatggacttcagaaagctgagcaccttcagagagagcttcaagaagagagtgatcggccaggaccacgacttcagcgagagcagcgaggaggaggcccccgccgaggccagcagcggcgccctgagaagcaagcacgcccccatgaccagcagaagcaccagcacctggagaatccccagcagaaagagaagattcagcagcagcgacttcagcgacctgagcaacggcgaggagctgcaggagacctgcagcagcagcctgagaagaggcagcggcaaggaggactag

SEQ ID NO: 82400 - DNA, 1359 bp, Artificial Sequence
  derived and/or modified sequence
atggctggtggcgggggtgacctttctaccagaatgtttaccgaagaccaaggcgtggacgacagattgctttacgacatcgtctttaagcacttcaaacgcaataaagtggagatttccaacgccataaaaaaaacgtttccgttcctggaaggtctcagggatcgggacctcataaccaataagatgtttgaagacagtcaagatagttgtaggaatctcgtgcctgttcagcgggtggtgtataacgtcctctctgaacttgagaagacctttaacttgcctgtactggaggccctcttctccgatgtaaacatgcaggagtatcccgacctgatccatatttacaaagggttcgagaacgtcatccacgacaagttgcccctgcaggagtccgaggaggaggagcgcgaggagaggtcaggccttcaactatccttggagcaaggcactggtgaaaacagttttcggagtctcacttggcccccttctggatcacctagccatgcaggaaccactccaccagagaatgggctctctgaacatccgtgtgagactgagcaaatcaacgccaagcggaaggatacgacaagcgataaggacgatagcctgggctcccagcagacaaacgagcagtgtgcgcaaaaagccgagcccacggaaagctgtgagcaaatcgcagtgcaggtgaataatggtgatgctggacgcgagatgccctgtcccttgccctgcgacgaagaaagcccagaagccgaactccataatcacggcatacagatcaattcctgttccgtccgccttgtggacattaaaaaagaaaagccattctcaaattcgaaagttgagtgccaggctcaggcccgtacacatcacaatcaagcctctgatatcatcgttatctcatcagaggatagcgagggctcaaccgatgtagatgagccattggaggtcttcatctctgcccccagaagcgagccggttatcaacaatgacaacccacttgaatcaaatgacgagaaagagggacaggaagctacgtgctcccgcccccaaatcgtaccagagccaatggactttagaaaactcagcacattccgcgaaagctttaagaagcgagtcattggccaggaccacgacttctcagaatcgtccgaagaggaggctccggctgaagccagttcaggggccttgcgtagtaagcacgcacccatgactagtaggtccacatctacgtggcggataccctcccgtaaaagacgcttcagctcatcagacttttccgacctgagcaatggggaagaactgcaagagacatgttcttcgagcctgcgcagggggtcaggaaaggaagactag

SEQ ID NO: 82401 - DNA, 1359 bp, Artificial Sequence
  derived and/or modified sequence
atggccggcggcggcggggacctgagcaccaggatgttcacagaggaccagggcgtggatgaccggctgctgtatgacatcgtgttcaagcacttcaagaggaacaaggtggagatcagcaatgccatcaagaagaccttccccttcctggagggcctgcgggaccgggacctgatcaccaacaagatgtttgaggacagccaggacagctgcaggaacctggtgcctgtgcagagggtggtgtacaacgtgctgtctgagctggagaagaccttcaacctgcctgtgctggaggccctcttcagtgatgtgaacatgcaggagtacccagacctgatccacatctacaagggctttgaaaatgtcatccatgacaagctgcccctgcaggagagcgaggaggaggagcgggaggagaggagcggcctgcagctgagcctggagcagggcactggagaaaattccttccgcagcctgacctggccacccagcggcagccccagccacgccggcaccaccccaccagaaaatggcctgtctgagcacccctgtgaaacagagcagatcaatgccaagaggaaggacaccaccagtgacaaggatgacagcctgggcagccagcagaccaatgagcagtgtgcccagaaggccgagcccacagagagctgtgagcagattgctgtgcaggtgaacaatggagatgctggccgggagatgccctgccccctgccctgtgatgaggagagccctgaggccgagctgcacaaccacggcatccagatcaacagctgcagcgtgcggctggtggacatcaagaaggagaagcccttcagcaacagcaaggtggagtgccaggcccaggcccggacccaccacaaccaggccagtgacatcatcgtcatcagcagcgaggacagcgagggcagcacagatgtggatgagcccctggaggtgttcatcagcgcccccaggtctgagcctgtgatcaacaatgacaaccccctggagagcaatgatgagaaggagggccaggaggccacctgcagccggccccagatcgtgcctgagcccatggacttcaggaagctgagcaccttccgggagagcttcaagaagagggtgattggccaggaccatgacttcagcgagagcagcgaggaggaggccccagctgaggccagcagcggggccctgcggagcaagcacgcccccatgaccagccgcagcaccagcacctggaggatccccagcaggaagaggcgcttcagcagcagtgacttcagtgacctgagcaatggagaggagctgcaggagacctgcagcagcagcctgcggcggggcagcggcaaggaggactag

SEQ ID NO: 82402 - DNA, 1359 bp, Artificial Sequence
  derived and/or modified sequence
atggccggcggcggcggcgacctgagcacccggatgttcaccgaggatcagggagtggacgatcgattgctgtatgatatcgtttttaaacatttcaaacggaataaggtggagattagcaatgcaattaaaaaaacttttccattcctagaaggcctgcgcgaccgggacctgattacgaacaaaatgtttgaagatagtcaagattcctgtcgaaatttggtacccgtgcaaagagtggtatacaacgtcctctcggaattagaaaaaacatttaaccttcccgtgctagaggctctcttcagcgacgtcaacatgcaggaatacccggatttgattcacatctataaggggtttgagaacgtgattcacgataagctgccacttcaggagtctgaggaggaggagcgcgaagaaagaagcggcctgcagctgagcctggaacagggcaccggtgagaattcatttcgatcattgacctggcccccctccggcagtccaagccatgctgggaccactccacctgagaacggtctttcagagcatccctgtgagacagaacagatcaacgctaagaggaaggacaccacgagcgataaagatgactctctgggttcccagcagaccaatgagcaatgtgcgcaaaaagccgaacctaccgagagctgtgagcagatcgccgtgcaggtgaataatggtgacgccggcagagagatgccctgccccctgccttgcgacgaggaatcccccgaagccgaacttcacaatcacggcatacagatcaacagctgtagcgtgcgcttggtggatatcaagaaagaaaagccctttagcaattccaaggttgagtgccaggcacaggctagaacgcaccataaccaggcctctgacatcattgtgatatcgtcagaggatagcgaaggctccacagacgtggatgaacctctcgaagtctttattagcgcaccaagatcagaaccagtgattaacaacgataacccgctggagagcaacgatgagaaagaaggccaggaagccacatgttccaggccccagatagtccccgagccgatggattttcgcaaactctcgactttccgagagtcatttaaaaagagggtcatcggacaggatcatgacttttctgagagttccgaagaggaggctcccgctgaggcctccagtggagctctccgaagtaagcatgcccccatgactagtaggtctactagcacgtggcgtattccgtcccgcaaacgcagatttagttcaagcgatttctcagacctgtccaatggagaggaattacaggaaacctgtagtagctcacttcgccgaggctccggcaaggaggactag

SEQ ID NO: 82403 - DNA, 1359 bp, Artificial Sequence
  derived and/or modified sequence
atggctggcggaggaggagacctcagcacaaggatgttcactgaggaccagggcgtggacgatcggctcttgtacgatatagtcttcaaacattttaaacgcaataaggttgagatttccaacgcgatcaaaaaaacgttcccctttcttgaaggcctgcgagacagagatcttattactaataaaatgttcgaggactcacaggattcatgcaggaacctggtgcccgtccagcgtgtagtttataatgtgctcagtgagttggaaaagacattcaatctgccagtgctggaagctttgttttccgacgtgaatatgcaggagtatccggatctgatacatatttataagggcttcgagaatgttatacatgacaagctaccactgcaggagagcgaagaggaggaaagggaggagagatctggccttcaattgtcccttgagcagggtaccggcgaaaactcattcagaagtctgacgtggcccccttccggttccccctcccacgccggaaccaccccacccgagaacggcctgtccgagcatccttgtgagactgagcagatcaatgcaaagcggaaagataccacaagtgataaggatgacagcctggggagccagcagacgaacgaacagtgcgcacagaaagccgaaccaactgagagctgcgagcagattgcagtgcaggtgaataatggtgatgccggaagagagatgccatgtccattgccatgcgatgaggagtcccctgaggccgaactgcataatcatggtatccagattaatagctgctcagttcggttggttgacatcaagaaagagaagccattttcgaattccaaagtggaatgtcaggcccaggctcgcactcatcacaaccaagcctctgacattattgtcatatcatctgaagacagcgaaggaagtacagacgtggacgaaccgcttgaggtctttatttctgcccctagatccgaaccagtcataaacaatgacaatcccctggagtctaacgacgagaaggaaggccaagaagccacatgctccagaccacaaatcgtccccgagccaatggattttagaaaactttcgacttttcgcgaatccttcaaaaaacgggtgatcggtcaagaccacgatttcagcgagtccagcgaggaagaagccccagctgaggcatcaagcggcgctctgcggtcaaaacacgctcccatgactagtagatcgaccagcacctggagaattcccagcagaaagcgtcggttctcctctagcgacttctcggacctgtctaacggcgaggagctacaagagacatgctcctccagcctgcgcagagggagcggaaaggaggattag

SEQ ID NO: 82404 - DNA, 1846 bp, Artificial Sequence
  derived and/or modified sequence
cacactgcacgcaggctgggccgactgaggggctcagaggccaggctctgaggcccacgcagggcctagggtgggaagatggcaggtgggggcggcgacctgagcaccaggatgttcacggaagaccagggtgtagatgacaggctgctctatgacattgtattcaagcacttcaaaagaaataaggtggagatttcaaatgcaataaaaaagacatttccattcctcgagggcctccgtgatcgtgatctcatcacaaataaaatgtttgaagattctcaagattcttgtagaaacctggtccctgtacagagagtggtgtacaatgttcttagtgaactggagaagacatttaacctgccagttctggaagcactgttcagcgatgtcaacatgcaggaataccccgatttaattcacatttataaaggctttgaaaatgtaatccatgacaaattgcctctccaagaaagtgaagaagaagagagggaggagaggtctggcctccaactaagtcttgaacaaggaactggtgaaaactcttttcgaagcctgacttggccaccttcgggttccccatctcatgctggtacaaccccacctgaaaatggactctcagagcacccctgtgaaacagaacagataaatgcaaagagaaaagatacaaccagtgacaaagatgattcgctaggaagccaacaaacaaatgaacaatgtgctcaaaaggctgagccaacagagtcctgcgaacaaattgctgtccaagtgaataatggggatgctggaagggagatgccctgcccgttgccctgtgatgaagaaagcccagaggcagagctacacaaccatggaatccaaattaattcctgttctgtgcgactggtggatataaaaaaggaaaagccattttctaattcaaaagttgagtgccaagcccaagcaagaactcatcataaccaggcatctgacataatagtcatcagcagtgaggactctgaaggatccactgacgttgatgagcccttagaagtcttcatctcagcaccgagaagtgagcctgtgatcaataatgacaaccctttagaatcaaatgatgaaaaggagggccaagaagccacttgctcacgaccccagattgtaccagagcccatggatttcagaaaattatctacattcagagaaagttttaagaaaagagtgataggacaagaccacgacttttcagaatccagtgaggaggaggcgcccgcagaagcctcgagcggggcactgagaagcaagcatgctcctatgacttctagaagtacatctacttggagaatacccagcaggaagagacgtttcagcagtagtgacttttcagacctgagtaatggagaagagcttcaggaaacctgcagctcatccctaagaagagggtcaggtaaagaagattaggatgccaagacttggcctgcagaatgtcaggaatgtgaattaaaagctgctgtttccagacgctttttattctgagcaccttcactaccttgtatccagttcatctgggaactcctttttgcattttagaaaatggaaagaggcaggaaattatgataaactcatgtttaacagaaagagtttcactgactaaatgtatgtaattatattttgttgttgtagaagaaataaatagcaaatttgtggtattcttttttttaaacctgctctcattcctattaacactaagatcttagatttttatagtgataaatgggttgacatcattgtcatttgtaattgtaaagcctcaaaagacaactgttcctactatgtaattatagacagaaataaaaacttcagatcaaac

SEQ ID NO: 82405 - protein, 445 aa, Artificial Sequence
  derived and/or modified sequence
MMFTEDQGVDDRLLYDIVFKHFKRNKVEISNAIKKTFPFLEGLRDRDLITNKMFEDSQDSCRNLVPVQRVVYNVLSELEKTFNLPVLEALFSDVNMQEYPDLIHIYKGFENVIHDKLPLQESEEEEREERSGLQLSLEQGTGENSFRSLTWPPSGSPSHAGTTPPENGLSEHPCETEQINAKRKDTTSDKDDSLGSQQTNEQCAQKAEPTESCEQIAVQVNNGDAGREMPCPLPCDEESPEAELHNHGIQINSCSVRLVDIKKEKPFSNSKVECQAQARTHHNQASDIIVISSEDSEGSTDVDEPLEVFISAPRSEPVINNDNPLESNDEKEGQEATCSRPQIVPEPMDFRKLSTFRESFKKRVIGQDHDFSESSEEEAPAEASSGALRSKHGEKAPMTSRSTSTWRIPSRKRRFSSSDFSDLSNGEELQETCSSSLRRGSGKED

SEQ ID NO: 82406 - DNA, 1338 bp, Artificial Sequence
  derived and/or modified sequence
atgatgttcaccgaggaccagggcgtggacgacagactgctgtacgacatcgtgttcaagcacttcaagagaaacaaggtggagatcagcaacgccatcaagaagaccttccccttcctggagggcctgagagacagagacctgatcaccaacaagatgttcgaggacagccaggacagctgcagaaacctggtgcccgtgcagagagtggtgtacaacgtgctgagcgagctggagaagaccttcaacctgcccgtgctggaggccctgttcagcgacgtgaacatgcaggagtaccccgacctgatccacatctacaagggcttcgagaacgtgatccacgacaagctgcccctgcaggagagcgaggaggaggagagagaggagagaagcggcctgcagctgagcctggagcagggcaccggcgagaacagcttcagaagcctgacctggccccccagcggcagccccagccacgccggcaccaccccccccgagaacggcctgagcgagcacccctgcgagaccgagcagatcaacgccaagagaaaggacaccaccagcgacaaggacgacagcctgggcagccagcagaccaacgagcagtgcgcccagaaggccgagcccaccgagagctgcgagcagatcgccgtgcaggtgaacaacggcgacgccggcagagagatgccctgccccctgccctgcgacgaggagagccccgaggccgagctgcacaaccacggcatccagatcaacagctgcagcgtgagactggtggacatcaagaaggagaagcccttcagcaacagcaaggtggagtgccaggcccaggccagaacccaccacaaccaggccagcgacatcatcgtgatcagcagcgaggacagcgagggcagcaccgacgtggacgagcccctggaggtgttcatcagcgcccccagaagcgagcccgtgatcaacaacgacaaccccctggagagcaacgacgagaaggagggccaggaggccacctgcagcagaccccagatcgtgcccgagcccatggacttcagaaagctgagcaccttcagagagagcttcaagaagagagtgatcggccaggaccacgacttcagcgagagcagcgaggaggaggcccccgccgaggccagcagcggcgccctgagaagcaagcacggcgagaaggcccccatgaccagcagaagcaccagcacctggagaatccccagcagaaagagaagattcagcagcagcgacttcagcgacctgagcaacggcgaggagctgcaggagacctgcagcagcagcctgagaagaggcagcggcaaggaggactag

SEQ ID NO: 82407 - DNA, 1338 bp, Artificial Sequence
  derived and/or modified sequence
atgatgttcactgaagatcagggtgtggacgatcgtttactgtacgatattgtattcaagcatttcaagaggaacaaggttgaaatttccaacgctattaagaagacattcccttttttggaaggactgagagatcgagatctgatcactaacaagatgtttgaagattcccaagattcttgcagaaacctggtcccggtccaaagagttgtgtacaacgtactctcggagttggaaaagacctttaatcttccggtcctggaagcacttttctcagacgttaacatgcaggagtaccccgacctcatccatatctataaaggatttgagaacgtaattcatgataagctccccctccaggagagcgaagaggaagaaagagaagagcgcagtgggctgcaactgtccctggagcagggaaccggcgagaactctttccgttcacttacttggccaccctcaggcagcccttcccatgccggcacaacaccccctgaaaacggcctgtccgagcatccctgtgaaactgaacagattaacgctaagcgcaaagacacgacttcggataaggatgactcattaggatctcagcaaacgaatgagcagtgcgcacaaaaggccgagcccacggaaagctgtgagcaaattgccgttcaggtgaacaacggagacgcaggacgggaaatgccttgccctctgccatgcgacgaagaatccccggaggcagagctacacaatcatgggattcagatcaattcctgctcagttaggctggtcgacatcaagaaggagaagcccttcagtaactctaaagtagagtgccaggcccaggccaggactcaccacaatcaagcctcggacatcatcgtgatctcatccgaggatagtgaaggctccactgatgtcgatgaacctctcgaggtattcattagtgcacctaggtctgaaccagtgattaataacgataaccctcttgaatctaatgatgagaaggaggggcaggaggccacctgctctaggccacagattgtgcctgaacccatggatttcaggaagctcagcacattccgtgagtctttcaagaagcgggtgatcggtcaggaccacgacttctcagagagctccgaggaggaagcccccgccgaagcatcttcaggagccctaagaagcaaacacggcgagaaggccccaatgacctcgcgttctacatcgacatggcgaattcctagtcgaaagcgccgcttcagcagttctgatttctctgacctgagcaatggggaggaactccaagagacttgctccagctctttaaggagagggtctgggaaagaggattag

SEQ ID NO: 82408 - DNA, 1338 bp, Artificial Sequence
  derived and/or modified sequence
atgatgttcacagaggaccagggcgtggatgaccggctgctgtatgacatcgtgttcaagcacttcaagaggaacaaggtggagatcagcaatgccatcaagaagaccttccccttcctggagggcctgcgggaccgggacctgatcaccaacaagatgtttgaggacagccaggacagctgcaggaacctggtgcctgtgcagagggtggtgtacaacgtgctgtctgagctggagaagaccttcaacctgcctgtgctggaggccctcttcagtgatgtgaacatgcaggagtacccagacctgatccacatctacaagggctttgaaaatgtcatccatgacaagctgcccctgcaggagagcgaggaggaggagcgggaggagaggagcggcctgcagctgagcctggagcagggcactggagaaaattccttccgcagcctgacctggccacccagcggcagccccagccacgccggcaccaccccaccagaaaatggcctgtctgagcacccctgtgaaacagagcagatcaatgccaagaggaaggacaccaccagtgacaaggatgacagcctgggcagccagcagaccaatgagcagtgtgcccagaaggccgagcccacagagagctgtgagcagattgctgtgcaggtgaacaatggagatgctggccgggagatgccctgccccctgccctgtgatgaggagagccctgaggccgagctgcacaaccacggcatccagatcaacagctgcagcgtgcggctggtggacatcaagaaggagaagcccttcagcaacagcaaggtggagtgccaggcccaggcccggacccaccacaaccaggccagtgacatcatcgtcatcagcagcgaggacagcgagggcagcacagatgtggatgagcccctggaggtgttcatcagcgcccccaggtctgagcctgtgatcaacaatgacaaccccctggagagcaatgatgagaaggagggccaggaggccacctgcagccggccccagatcgtgcctgagcccatggacttcaggaagctgagcaccttccgggagagcttcaagaagagggtgattggccaggaccatgacttcagcgagagcagcgaggaggaggccccagctgaggccagcagcggggccctgcggagcaagcacggggagaaggcccccatgaccagccgcagcaccagcacctggaggatccccagcaggaagaggcgcttcagcagcagtgacttcagtgacctgagcaatggagaggagctgcaggagacctgcagcagcagcctgcggcggggcagcggcaaggaggactag

SEQ ID NO: 82409 - DNA, 1338 bp, Artificial Sequence
  derived and/or modified sequence
atgatgttcaccgaggaccagggcgtggacgaccggctgctgtacgatatcgtgtttaagcactttaagcggaacaaggtggagatttcaaacgcgattaagaaaacgttcccttttctcgagggactgagggaccgagacctcatcacaaataagatgtttgaggatagtcaggacagttgtcggaaccttgttccagtccagcgggttgtatataacgtcctgtctgaactggagaagacttttaaccttccagtcctggaagcccttttcagtgatgtgaatatgcaggagtaccccgatctaatacacatttacaaggggtttgagaacgtaattcacgataaactgccacttcaggagagcgaagaggaagaaagagaggaacgttctgggctgcaattaagtctggaacagggcaccggagagaattcttttcggtcactgacttggcctcccagcgggtctccatcgcacgccggcacaacccctcccgagaatggcctttcagagcacccctgtgagacggagcaaatcaatgccaagaggaaagataccacaagcgataaggacgacagtcttggatctcagcagaccaacgagcagtgcgcgcagaaagctgaacccactgagagctgtgagcagatcgctgtacaggttaacaacggagacgctggccgcgagatgccgtgcccattaccttgtgacgaagaatcacccgaggcagagctgcacaaccacggcatccagatcaactcttgttccgtgcgcctggtggacatcaagaaagagaaacccttttctaactccaaggtggagtgtcaggcccaggccaggacacatcacaatcaggcatcagatataatcgttatctctagtgaagacagcgagggcagcactgatgtcgatgagcccctggaagtgtttatatccgcacccagaagcgagcctgtaattaataacgataaccccttggaatccaatgatgaaaaggaaggacaagaagctacttgtagtagaccacagatcgtgcccgaacccatggatttccgcaagctgtcgacctttcgcgagtccttcaaaaagcgggtgatcgggcaggatcacgatttcagcgagagcagcgaagaagaggcacctgcagaggcctcctcaggcgcgctcagaagcaaacatggtgaaaaggccccaatgacatcccgctcaacttccacttggcgcatcccctcgcggaagcggcgtttcagctccagtgacttttcagacctctcaaatggagaggaactgcaggaaacatgcagcagctctctccgacgcggcagtggaaaggaagattag

SEQ ID NO: 82410 - DNA, 1338 bp, Artificial Sequence
  derived and/or modified sequence
atgatgttcactgaggaccaaggcgtagatgaccggctcttgtatgacatcgtctttaagcacttcaaacgaaacaaagtagaaatttccaacgccatcaagaagaccttccctttcctggagggcctgagggatcgcgatctgattaccaataagatgtttgaagattcccaggattcatgccggaatctggtgccggtgcagcgagtggtgtacaacgtgttaagcgagctcgagaagacctttaatctcccagtgctcgaagccctgttttcggatgtcaacatgcaggagtatcccgacctcatccatatttacaaaggattcgagaacgttatccacgataagctgcctttgcaggaaagcgaggaggaggagcgggaagaacgcagcggcctgcagctgtcactggagcaggggactggcgagaacagcttccggtcgctgacttggcctccttcgggaagcccatcccacgctgggacgaccccccctgagaatggtctgtccgagcatccctgtgagacagagcagataaacgccaagcgcaaggacactacttcagataaggatgattcactgggcagccaacagaccaacgaacagtgcgcccaaaaagccgaaccaactgagagctgtgagcaaattgcagtgcaggtgaacaacggggatgccggaagagaaatgccttgtcctcttccttgcgatgaagagagtcccgaggcggagctccacaaccacggaatacagatcaactcatgtagcgtccgcctggtggatataaaaaaggaaaaaccattcagcaactccaaggttgagtgtcaggcacaagcacggactcaccataaccaggccagcgatataatcgttattagtagtgaggactcggaaggatcaaccgacgtcgacgagccacttgaagtatttatcagtgctcccaggagcgaacccgtgattaataacgataaccctcttgagtccaatgatgagaaggaaggacaggaggccacctgttcccgacctcaaatcgtgcctgagccaatggattttaggaagctttcgaccttcagagaaagcttcaaaaagcgcgtgatcggccaggatcatgacttcagcgaatcaagcgaggaggaagccccagctgaggcttcctccggtgcactgcggtcaaagcatggagagaaagcacccatgacctctcgctctactagcacctggcgcataccaagtagaaagcgccgtttcagcagctctgatttcagtgatttgagcaacggcgaagagttacaggaaacctgtagcagcagtctgagacgcggaagcggcaaggaggactag

SEQ ID NO: 82411 - DNA, 2037 bp, Artificial Sequence
  derived and/or modified sequence
agacgctgtggtctcacctgtcctggcaaggggcctctgccggctgttcccatgactggctcagggtctgagttcttattccatcaaccttgatcaaaagaaggaaagggaagaaaaaggcccagggaggctgaatgaatgtatttcaccagtagcaaatgagatgaaccatcttcctgcacacagccacgatttgcaaaggtttttggagaggaataaatttaatgaaagatgtacatgacttctaaaaactataagcagtgctgggtaaaattaaacacatgatgttcacggaagaccagggtgtagatgacaggctgctctatgacattgtattcaagcacttcaaaagaaataaggtggagatttcaaatgcaataaaaaagacatttccattcctcgagggcctccgtgatcgtgatctcatcacaaataaaatgtttgaagattctcaagattcttgtagaaacctggtccctgtacagagagtggtgtacaatgttcttagtgaactggagaagacatttaacctgccagttctggaagcactgttcagcgatgtcaacatgcaggaataccccgatttaattcacatttataaaggctttgaaaatgtaatccatgacaaattgcctctccaagaaagtgaagaagaagagagggaggagaggtctggcctccaactaagtcttgaacaaggaactggtgaaaactcttttcgaagcctgacttggccaccttcgggttccccatctcatgctggtacaaccccacctgaaaatggactctcagagcacccctgtgaaacagaacagataaatgcaaagagaaaagatacaaccagtgacaaagatgattcgctaggaagccaacaaacaaatgaacaatgtgctcaaaaggctgagccaacagagtcctgcgaacaaattgctgtccaagtgaataatggggatgctggaagggagatgccctgcccgttgccctgtgatgaagaaagcccagaggcagagctacacaaccatggaatccaaattaattcctgttctgtgcgactggtggatataaaaaaggaaaagccattttctaattcaaaagttgagtgccaagcccaagcaagaactcatcataaccaggcatctgacataatagtcatcagcagtgaggactctgaaggatccactgacgttgatgagcccttagaagtcttcatctcagcaccgagaagtgagcctgtgatcaataatgacaaccctttagaatcaaatgatgaaaaggagggccaagaagccacttgctcacgaccccagattgtaccagagcccatggatttcagaaaattatctacattcagagaaagttttaagaaaagagtgataggacaagaccacgacttttcagaatccagtgaggaggaggcgcccgcagaagcctcgagcggggcactgagaagcaagcatggtgagaaggctcctatgacttctagaagtacatctacttggagaatacccagcaggaagagacgtttcagcagtagtgacttttcagacctgagtaatggagaagagcttcaggaaacctgcagctcatccctaagaagagggtcaggtaaagaagattaggatgccaagacttggcctgcagaatgtcaggaatgtgaattaaaagctgctgtttccagacgctttttattctgagcaccttcactaccttgtatccagttcatctgggaactcctttttgcattttagaaaatggaaagaggcaggaaattatgataaactcatgtttaacagaaagagtttcactgactaaatgtatgtaattatattttgttgttgtagaagaaataaatagcaaatttgtggtattcttttttttaaacctgctctcattcctattaacactaagatcttagatttttatagtgataaatgggttgacatcattgtcatttgtaattgtaaagcctcaaaagacaactgttcctactatgtaattatagacagaaataaaaacttcagatcaaacactctcaaa

SEQ ID NO: 82412 - protein, 340 aa, Artificial Sequence
  derived and/or modified sequence
METVISSDSSPAVENEHPQETPESNNSVYTSFMKSHRCYDLIPTSSKLVVFDTSLQVKKAFFALVTNGVRAAPLWDSKKQSFVVLRALSCPLGMLTITDFINILHRYYKSALVQIYELEEHKIETWREVYLQDSFKPLVCISPNASLFDAVSSLIRNKIHRLPVIDPESGNTLYILTHKRILKFLKLFITEFPKPEFMSKSLEELQIGTYANIAMVRTTTPVYVALGIFVQHRVSALPVVDEKGRVVDIYSKFDVINLAAEKTYNNLDVSVTKALQHRSHYFEGVLKCYLHETLETIINRLVEAEVHRLVVVDENDVVKGIVSLSDILQALVLTGGEKKP

SEQ ID NO: 82413 - DNA, 1023 bp, Artificial Sequence
  derived and/or modified sequence
atggagacagtgatatctagtgattccagcccggctgttgaaaacgagcatcctcaggaaactcccgaaagcaacaatagcgtatatacgtccttcatgaagagccataggtgttatgacttgattcccacctcttcgaagctggtagtttttgacactagcctgcaagtcaaaaaagcattcttcgcattggttacaaatggtgtccgcgccgctccattgtgggacagtaaaaagcagtcattcgtagtcctgagagccctgtcatgccccctcggcatgcttaccatcactgactttataaacatcttgcataggtactataagagtgccttagtgcagatttatgaactggaggaacacaaaattgaaacttggagggaggtgtatctgcaagactccttcaagcctttggtctgcatttctccgaacgccagtctgtttgacgccgtctcctcattaatcagaaataaaatacataggctgccagtgatcgaccctgagagtggaaacaccctgtatatactgacacataaaaggattctgaaatttctgaaactttttattacggaatttcctaaacccgagtttatgtctaagtcattagaagaactgcagatcggtacgtatgcgaatattgctatggtccgcacaactacacctgtgtatgtggctctgggaatattcgtgcagcatcgcgtgagcgccctgcctgtcgtggacgagaagggacgagtggtggacatctattctaaattcgacgtgataaacctggctgccgaaaaaacatacaataacctagacgtttccgtgactaaagccctgcagcacaggtcacactacttcgagggcgtgctcaagtgttacctccacgaaaccttggagaccatcattaaccgtctagtggaagctgaggtccatcgtcttgtcgtagtagatgaaaacgatgttgtgaaggggattgtgagccttagcgatattctccaggcccttgtcctgactggaggtgagaagaaaccttag

SEQ ID NO: 82414 - DNA, 1023 bp, Artificial Sequence
  derived and/or modified sequence
atggagaccgtcatcagcagtgacagcagccctgctgtggagaatgagcacccccaggagaccccagagagcaacaacagcgtgtacaccagcttcatgaagagccaccgctgctatgacctgatccccaccagcagcaagctggtggtgtttgacaccagcctgcaggtgaagaaggccttctttgccctggtgaccaatggagtgcgggccgcccccctgtgggacagcaagaagcagagctttgtggtgctgcgggccctgagctgccccctgggcatgctgaccatcacagacttcatcaacatcctgcaccgctactacaagagcgccctggtgcagatctatgagctggaggagcacaagattgagacctggagggaggtgtacctgcaggacagcttcaagcccctggtgtgcatcagccccaatgccagcctgtttgatgctgtgagcagcctcatccggaacaagatccaccggctgcctgtgattgatcctgagagcggcaacaccctgtacatcctgacccacaagaggatcctgaagttcctgaagctgttcatcacagagttccccaagccagagttcatgagcaagagcctggaggagctgcagatcggcacctacgccaacatcgccatggtgaggaccaccacccctgtgtatgtggccctgggcatctttgtgcagcaccgggtgtctgccctgcctgtggtggatgagaagggccgggtggtggacatctacagcaagtttgatgtgatcaacctggccgctgagaagacctacaacaacctggatgtgtctgtgaccaaggccctgcagcacaggagccactactttgagggcgtgctgaagtgctacctgcacgagaccctggagaccatcatcaaccggctggtggaggccgaggtgcaccggctggtggtggtggatgaaaatgatgtggtgaagggcatcgtgtccctgagtgacatcctgcaggccctggtgctgaccggcggggagaagaagccctag

SEQ ID NO: 82415 - DNA, 1683 bp, Artificial Sequence
  derived and/or modified sequence
tttcctaaagcgaggaaaccaagccgggcgcctcttgcaatggagacggtcatttcttcagatagctccccagctgtggaaaatgagcatcctcaagagaccccagaatccaacaatagcgtgtatacttccttcatgaagtctcatcgctgctatgacctgattcccacaagctccaaattggttgtatttgatacgtccctgcaggtgaagaaagctttttttgctttggtgactaacggtgtacgagctgcccctttatgggatagtaagaagcaaagttttgtggtgctgagggctctgtcttgtcctctaggcatgctgaccatcactgatttcatcaatatcctgcaccgctactataaatcagccttggtacagatctatgagctagaagaacacaagatagaaacttggagagaggtgtatctccaggactcctttaaaccgcttgtctgcatttctcctaatgccagcttgtttgatgctgtctcttcattaattcggaacaagatccacaggctgccagttattgacccagaatcaggcaatactttgtacatcctcacccacaagcgcattctgaagttcctcaaattgtttatcactgagttccccaagccagagttcatgtccaagtctctggaagagctacagattggcacctatgccaatattgctatggttcgcactaccacccccgtctatgtggctctggggatttttgtacagcatcgagtctcagccctgccagtggtggatgagaaggggcgtgtggtggacatctactccaagtttgatgttatcaatctggcagcagaaaagacctacaacaacctagatgtatctgtgactaaagccttgcaacatcgatcacattactttgagggtgttctcaagtgctacctgcatgagactctggagaccatcatcaacaggctagtggaagcagaggttcaccgacttgtagtggtggatgaaaatgatgtggtcaagggaattgtatcactgtctgacatcctgcaggccctggtgctcacaggtggagagaagaagccctgagctgggggaaggggtcatgcagcaccaggggatatgcccaactcactgcctgctggaagctctgtgggaatcagatgaaacttgagggaattgtgactctgttccctgttcagggtcccctgcccttctatctgggagctagggaaggtatgggggaggaaagagaatggatttatagctacccttaccctcacacatacacttgaaaaaactttcagcctagccagttctagcccctgtcctcttagatatatccccctttctgggtgaactataggctctgtgcctctcagacaaattctgatctctaagagatccccagacctcacttgcctctgcctccatcttggccctgattcaaccctaagataatagcacaacaaaattcttcataaagatatttttattcacctgttccgtgctatatggaggaggccaagtccatttagtgacatttcttcccataatgtgagtggggaggattgtggggaggaggggctttgggttcctgtgtttgtgcatatgaagggagatgggggttaggtggaggaggagagcagcgtggttagctaaggttattgctttttgtggcaaatctaattaaatgacaggaatctcttc

SEQ ID NO: 82416 - DNA, 1023 bp, Artificial Sequence
  derived and/or modified sequence
atggagaccgtgatcagcagcgacagcagccccgccgtggagaacgagcatccacaggaaactccagagtcaaataacagcgtctacacttcgtttatgaaatcacacaggtgctatgaccttattcctacatcttctaagcttgtcgtttttgacaccagtttacaggttaaaaaggctttctttgctctggtgaccaatggcgtgcgggctgcgccactgtgggactccaagaaacagtccttcgtggtgttgagagcgctcagttgcccactgggcatgcttacaatcaccgacttcatcaacattctgcacagatattacaagtccgctttggttcagatttatgaactcgaggaacacaagattgaaacctggagggaggtgtacctgcaggacagttttaaacccctcgtgtgtatcagcccaaacgcctccctcttcgacgccgtctcatcgctgatcagaaacaagattcatcgcctccctgtgatcgaccccgagagtggaaacactttatatatcctaacgcataagcggattcttaaattcctgaaactttttataaccgagtttccaaagcccgagttcatgagcaaatctctggaggaactccagatcggcacttatgcgaacatcgctatggttagaacgactacgcccgtgtatgtggccctggggatttttgtccagcatagagtgtctgccctacccgtcgtggatgagaagggacgagtggtggatatctattctaaattcgacgttattaacttggctgctgagaaaacctataacaacctggatgtgagcgtgaccaaggcactccagcatcgttctcactacttcgagggagttttgaagtgttatctgcatgagaccctcgagacgattataaatagacttgtggaggcggaggtccacagactcgtggtcgttgacgagaatgacgtcgtgaaggggattgtctctctttctgacattttgcaggcgctcgttctgaccggcggggagaagaaaccatag

SEQ ID NO: 82417 - DNA, 1023 bp, Artificial Sequence
  derived and/or modified sequence
atggaaaccgtgatctcgtcagatagctctcctgcggtcgaaaacgagcaccctcaagaaactcctgaaagcaataatagcgtgtatacatcgtttatgaaatcgcatcgctgctacgacttaattccaacaagctcaaagttggttgtgttcgacacgtcgttgcaggtgaaaaaagcattctttgccctcgtgacgaacggcgtgagagctgctcctttgtgggacagtaagaaacagagcttcgtcgtgcttagagcgttgagttgcccgctgggtatgcttacaattactgacttcataaatatactacacagatactataagtcagctctggtgcagatctacgagcttgaagaacacaaaatagaaacttggagggaagtttacctgcaagactccttcaagccactcgtgtgcatcagccctaacgcgagcttattcgatgccgtgtccagtctgattcgcaacaagattcaccggctgccagtgattgatcccgagtccggtaacaccctgtacattctcacacacaagcgaattctgaaattccttaagctgtttataacggagtttcctaagccagaattcatgtcaaagagcttggaagagctccagatcggaacttacgctaacattgcaatggtgagaacgaccactcctgtttacgtcgcccttggaatttttgttcagcaccgcgtctcagcactgccggtggtggatgagaaaggccgtgtggtcgacatctacagtaagtttgatgttattaatcttgctgcggaaaagacctataataacctggatgtgtcagtgacaaaagctttacagcacagaagccattattttgagggtgtgctcaaatgttatctccacgagaccctcgaaacaatcatcaaccgactagtcgaagccgaggttcatcggttagtagtggtcgatgagaacgatgttgtaaagggcatcgtctcgctctctgatatcctgcaggcactggttctgaccggtggcgagaagaagccatag

SEQ ID NO: 82418 - DNA, 1023 bp, Artificial Sequence
  derived and/or modified sequence
atggagaccgtgatcagcagcgacagcagccccgccgtggagaacgagcacccccaggagacccccgagagcaacaacagcgtgtacaccagcttcatgaagagccacagatgctacgacctgatccccaccagcagcaagctggtggtgttcgacaccagcctgcaggtgaagaaggccttcttcgccctggtgaccaacggcgtgagagccgcccccctgtgggacagcaagaagcagagcttcgtggtgctgagagccctgagctgccccctgggcatgctgaccatcaccgacttcatcaacatcctgcacagatactacaagagcgccctggtgcagatctacgagctggaggagcacaagatcgagacctggagagaggtgtacctgcaggacagcttcaagcccctggtgtgcatcagccccaacgccagcctgttcgacgccgtgagcagcctgatcagaaacaagatccacagactgcccgtgatcgaccccgagagcggcaacaccctgtacatcctgacccacaagagaatcctgaagttcctgaagctgttcatcaccgagttccccaagcccgagttcatgagcaagagcctggaggagctgcagatcggcacctacgccaacatcgccatggtgagaaccaccacccccgtgtacgtggccctgggcatcttcgtgcagcacagagtgagcgccctgcccgtggtggacgagaagggcagagtggtggacatctacagcaagttcgacgtgatcaacctggccgccgagaagacctacaacaacctggacgtgagcgtgaccaaggccctgcagcacagaagccactacttcgagggcgtgctgaagtgctacctgcacgagaccctggagaccatcatcaacagactggtggaggccgaggtgcacagactggtggtggtggacgagaacgacgtggtgaagggcatcgtgagcctgagcgacatcctgcaggccctggtgctgaccggcggcgagaagaagccctag

SEQ ID NO: 82419 - protein, 465 aa, Artificial Sequence
  derived and/or modified sequence
MSDVTIVKEGWVQKRGEYIKNWRPRYFLLKTDGSFIGYKEKPQDVDLPYPLNNFSVAKCQLMKTERPKPNTFIIRCLQWTTVIERTFHVDTPEEREEWTEAIQAVADRLQRQEEERMNCSPTSQIDNIGEEEMDASTTHHKRKTMNDFDYLKLLGKGTFGKVILVREKASGKYYAMKILKKEVIIAKDEVAHTLTESRVLKNTRHPFLTSLKYSFQTKDRLCFVMEYVNGGELFFHLSRERVFSEDRTRFYGAEIVSALDYLHSGKIVYRDLKLENLMLDKDGHIKITDFGLCKEGITDAATMKTFCGTPEYLAPEVLEDNDYGRAVDWWGLGVVMYEMMCGRLPFYNQDHEKLFELILMEDIKFPRTLSSDAKSLLSGLLIKDPNKRLGGGPDDAKEIMRHSFFSGVNWQDVYDKKLVPPFKPQVTSETDTRYFDEEFTAQTITITPPEKCQQSDCGMLGNWKK

SEQ ID NO: 82420 - DNA, 1398 bp, Artificial Sequence
  derived and/or modified sequence
atgagcgacgtgaccatcgtgaaggagggctgggtgcagaagagaggcgagtacatcaagaactggagacccagatacttcctgctgaagaccgacggcagcttcatcggctacaaggagaagccccaggacgtggacctgccctaccccctgaacaacttcagcgtggccaagtgccagctgatgaagaccgagagacccaagcccaacaccttcatcatcagatgcctgcagtggaccaccgtgatcgagagaaccttccacgtggacacccccgaggagagagaggagtggaccgaggccatccaggccgtggccgacagactgcagagacaggaggaggagagaatgaactgcagccccaccagccagatcgacaacatcggcgaggaggagatggacgccagcaccacccaccacaagagaaagaccatgaacgacttcgactacctgaagctgctgggcaagggcaccttcggcaaggtgatcctggtgagagagaaggccagcggcaagtactacgccatgaagatcctgaagaaggaggtgatcatcgccaaggacgaggtggcccacaccctgaccgagagcagagtgctgaagaacaccagacaccccttcctgaccagcctgaagtacagcttccagaccaaggacagactgtgcttcgtgatggagtacgtgaacggcggcgagctgttcttccacctgagcagagagagagtgttcagcgaggacagaaccagattctacggcgccgagatcgtgagcgccctggactacctgcacagcggcaagatcgtgtacagagacctgaagctggagaacctgatgctggacaaggacggccacatcaagatcaccgacttcggcctgtgcaaggagggcatcaccgacgccgccaccatgaagaccttctgcggcacccccgagtacctggcccccgaggtgctggaggacaacgactacggcagagccgtggactggtggggcctgggcgtggtgatgtacgagatgatgtgcggcagactgcccttctacaaccaggaccacgagaagctgttcgagctgatcctgatggaggacatcaagttccccagaaccctgagcagcgacgccaagagcctgctgagcggcctgctgatcaaggaccccaacaagagactgggcggcggccccgacgacgccaaggagatcatgagacacagcttcttcagcggcgtgaactggcaggacgtgtacgacaagaagctggtgccccccttcaagccccaggtgaccagcgagaccgacaccagatacttcgacgaggagttcaccgcccagaccatcaccatcaccccccccgagaagtgccagcagagcgactgcggcatgctgggcaactggaagaagtag

SEQ ID NO: 82421 - DNA, 1398 bp, Artificial Sequence
  derived and/or modified sequence
atgtccgatgtgacaatcgtaaaggaggggtgggtgcagaaacgcggggagtacataaaaaactggagacctcgatattttttgctgaagactgacggatcatttattggatacaaagagaaaccccaggacgtcgatctgccttatccccttaacaattttagcgttgccaaatgccaacttatgaagaccgagcgcccgaaacccaacacttttattattcggtgtctccagtggaccacggtgatagagagaacattccatgtcgacacgcctgaggagcgggaggagtggacagaagccatccaggctgtagcggatcgcctgcagagacaagaagaagagcgtatgaactgtagtccaacttctcaaattgacaatattggggaagaggaaatggatgcatcgaccacgcatcataagcggaagacaatgaatgattttgactatcttaagcttctggggaagggcactttcgggaaagtgattttggtccgagaaaaagcatccggaaaatattatgcaatgaagatcctaaagaaagaagtgattatcgccaaggacgaagttgctcacacactgacagaatcacgggtgctgaaaaacacccgccaccccttcttgacatctcttaaatactctttccagacaaaggataggttgtgctttgttatggagtatgtcaacggaggagagctgttctttcacctgtcaagggaaagagtcttcagtgaggacagaacacgtttttacggcgcagagatcgtcagtgcactggattacctgcactctggaaagattgtgtatcgggatttgaagttagaaaacctgatgctggacaaggatgggcatataaagatcaccgacttcggcttatgtaaggagggcataactgatgcagccacaatgaagacgttctgcggaacaccggagtaccttgcacctgaggtgcttgaggataacgattatgggcgggctgtagattggtggggcctgggggtcgtgatgtacgaaatgatgtgcggaagactgccattttacaatcaggatcacgagaaactgttcgagttaatcctcatggaggacatcaagttccctcggacactcagtagcgacgccaaatcgctgctgagtggactgttgatcaaggaccccaataaacgcctgggcggcggacccgacgacgccaaagagattatgcggcactccttttttagcggagttaactggcaggacgtatacgataaaaagctggtgcctccctttaagccacaggtgaccagtgaaactgatacaaggtactttgacgaggagttcactgcccagacaatcaccatcactccccctgaaaaatgtcagcagagcgattgcgggatgctcggcaactggaaaaaatag

SEQ ID NO: 82422 - DNA, 1398 bp, Artificial Sequence
  derived and/or modified sequence
atgagcgacgtcacaatcgtcaaagagggctgggttcagaagagaggggaatatattaaaaactggaggcctagatacttcctgctcaagactgatggctcctttatcggatacaaggaaaaaccacaggacgtggatttgccctatccactgaacaactttagcgtagccaaatgccaattaatgaagacggaaagaccaaaacccaacaccttcatcattagatgtctccaatggactaccgtgatcgagagaaccttccacgtggacacacccgaggagagggaggagtggacggaggccatccaggccgtcgccgaccgtttgcagcggcaagaggaggaaagaatgaactgctcccctacgtcccagattgataatattggggaggaagagatggacgccagcactacacaccataagaggaagaccatgaacgacttcgattacctgaagttgctgggaaaggggaccttcggtaaggtgatcctggtaagagaaaaggcgagcggtaagtactacgccatgaagatactcaaaaaagaggtgatcatcgcaaaagacgaagtggctcacacgttgactgagagccgagtcctcaaaaacactaggcacccatttttgacgagtctgaaatactcgtttcagacaaaagaccgactctgctttgtaatggagtacgtaaacggcggtgagttgttcttccatcttagccgtgaacgcgtgttcagtgaggaccgaactaggttctacggtgcagagattgtttctgccctggattacttgcatagcggaaagatcgtctatagggacctcaagctggaaaacctgatgctcgataaggatggtcatattaagataaccgactttggactgtgcaaggagggcatcactgatgcagccactatgaaaaccttttgcggaacccccgagtacctagctccggaggtcctagaggacaatgactacggcagggccgtggactggtggggtctgggcgtggtgatgtatgaaatgatgtgcggaaggctgccattctacaatcaggaccatgagaagctgtttgagcttatcctgatggaggatatcaaattcccccgcacacttagctcagacgctaagtccctcctcagtggcctgcttatcaaggatcccaacaaacgcctgggaggcggccccgacgacgcaaaagaaatcatgcgccacagcttctttagtggagtgaattggcaggacgtgtatgacaaaaaactggttccaccgttcaaaccgcaagttaccagtgaaacagatacacgctatttcgacgaggaattcaccgcacagaccatcactataacgccccccgagaagtgccaacagagcgattgcgggatgttggggaattggaaaaaatag

SEQ ID NO: 82423 - DNA, 1398 bp, Artificial Sequence
  derived and/or modified sequence
atgtctgatgtgaccatcgtgaaggagggctgggtgcagaagagaggagagtacatcaagaactggaggccccgctacttcctgctgaagacagatggcagcttcatcggctacaaggagaagccccaggatgtggacctgccctaccccctgaacaacttctctgtggccaagtgccagctgatgaagacagagcggcccaagcccaacaccttcatcatccgctgcctgcagtggaccaccgtgattgaaagaaccttccacgtggacaccccagaggagcgggaggagtggacagaggccatccaggccgtggccgaccggctgcagaggcaggaggaggagaggatgaactgcagccccaccagccagattgacaacatcggggaggaggagatggatgccagcaccacccaccacaagaggaagaccatgaatgactttgactacctgaagctgctgggcaagggcaccttcggcaaggtgatcctggtgcgggagaaggccagcggcaagtactatgccatgaagatcctgaagaaggaggtgatcatcgccaaggatgaggtggcccacaccctgacagagagccgggtgctgaagaacaccaggcaccccttcctgaccagcctgaagtacagcttccagaccaaggaccggctgtgctttgtgatggagtatgtgaatggaggagagctgttcttccacctgagccgggagagggtcttcagcgaggacaggacccgcttctatggagctgagatcgtgtctgccctggactacctgcacagcggcaagatcgtgtacagagacctgaagctggagaacctgatgctggacaaggatggccacatcaagatcacagactttggcctgtgcaaggagggcatcacagatgctgccaccatgaagaccttctgtggcaccccagagtacctggcccctgaggtgctggaggacaatgactatggccgggctgtggactggtggggcctgggcgtggtgatgtatgagatgatgtgtggccgcctgcccttctacaaccaggaccacgagaagctgtttgagctgatcctgatggaggacatcaagttccccaggaccctgagcagtgatgccaagagcctgctgagcggcctgctgatcaaggaccccaacaagaggctgggcggcggcccagatgatgccaaggagatcatgaggcacagcttcttcagcggcgtgaactggcaggatgtgtatgacaagaagctggtgccccccttcaagccccaggtgaccagcgagacagacacccgctactttgatgaggagttcaccgcccagaccatcaccatcaccccacctgagaagtgccagcagagcgactgtggcatgctgggcaactggaagaagtag

SEQ ID NO: 82424 - DNA, 1398 bp, Artificial Sequence
  derived and/or modified sequence
atgagcgacgtgaccatcgtgaaggagggctgggtgcagaagcggggggagtacattaaaaactggcggccccgatacttcctactcaaaaccgacggatcttttatcggatataaggaaaaaccacaggatgttgacctgccttacccccttaataatttttcagtggccaaatgtcagttgatgaagaccgagcgaccaaaacctaatacattcataatccggtgcctacagtggacgaccgtgattgaaagaacttttcatgtcgatacacccgaggaacgtgaggagtggacagaggccatccaagctgtagcggatcggctgcagcggcaggaagaagagaggatgaactgttctcctactagtcagatagacaatatcggtgaggaggagatggacgccagtactactcaccacaagcggaagacaatgaatgatttcgattacctcaaacttctcggaaaaggcacgtttggcaaagttattcttgttagggagaaagcctcagggaagtactatgccatgaagattttgaagaaggaagtgatcatcgccaaggatgaagttgcccacactctcaccgagagtcgggtgctgaagaacacccggcacccgttcctgacttccctgaagtactccttccagacaaaagatcgactgtgctttgtcatggagtacgtcaacgggggcgaactatttttccatttgtccagagagagggtgttctctgaagacagaacaagattttacggtgctgagatcgtgtccgctctcgattaccttcatagcggcaaaattgtctaccgagatttgaaacttgagaaccttatgctggacaaagacgggcatatcaagatcaccgattttgggctgtgtaaggagggaattaccgacgccgctacaatgaaaaccttctgtgggacacctgagtatttagctcctgaagtgctcgaggataacgactatgggagggctgtggactggtggggcctcggggtagtgatgtacgagatgatgtgtggaagattacctttttacaatcaggatcatgagaaactgtttgaattgatccttatggaagatataaagtttccaaggaccctcagctccgacgcgaagagcctcctttcaggactcctgattaaggatccgaacaaaaggttaggaggcggcccagatgatgccaaagagatcatgagacacagttttttctctggtgtgaattggcaggacgtctatgataaaaagctagttcctccattcaaaccacaagtgacttccgagactgatactagatattttgatgaggaatttactgctcagacaataaccataactccaccagaaaaatgtcagcaaagtgactgtggaatgctcggcaattggaagaaatag

SEQ ID NO: 82425 - DNA, 1398 bp, Artificial Sequence
  derived and/or modified sequence
atgagcgacgtgaccatcgtgaaggagggctgggtgcagaagcggggcgaatatattaagaactggaggcctcgatattttctcctcaaaacagacggaagctttatagggtacaaggagaaacctcaggatgtggatctgccttacccattgaacaacttcagcgttgctaaatgccagctcatgaagactgaacgtccgaaacccaacactttcattattcgatgcctacagtggactacagtcattgaaaggaccttccatgtggacacaccagaagagagagaggaatggaccgaagccattcaggctgtagccgaccggctccaacggcaggaagaggaaaggatgaattgttctccaacctcccagatcgacaacatcggggaggaggaaatggacgcatctacaacccaccataagcgaaagacaatgaatgactttgactatttgaaactcttgggcaagggcactttcgggaaagtgatactggtgagagagaaggccagtggaaagtattacgccatgaaaattttgaagaaagaagttattatagccaaggacgaagtggcccacaccctgacagagtctcgcgtcttgaaaaacacacgtcacccatttctcacttccctaaaatattcctttcaaaccaaagaccggctgtgctttgttatggaatacgtcaatggtggggagctattctttcatctgtctagggaaagggtttttagcgaagataggacgaggttctatggcgctgaaatagtatctgcactggactatctgcattccggcaaaatcgtgtaccgagacctcaagcttgagaacttaatgctcgataaggacggacacataaaaattacagacttcggactatgcaaagaaggcataactgatgccgctacaatgaagacgttctgcggaaccccggagtaccttgcccctgaggtgttggaagacaatgactacggccgcgccgttgattggtgggggttgggggtagtgatgtacgagatgatgtgtgggcgcttgccattctataaccaggaccatgagaagcttttcgagctgattttaatggaggatatcaaatttcccagaaccttgagtagcgatgccaaatctttactgtccggcctgctgatcaaggaccctaacaagcgcctcgggggcggccccgacgacgctaaagagatcatgcgacactcattcttcagtggtgttaattggcaagacgtgtatgacaaaaagttggtgccaccttttaaacctcaagtcacaagcgagaccgacacccggtatttcgacgaggagtttacagctcagactatcactatcacgccgccagaaaagtgtcaacagagcgactgcgggatgcttggaaattggaaaaagtag

SEQ ID NO: 82426 - DNA, 1398 bp, Artificial Sequence
  derived and/or modified sequence
atgtccgacgtgaccatagtgaaagaagggtgggtgcagaaaagaggtgaatacattaaaaactggcggccaagatactttcttttgaagacggacgggtcgtttattggatacaaagagaagccccaggatgtggatttgccttatccgctaaacaatttcagcgtagctaaatgtcagcttatgaaaactgagagaccaaagcccaatactttcattattcgctgtcttcagtggacaacagtcatagagcgtacgttccacgttgatacgcccgaggagagagaggagtggacggaagccatccaggctgttgcagacagactacagcggcaagaggaggaacgaatgaattgtagcccaacctcccaaattgacaacataggcgaggaagaaatggacgcctcaaccactcaccacaaaagaaagacaatgaatgacttcgactacctgaaactgctggggaaaggcactttcggaaaagtcatactggttcgcgagaaggcttctgggaaatattacgccatgaaaatcctgaaaaaggaagtcattatcgccaaggacgaagtggcccatacactgaccgagtccagagtgctcaagaatacccgtcatcccttcttaacttcattgaagtactcctttcaaaccaaggaccgcctctgttttgttatggagtacgtgaatggcggagaactgttttttcacttatctcgggagcgggtgttttctgaagaccggacccgtttctatggcgcagaaatcgtcagtgctttagactacctgcattcaggcaagatcgtttaccgggatctgaagctggaaaacctgatgctggacaaagacggccacatcaagataacagattttggcctttgtaaagaaggtataactgacgcagctactatgaaaacgttctgtggcacccccgaatatcttgccccagaagtgctcgaggacaacgattatggccgagctgtggactggtggggattgggagtggtgatgtatgagatgatgtgtgggaggctccccttttataatcaagaccatgagaaactgtttgagctgatactcatggaggatatcaaattccctaggaccctatccagtgacgccaagtcactcttgagcggtctgctgataaaagatcccaacaaacgtctgggagggggaccagatgatgccaaggagattatgcggcactcctttttctctggcgtgaactggcaagacgtttacgacaaaaaattggtgcctcccttcaaaccgcaggtgacctcagagactgacacgaggtacttcgatgaagaatttacagcgcagaccatcactatcacacccccagagaaatgtcagcagtctgactgtggcatgctgggcaattggaagaagtag

SEQ ID NO: 82427 - DNA, 1398 bp, Artificial Sequence
  derived and/or modified sequence
atgagtgacgtaacaattgtgaaggaggggtgggtgcagaagcggggtgagtacatcaagaattggcggcctcggtattttctgctgaaaactgatgggagctttatagggtataaggagaagccacaggacgtggacctaccatatccactgaacaactttagcgtggctaagtgccagcttatgaaaaccgaacgcccaaaaccaaatacatttatcataagatgcctgcagtggaccactgtcatcgagcgcacctttcacgtcgacacacctgaagaaagggaagagtggactgaggccatccaggcagtcgcagataggctccagcggcaggaagaagagcgcatgaattgttctccaacttcgcagatagataacattggggaggaggagatggatgccagcaccacccatcacaaaaggaaaaccatgaacgacttcgactacctgaagctgctgggtaagggcacattcggcaaggtgattctggttcgggagaaagcatctgggaaatactatgcaatgaaaatcctgaaaaaggaggtaatcatagctaaggacgaggtggcccacaccctgaccgaaagccgtgttctgaagaacacccgccatccgttcctgacctcattgaaatattcgtttcagactaaggaccggttgtgctttgtgatggagtatgttaacggtggtgaactgttttttcatctgagtcgcgaacgggtgttctccgaggacagaacgcgattctacggcgcagagattgtgtctgcactggactacctgcatagcggcaagattgtctaccgtgacctgaaactcgagaatcttatgctcgacaaggatggacatatcaagattacagacttcggactttgcaaggagggaatcacagacgctgcgacaatgaaaacattctgtgggacaccggaatatctagccccagaggttttagaagacaatgattatggccgagcggtggactggtggggactgggtgtggtcatgtacgagatgatgtgtggacgactccctttctacaaccaggaccatgaaaaactctttgaattaatcctaatggaggacattaaatttcccagaacactgagcagtgatgcaaagagcttactgagcggcctgctgatcaaggacccaaacaagagactgggtggcggacccgacgacgcgaaggaaatcatgcggcactcttttttcagcggcgtcaactggcaggacgtgtatgacaagaagctggttccgccattcaaaccacaagtgacttctgaaacagatacacgctacttcgatgaggaattcaccgcccagaccatcacaattacaccaccggagaagtgtcaacaatccgattgcggaatgctcggcaattggaagaagtag

SEQ ID NO: 82428 - DNA, 1688 bp, Artificial Sequence
  derived and/or modified sequence
ccaaaccctaaagctgatatcacaaagtaccatttctccaagttgggggctcagaggggagtcatcatgagcgatgttaccattgtgaaagaaggttgggttcagaagaggggagaatatataaaaaactggaggccaagatacttccttttgaagacagatggctcattcataggatataaagagaaacctcaagatgtggatttaccttatcccctcaacaacttttcagtggcaaaatgccagttaatgaaaacagaacgaccaaagccaaacacatttataatcagatgtctccagtggactactgttatagagagaacatttcatgtagatactccagaggaaagggaagaatggacagaagctatccaggctgtagcagacagactgcagaggcaagaagaggagagaatgaattgtagtccaacttcacaaattgataatataggagaggaagagatggatgcctctacaacccatcataaaagaaagacaatgaatgattttgactatttgaaactactaggtaaaggcacttttgggaaagttattttggttcgagagaaggcaagtggaaaatactatgctatgaagattctgaagaaagaagtcattattgcaaaggatgaagtggcacacactctaactgaaagcagagtattaaagaacactagacatccctttttaacatccttgaaatattccttccagacaaaagaccgtttgtgttttgtgatggaatatgttaatgggggcgagctgtttttccatttgtcgagagagcgggtgttctctgaggaccgcacacgtttctatggtgcagaaattgtctctgccttggactatctacattccggaaagattgtgtaccgtgatctcaagttggagaatctaatgctggacaaagatggccacataaaaattacagattttggactttgcaaagaagggatcacagatgcagccaccatgaagacattctgtggcactccagaatatctggcaccagaggtgttagaagataatgactatggccgagcagtagactggtggggcctaggggttgtcatgtatgaaatgatgtgtgggaggttacctttctacaaccaggaccatgagaaactttttgaattaatattaatggaagacattaaatttcctcgaacactctcttcagatgcaaaatcattgctttcagggctcttgataaaggatccaaataaacgccttggtggaggaccagatgatgcaaaagaaattatgagacacagtttcttctctggagtaaactggcaagatgtatatgataaaaagcttgtacctccttttaaacctcaagtaacatctgagacagatactagatattttgatgaagaatttacagctcagactattacaataacaccacctgaaaaatgtcagcaatcagattgtggcatgctgggtaactggaaaaaataataaaaatcggcttcctacagccagcagcacagtcacccatggaactgttggctttggattaaatgtggaattgaacgactacccagaagtgttctggaaagaagcgagatgtgtggcctgcctcaccgtcctcacccatcaaaagcaccagcaggcacgttaactcgaattctcacaaggaaaaggccattaaagctcaaggtgcatttcaaactccaggctac

SEQ ID NO: 82429 - DNA, 1575 bp, Artificial Sequence
  derived and/or modified sequence
ctcaaatacacatcaccaaacaaattttctctattatttgggctgagtcatcactagagagtgggaagggcagcagcagcagagaatccaaaccctaaagctgatatcacaaagtaccatttctccaagttgggggctcagaggggagtcatcatgagcgatgttaccattgtgaaagaaggttgggttcagaagaggggagaatatataaaaaactggaggccaagatacttccttttgaagacagatggctcattcataggatataaagagaaacctcaagatgtggatttaccttatcccctcaacaacttttcagtggcaaaatgccagttaatgaaaacagaacgaccaaagccaaacacatttataatcagatgtctccagtggactactgttatagagagaacatttcatgtagatactccagaggaaagggaagaatggacagaagctatccaggctgtagcagacagactgcagaggcaagaagaggagagaatgaattgtagtccaacttcacaaattgataatataggagaggaagagatggatgcctctacaacccatcataaaagaaagacaatgaatgattttgactatttgaaactactaggtaaaggcacttttgggaaagttattttggttcgagagaaggcaagtggaaaatactatgctatgaagattctgaagaaagaagtcattattgcaaaggatgaagtggcacacactctaactgaaagcagagtattaaagaacactagacatccctttttaacatccttgaaatattccttccagacaaaagaccgtttgtgttttgtgatggaatatgttaatgggggcgagctgtttttccatttgtcgagagagcgggtgttctctgaggaccgcacacgtttctatggtgcagaaattgtctctgccttggactatctacattccggaaagattgtgtaccgtgatctcaagttggagaatctaatgctggacaaagatggccacataaaaattacagattttggactttgcaaagaagggatcacagatgcagccaccatgaagacattctgtggcactccagaatatctggcaccagaggtgttagaagataatgactatggccgagcagtagactggtggggcctaggggttgtcatgtatgaaatgatgtgtgggaggttacctttctacaaccaggaccatgagaaactttttgaattaatattaatggaagacattaaatttcctcgaacactctcttcagatgcaaaatcattgctttcagggctcttgataaaggatccaaataaacgccttggtggaggaccagatgatgcaaaagaaattatgagacacagtttcttctctggagtaaactggcaagatgtatatgataaaaagcttgtacctccttttaaacctcaagtaacatctgagacagatactagatattttgatgaagaatttacagctcagactattacaataacaccacctgaaaaatgtcagcaatcagattgtggcatgctgggtaactggaaaaaataataaaaagtaagtttcaatagctca

SEQ ID NO: 82430 - protein, 372 aa, Artificial Sequence
  derived and/or modified sequence
MAAERQEALREFVAVTGAEEDRARFFLESAGWDLQIALASFYEDGGDEDIVTISQATPSSVSRGTAPSDNRVTSFRDLIHDQDEDEEEEEGQRDRFYAGGSERSGQQIVGPPRKKSPNELVDDLFKGAKEHGAVAVERVTKSPGETSKPRPFAGGGYRLGAAPEEESAYVAGEKRQHSSQDVHVVLKLWKSGFSLDNGELRSYQDPSNAQFLESIRRGEVPAELRRLAHGGQVNLDMEDHRDEDFVKPKGAFKAFTGEGQKLGSTAPQVLSTSSPAQQAENEAKASSSILIDESEPTTNIQIRLADGGRLVQKFNHSHRISDIRLFIVDARPAMAATSFILMTTFPNKELADESQTLKEANLLNAVIVQRLT

SEQ ID NO: 82431 - protein, 372 aa, Artificial Sequence
  derived and/or modified sequence
MAAERQEALREFVAVTGAEEDRARFFLESAGWDLQIALASFYEDGGDEDIVTISQATPSSVSRGTAPSDNRVTSFRDLIHDQDEDEEEEEGQRSRFYAGGSERSGQQIVGPPRKKSPNELVDDLFKGAKEHGAVAVERVTKSPGETSKPRPFAGGGYRLGAAPEEESAYVAGEKRQHSSQDVHVVLKLWKSGFSLDNGELRSYQDPSNAQFLESIRRGEVPAELRRLAHGGQVNLDMEDHRDEDFVKPKGAFKAFTGEGQKLGSTAPQVLSTSSPAQQAENEAKASSSILIDESEPTTNIQIRLADGGRLVQKFNHSHRISDIRLFIVDARPAMAATSFILMTTFPNKELADESQTLKEANLLNAVIVQRLT

SEQ ID NO: 82432 - DNA, 1119 bp, Artificial Sequence
  derived and/or modified sequence
atggccgccgagagacaggaggccctgagagagttcgtggccgtgaccggcgccgaggaggacagagccagattcttcctggagagcgccggctgggacctgcagatcgccctggccagcttctacgaggacggcggcgacgaggacatcgtgaccatcagccaggccacccccagcagcgtgagcagaggcaccgcccccagcgacaacagagtgaccagcttcagagacctgatccacgaccaggacgaggacgaggaggaggaggagggccagagagacagattctacgccggcggcagcgagagaagcggccagcagatcgtgggcccccccagaaagaagagccccaacgagctggtggacgacctgttcaagggcgccaaggagcacggcgccgtggccgtggagagagtgaccaagagccccggcgagaccagcaagcccagacccttcgccggcggcggctacagactgggcgccgcccccgaggaggagagcgcctacgtggccggcgagaagagacagcacagcagccaggacgtgcacgtggtgctgaagctgtggaagagcggcttcagcctggacaacggcgagctgagaagctaccaggaccccagcaacgcccagttcctggagagcatcagaagaggcgaggtgcccgccgagctgagaagactggcccacggcggccaggtgaacctggacatggaggaccacagagacgaggacttcgtgaagcccaagggcgccttcaaggccttcaccggcgagggccagaagctgggcagcaccgccccccaggtgctgagcaccagcagccccgcccagcaggccgagaacgaggccaaggccagcagcagcatcctgatcgacgagagcgagcccaccaccaacatccagatcagactggccgacggcggcagactggtgcagaagttcaaccacagccacagaatcagcgacatcagactgttcatcgtggacgccagacccgccatggccgccaccagcttcatcctgatgaccaccttccccaacaaggagctggccgacgagagccagaccctgaaggaggccaacctgctgaacgccgtgatcgtgcagagactgacctag

SEQ ID NO: 82433 - DNA, 1119 bp, Artificial Sequence
  derived and/or modified sequence
atggccgccgagagacaggaggccctgagagagttcgtggccgtgaccggcgccgaggaggacagagccagattcttcctggagagcgccggctgggacctgcagatcgccctggccagcttctacgaggacggcggcgacgaggacatcgtgaccatcagccaggccacccccagcagcgtgagcagaggcaccgcccccagcgacaacagagtgaccagcttcagagacctgatccacgaccaggacgaggacgaggaggaggaggagggccagagaagcagattctacgccggcggcagcgagagaagcggccagcagatcgtgggcccccccagaaagaagagccccaacgagctggtggacgacctgttcaagggcgccaaggagcacggcgccgtggccgtggagagagtgaccaagagccccggcgagaccagcaagcccagacccttcgccggcggcggctacagactgggcgccgcccccgaggaggagagcgcctacgtggccggcgagaagagacagcacagcagccaggacgtgcacgtggtgctgaagctgtggaagagcggcttcagcctggacaacggcgagctgagaagctaccaggaccccagcaacgcccagttcctggagagcatcagaagaggcgaggtgcccgccgagctgagaagactggcccacggcggccaggtgaacctggacatggaggaccacagagacgaggacttcgtgaagcccaagggcgccttcaaggccttcaccggcgagggccagaagctgggcagcaccgccccccaggtgctgagcaccagcagccccgcccagcaggccgagaacgaggccaaggccagcagcagcatcctgatcgacgagagcgagcccaccaccaacatccagatcagactggccgacggcggcagactggtgcagaagttcaaccacagccacagaatcagcgacatcagactgttcatcgtggacgccagacccgccatggccgccaccagcttcatcctgatgaccaccttccccaacaaggagctggccgacgagagccagaccctgaaggaggccaacctgctgaacgccgtgatcgtgcagagactgacctag

SEQ ID NO: 82434 - DNA, 1119 bp, Artificial Sequence
  derived and/or modified sequence
atggccgctgagagacaggaggccctgcgggaattcgttgccgtcactggcgccgaagaagaccgagcccgctttttcctagaatctgcgggatgggatcttcagatcgcgcttgcctctttttacgaggacggcggagacgaagacatagtcacaattagccaagcgactccctccagcgtgagccgtggtacggcaccctccgacaatcgggtcacgagctttcgagacctgatccacgaccaggacgaggatgaggaggaggaagaggggcagcgagatcgtttttacgccgggggatctgagcgctctggtcagcagatcgtgggtcccccacgcaaaaaaagcccaaacgagctagtggatgatctgttcaaaggggcaaaagaacatggcgccgtcgccgtcgaacgggtgaccaaatcaccaggcgaaacatctaagccgcgaccttttgccgggggaggatataggttaggagctgctccagaggaggaatcggcatacgtggctggcgagaaaaggcagcattccagtcaagacgtccacgtggtattgaagttgtggaaatctggttttagcctagacaatggcgagctgcggagttaccaggaccctagtaacgcccaatttttggagagtattagacggggcgaagtacctgccgagctgcgacggctcgcccatggcggccaagtcaatcttgacatggaggaccaccgagacgaggactttgtgaaacccaagggagcgtttaaagcattcacaggagaaggccagaagttgggttcaaccgccccacaagtgctgagtacatcctccccagcgcagcaagccgagaatgaggccaaagccagttcatccatcctgatcgatgaatcggaacctaccacaaatatacagatcagactggcggacgggggtaggttggtgcagaaatttaatcacagtcaccgcatatctgacatcaggctgttcattgtggatgcccggcctgccatggcagccacaagtttcattctgatgaccacgtttccgaataaagagctagcagacgagagccagactctgaaggaggcaaacttgctcaacgctgtgatcgtacagaggctgacatag

SEQ ID NO: 82435 - DNA, 1119 bp, Artificial Sequence
  derived and/or modified sequence
atggctgccgagcgccaggaggcactgagggaattcgtagcggtcacaggcgccgaagaggacagggccaggttctttctcgagagcgccggctgggacctccagatcgcattagcttccttttacgaggatggtggtgatgaagatatcgtaactattagccaggccacgccctctagtgtcagccgaggaacggcgcccagcgacaaccgtgtgacttctttccgggacctcatccacgatcaggatgaggacgaggaggaggaagagggacagcgatcgaggttctatgctgggggatcagagcgctccggacaacaaatcgtcggacctcctcggaagaagtcgccaaatgaactggttgatgacctattcaaaggtgcaaaggagcacggagcagttgcggtagaacgggtcaccaagtcaccaggagagacttctaagcctcgccccttcgcaggcggggggtataggctgggggccgccccggaggaagagtctgcctatgtagcaggcgaaaagcggcagcacagcagccaggatgtccacgtagtcctcaaactctggaagtcgggattctccctagacaatggtgaactcagatcctaccaggatccttctaacgcgcagttcctcgagtctatcagaaggggcgaagtgccagcggagctgcgcaggctggcgcacggcggtcaggttaacctcgacatggaagaccaccgcgacgaagatttcgtgaagcccaaaggagccttcaaagcctttaccggggagggacagaaactgggctcaactgcccctcaagtactcagtacgtcatcccccgctcaacaggctgaaaacgaagccaaggcgagctcgagcatccttattgacgaatcagagcctaccaccaacattcaaatcagattggccgacggcggacgtctggttcaaaaatttaatcatagccaccggatctctgatatccgtctgttcatcgtggatgcaagaccagctatggccgccacatctttcattctgatgaccacctttcctaacaaagaacttgccgacgaatcccagacccttaaagaggcaaatttgttgaatgctgtgatcgtccagaggctcacttag

SEQ ID NO: 82436 - DNA, 1119 bp, Artificial Sequence
  derived and/or modified sequence
atggctgctgagcggcaggaggccctgcgggagtttgtggccgtgactggagctgaggaggaccgggcccgcttcttcctggagagcgctggctgggacctgcagatcgccctggccagcttctatgaagatggaggagatgaggacatcgtgaccatcagccaggccacccccagctctgtgtcccggggcacagcccccagcgacaacagagtgaccagcttccgggacctgattcatgaccaggatgaagatgaggaggaggaggagggccagagggaccgcttctacgccggcggcagcgagaggagcggccagcagatcgtgggcccccccaggaagaagagccccaatgagctggtggatgacctcttcaagggggccaaggagcacggggctgtggccgtggagcgggtgaccaagagccctggagagaccagcaagccccggccctttgctgggggcggctaccgcctgggcgccgcccctgaggaggagagcgcctacgtggccggggagaagaggcagcacagcagccaggatgtgcacgtggtgctgaagctgtggaagagcggcttcagcctggacaatggagagctgcggagctaccaggaccccagcaatgcccagttcctggagagcatccggcggggggaggtgcctgctgagctgcggcggctggcccatggaggccaggtgaacctggacatggaggaccacagagatgaagattttgtgaagcccaagggggccttcaaggccttcaccggggagggccagaagctgggcagcacagccccccaggtgctgagcaccagcagccctgcccagcaggccgagaatgaggccaaggccagcagcagcatcctgattgatgagagcgagcccaccaccaacatccagatccggctggctgatggcggccgcctggtgcagaagttcaaccacagccaccgcatcagtgacatccgcctcttcatcgtggatgcccggcctgccatggccgccaccagcttcatcctgatgaccaccttccccaacaaggagctggctgatgagagccagaccctgaaggaggccaacctgctgaatgctgtgattgtgcagaggctgacctag

SEQ ID NO: 82437 - DNA, 1119 bp, Artificial Sequence
  derived and/or modified sequence
atggctgctgagcggcaggaggccctgcgggagtttgtggccgtgactggagctgaggaggaccgggcccgcttcttcctggagagcgctggctgggacctgcagatcgccctggccagcttctatgaagatggaggagatgaggacatcgtgaccatcagccaggccacccccagctctgtgtcccggggcacagcccccagcgacaacagagtgaccagcttccgggacctgattcatgaccaggatgaagatgaggaggaggaggagggccagaggagccgcttctacgccggcggcagcgagaggagcggccagcagatcgtgggcccccccaggaagaagagccccaatgagctggtggatgacctcttcaagggggccaaggagcacggggctgtggccgtggagcgggtgaccaagagccctggagagaccagcaagccccggccctttgctgggggcggctaccgcctgggcgccgcccctgaggaggagagcgcctacgtggccggggagaagaggcagcacagcagccaggatgtgcacgtggtgctgaagctgtggaagagcggcttcagcctggacaatggagagctgcggagctaccaggaccccagcaatgcccagttcctggagagcatccggcggggggaggtgcctgctgagctgcggcggctggcccatggaggccaggtgaacctggacatggaggaccacagagatgaagattttgtgaagcccaagggggccttcaaggccttcaccggggagggccagaagctgggcagcacagccccccaggtgctgagcaccagcagccctgcccagcaggccgagaatgaggccaaggccagcagcagcatcctgattgatgagagcgagcccaccaccaacatccagatccggctggctgatggcggccgcctggtgcagaagttcaaccacagccaccgcatcagtgacatccgcctcttcatcgtggatgcccggcctgccatggccgccaccagcttcatcctgatgaccaccttccccaacaaggagctggctgatgagagccagaccctgaaggaggccaacctgctgaatgctgtgattgtgcagaggctgacctag

SEQ ID NO: 82438 - DNA, 1349 bp, Artificial Sequence
  derived and/or modified sequence
ggaaggcgcacggggcgaagatggcggcggagcgacaggaggcgctgagggagttcgtggcggtgacgggcgccgaggaggaccgggcccgcttctttctcgagtcggccggctgggacttgcagatcgcgctagcgagcttttatgaggacggaggggatgaagacattgtgaccatttcgcaggcaacccccagttcagtgtccagaggcacagcccccagtgataatagagtgacatccttcagagacctcattcatgaccaagatgaagatgaggaggaagaggaaggccagagagacaggttttatgctgggggctcagagagaagtggacagcagattgttggccctcccaggaagaaaagtcccaacgagctggtggatgatctctttaaaggtgccaaagagcatggagctgtagctgtggagcgagtgaccaagagccctggagagaccagtaaaccgagaccatttgcaggaggtggctaccgccttggggcagcaccagaggaagagtctgcctatgtggcaggagaaaagaggcagcattccagccaagatgttcatgtagtattgaaactctggaagagtggattcagcctggataatggagaactcagaagctaccaagacccatccaatgcccagtttctggagtctatccgcagaggggaggtgccagcagagcttcggaggctagctcacggtggacaggtgaacttggatatggaggaccatcgggacgaggactttgtgaagcccaaaggagccttcaaagccttcactggcgagggtcagaaactgggcagcactgccccccaggtgttgagtaccagctctccagcccaacaggcagaaaatgaagccaaagccagctcttccatcttaatcgacgaatcagagcctaccacaaacatccaaattcggcttgcagacggcgggaggctggtgcagaaatttaaccacagccacaggatcagcgacatccgactcttcatcgtggatgcccggccagccatggctgccaccagctttatcctcatgactactttcccgaacaaagagctggctgatgagagccagaccctgaaggaagccaacctgctcaatgctgtcatcgtgcagcggttaacataaccgcccagccagctgcctggcctccctcctgtgtttcccatggccagtggccatgccccatggggatcgcccctcctgcccccttgtgcacacccagcagtccagtgcaacgtctcctccatagctctgggttcttagatcttggttggacgtttgttttctccttagttgcatttcctgggtttttgtgatgatcaatggactttaatg

SEQ ID NO: 82439 - DNA, 2800 bp, Artificial Sequence
  derived and/or modified sequence
ggctgggcctcgtcgaccggcaagcggaacgcggcagcggggctgggcctgtgcggcggccgccggagcgctttggaaggcgcacggggcgaagatggcggcggagcgacaggaggcgctgagggagttcgtggcggtgacgggcgccgaggaggaccgggcccgcttctttctcgagtcggccggctgggacttgcagatcgcgctagcgagcttttatgaggacggaggggatgaagacattgtgaccatttcgcaggcaacccccagttcagtgtccagaggcacagcccccagtgataatagagtgacatccttcagagacctcattcatgaccaagatgaagatgaggaggaagaggaaggccagaggagcaggttttatgctgggggctcagagagaagtggacagcagattgttggccctcccaggaagaaaagtcccaacgagctggtggatgatctctttaaaggtgccaaagagcatggagctgtagctgtggagcgagtgaccaagagccctggagagaccagtaaaccgagaccatttgcaggaggtggctaccgccttggggcagcaccagaggaagagtctgcctatgtggcaggagaaaagaggcagcattccagccaagatgttcatgtagtattgaaactctggaagagtggattcagcctggataatggagaactcagaagctaccaagacccatccaatgcccagtttctggagtctatccgcagaggggaggtgccagcagagcttcggaggctagctcacggtggacaggtgaacttggatatggaggaccatcgggacgaggactttgtgaagcccaaaggagccttcaaagccttcactggcgagggtcagaaactgggcagcactgccccccaggtgttgagtaccagctctccagcccaacaggcagaaaatgaagccaaagccagctcttccatcttaatcgacgaatcagagcctaccacaaacatccaaattcggcttgcagacggcgggaggctggtgcagaaatttaaccacagccacaggatcagcgacatccgactcttcatcgtggatgcccggccagccatggctgccaccagctttatcctcatgactactttcccgaacaaagagctggctgatgagagccagaccctgaaggaagccaacctgctcaatgctgtcatcgtgcagcggttaacataaccgcccagccagctgcctggcctccctcctgtgtttcccatggccagtggccatgccccatggggatcgcccctcctgcccccttgtgcacacccagcagtccagtgcaacgtctcctccatagctctgggttcttagatcttggttggacgtttgttttctccttagttgcatttcctgggtttttgtgatgatcaatggactttaatgaaaaaaaaaataaaaacaaccaaaaaaattgaaggaatatcaccagcatgttgtacggaaactctcccactgaagcaggctttaattgctttaaaattatatttatcttggggcctgtgggaggaaacttccttccatcttctctgcataaaaacttgtggcacacaatgcttattcactagtgtgtcccacccgccagccccacagatgactggaggaaggaggggaaatgtgtagaaagaggcttcgccaccacttgttcccacgagaatatgtcacttgcccagataaaactgggcggcagccagagttccctgaagtgggaagtcagagctccatgcacacagtgtcttcagaaggtgaaaataaatatttccctgtgctccttttactcaacccctggggtatctaatcttgccaggtcttggccagttgagattctgttccacctgcctgcctggccctttcctccattaccatccagactgctcgcctcctggggattctcaggggctccattatggcttgatttactccacgtgcagaagtcttgagtggacctaggaggtaggtgggatattttttttcactaggatacagctcatgccaacccatcctaagtgagttcagaatcagggtatcttgccctataagataaacagtcaaaatgccaccgagctgttcactagtgatgtgtggcaaatcaaatcaactgttgaagaaggggtgagttttctgtgctacaagcacctgtcactgttggtacttgcaggaggcttctgctgggtatgttttggaagtgagtgtcactacttggctttgcttagcaggttctgcttcacacttgttctttgacctgctgacttgtgacttgcagaaacataggcagtagtcctagcctggtaaagaccctccaccacccctataagtttgattgctatgcaggtttgggagaggaggcctattgggctcttggatggaaccctttcccgtattaaacaaaccagagacagaatcagtgctgactcaggatctcctggtttggaatcgtaatgtgcctcaatcctctttccaagcaggcctcaccagtctctttctctttcctgcttcacccctgcaatgagccaagaaccaacactacatccacctagaactgcagaagggcttgtggtttcaaccaagacccatcctgagcaagggacttggcttggtgcttttgatcccaaagttcccacaccggcagtggcctgctggggcaatggcatctgtcacggtgttttctccagcaggtggagattatggaacctacatatgggtctggaaaaactgtacactgttgtcaccttgaccattaaaaaccagaatgaggacaatgga

SEQ ID NO: 82440 - DNA, 1119 bp, Artificial Sequence
  derived and/or modified sequence
atggccgccgagcggcaggaggccctgcgggagttcgtggccgtgactggggcagaagaagaccgcgccaggtttttcctggaatccgcaggctgggacctgcagatcgccctggccagcttttacgaagatgggggggacgaggatattgtcactatttcgcaagcaacaccttcatcggtgtcccggggcaccgccccaagcgacaacagagtcactagcttccgggacctgattcacgatcaggacgaggacgaggaagaggaggagggtcagcgcgaccgtttctacgcaggaggatctgagcggagcggccaacagattgtggggccaccgcgcaagaagtccccaaatgaactcgtggacgatctgttcaaaggggctaaagagcatggtgccgtggcagtcgagcgtgttacaaagagcccaggcgaaacgtccaaacccagacccttcgccgggggaggttaccgcttaggggctgcgcctgaggaggagagtgcttacgtcgcgggggagaaacgccagcattcaagccaggatgtacatgttgtattaaagctgtggaagtcaggcttttccttggataacggggagttacggtcctaccaggacccatctaacgcccagttcttagagagtatacgccgtggcgaggtgccggccgaactgagaaggctcgcccatggcggacaagtgaatttggacatggaggaccatcgcgacgaagacttcgtgaagccaaagggagccttcaaagccttcacaggagaggggcaaaagttgggctctacagcccctcaagttcttagtacctcatctccggcgcagcaagcagaaaacgaggcgaaggctagcagtagtattctgattgacgaaagtgagcccacaacgaatattcaaatccgcttggcggacggtggacgcctggttcaaaaattcaaccattcgcatagaatatccgatatccgtctgttcatcgtcgacgctaggcctgcaatggctgcaacctcatttatactaatgaccacgtttccaaacaaagaactcgctgacgagagtcagactctcaaggaagcaaacctgcttaacgctgtgatcgtgcagcggcttacctag

SEQ ID NO: 82441 - DNA, 1119 bp, Artificial Sequence
  derived and/or modified sequence
atggccgccgagcggcaggaggccctgcgggagttcgtggccgtgactggcgccgaggaagatcgggccagatttttcctggagtcagccggatgggatttgcaaatcgccctcgcctctttttatgaagatggaggcgatgaagacattgtcaccattagccaggcaacaccttcaagtgtttctagaggcactgcacctagtgacaatagggtaacgtcgttccgggacctcatccacgatcaggatgaggacgaggaggaagaggaaggtcagcgcagcaggttctacgccggaggaagtgaacgatccggacagcaaattgtcggccctcctcgaaaaaagtcacccaacgaactggtggacgatttattcaagggagcaaaagaacatggcgccgttgctgtggaacgagtaacaaagtctccgggggagacttcaaagccacggcctttcgccggaggggggtatcgtctcggagctgctcccgaagaggagagcgcgtacgttgccggtgagaaacgccagcattcatcccaagatgtccacgttgtcctgaaactttggaaatccgggtttagccttgataacggtgagcttcggagctatcaagatcctagcaatgctcagtttcttgagtccatcaggcgtggggaagtgccggctgaactgcggaggctcgcccacggaggtcaggtcaatctggacatggaagatcatcgcgatgaggattttgttaagcctaaaggagcctttaaggctttcaccggggaggggcaaaaattgggatcaactgccccccaggtgctttccacctcatcccccgcccagcaggcagagaacgaggcgaaggcttcgtcttctattctaattgatgaatccgagcccaccaccaatatccagattcgtttggccgacggcggacgactcgtgcaaaaatttaatcactcccataggatatctgatatccgactgttcatcgtggacgcccggccggccatggcagcaacaagcttcattctcatgactacgttcccaaataaagaactggcagacgagtcccagaccctcaaggaggcgaatctcctgaacgctgtgatcgtgcagagactgacctag

SEQ ID NO: 82442 - DNA, 1119 bp, Artificial Sequence
  derived and/or modified sequence
atggccgctgagcggcaggaagccttaagggaatttgtggccgtcaccggagccgaggaagacagggcccgattcttccttgaaagcgccggttgggatctccaaattgcgcttgcgtctttctatgaggacggaggggatgaagatattgtgaccatctcccaagctactccttctagcgtctcacgtggcactgctccaagtgataatcgagtgacatcctttagggatcttattcacgaccaggacgaggatgaagaagaagaagaaggccagagagaccgattttacgccggtggtagtgagcgatccggccagcagatcgtgggcccaccacgcaagaaatctcccaacgaactcgtggacgatctgtttaagggtgccaaggaacatggggctgtcgccgtcgaacgcgttaccaagtctcccggagaaaccagtaagcctcggccttttgctggaggcggatatcggctgggcgctgccccagaggaggaaagcgcctacgtggccggagagaagcggcagcactcttcccaggatgtgcacgtggtgcttaagttgtggaagagtgggttttccttggacaatggagaattgcgcagctaccaagatccttccaacgcacagttcctggagtcaattcggaggggcgaggtgcctgcagagctccgacgtcttgcacacggcggtcaagtgaatctggacatggaggatcatcgtgacgaggactttgtcaagcccaaaggggctttcaaagcctttacgggcgagggccagaagctaggctcaacagccccacaagtgctttccacatcatcgccagctcaacaggcagagaatgaagcgaaggcttcgagcagcatcctgatcgacgaatccgagcctactaccaacatccaaattcgtttagccgatggaggccgacttgtgcagaaattcaaccacagccaccgtatctctgatatccgactgttcattgttgacgcacgaccagcaatggctgccacttccttcattttgatgacaactttcccaaacaaagagctcgccgatgagtctcaaactcttaaagaagccaaccttctcaacgccgttatcgtccagagactgacgtag

SEQ ID NO: 82443 - DNA, 1119 bp, Artificial Sequence
  derived and/or modified sequence
atggcggctgagcgccaagaagctctccgggaatttgtagccgtgactggcgcagaggaagaccgcgcacgcttcttcctggaatccgcagggtgggacctacagatcgccctggcttccttctacgaggacggaggagacgaggacatagtgacgattagccaagccacgcccagctccgtcagcagagggaccgcgccaagcgataaccgtgtcacaagttttcgagatctcatacacgaccaggacgaggacgaggaggaggaagagggccaaagaagccgcttctatgccggagggagtgagcgatccggacagcagatcgtaggtccacctaggaaaaaatcccctaacgagctggtcgatgatctgtttaaaggcgctaaggagcatggggctgtggcggttgaacgggttactaagtctccgggagagacgtcaaagccacggcctttcgcaggcggtgggtaccgactcggcgcagctcctgaggaagaatccgcctacgtggctggcgagaagcgccaacacagtagccaggatgtgcacgtagtcctgaaactatggaaaagcgggttttcacttgataatggcgagttacgatcataccaggatccgagcaatgcgcagttccttgagtccattcggaggggagaagttcccgcagagctgcgccgtctggcacatggcggacaggtcaacctggacatggaggaccatcgcgatgaagattttgtgaaacctaagggcgcttttaaagcctttacgggggagggacagaagctgggctcaaccgctcctcaggttctgagtaccagtagtccggcacagcaggccgagaatgaagccaaagctagcagttctattctcatagatgaaagcgagccgacgaccaatattcaaatccggttggccgatggcggtcggctggttcagaagttcaatcactcccatcggatcagtgatataagattgtttatcgtggacgccaggccagctatggccgctacttcattcattctgatgaccaccttccccaacaaagaacttgcagatgagtctcagactctgaaggaggccaatctgctgaacgccgttattgtccaacggttgacctag

SEQ ID NO: 82444 - protein, 292 aa, Artificial Sequence
  derived and/or modified sequence
MAFMKKYLLPILGLFMAYYYYSANEEFRPEMLQGKKVIVTGASKGIGREMAYHLAKMGAHVVVTARSKETLQKVVSHCLELGAASAHYIAGTMEDMTFAEQFVAQAGKLMGGLDMLILNHITNTSLNLFHDDIHHVRKSMEVNFLSYVVLTVAALPMLKQSNGSIVVVSSLAGKVAYPMVAAYSASKFALDGFFSSIRKEYSVSRVNVSITLCVLGLIDTETAMKAVSGIVHMQAAPKEECALEIIKGGALRQEEVYYDSSLWTTLLIRNPCRKILEFLYSTSYNMDRFINK

SEQ ID NO: 82445 - DNA, 879 bp, Artificial Sequence
  derived and/or modified sequence
atggcattcatgaaaaagtatctactccctattttagggctgtttatggcttactactattactccgccaacgaagaattcagaccagaaatgctgcagggaaaaaaggtgatcgtcaccggggctagcaagggaattgggagagaaatggcctaccatctggcaaagatgggtgcgcacgtcgttgtgaccgcacgcagcaaggagacccttcaaaaagtggtcagccattgcttggaactgggtgccgcaagtgcccactatatcgctggcacgatggaggacatgacattcgccgagcagttcgtcgcacaggccggaaaactcatgggcggacttgacatgctgatccttaaccatattacgaacactagccttaatctgttccacgatgacatccaccatgttcgaaaatctatggaggtgaatttcctttcttatgtagtgctgacggtcgcagcactgcccatgctaaagcagtccaacggtagcatcgtcgtggtctcctcccttgccggtaaggtggcatacccgatggtggcagcctatagcgcttccaagttcgccttggacggtttcttcagctccatccggaaggaatattccgtgtcaagagttaacgtctctattacattatgtgttctcggtctcattgacaccgagaccgcaatgaaagctgtgtcaggcattgtgcacatgcaggccgcccccaaggaggagtgcgcactggagataattaagggcggggccctgcgacaagaagaagtgtattacgactcatcgttatggacgaccttattgatacgtaatccctgcaggaagatacttgaattcctgtactcaacgtcttacaatatggatcgcttcataaataaatag

SEQ ID NO: 82446 - DNA, 879 bp, Artificial Sequence
  derived and/or modified sequence
atggcattcatgaagaaatacctgctgccaatcctcggcttgttcatggcgtattactattacagtgccaatgaagaatttcggcccgagatgcttcagggcaaaaaggttatagtgacgggagctagtaaaggcattggccgtgagatggcctaccatttagcaaaaatgggagcacatgtcgtggtgaccgcgcggagcaaagaaacgctgcagaaagttgtcagccactgtctagagctcggggcagcttctgcccactatatcgctgggacaatggaggatatgacttttgccgaacagtttgtcgcccaggctgggaagctgatgggtggcctggacatgctcatactaaaccacatcaccaatacgtctctcaatctgttccatgacgacatccaccatgtgaggaagtccatggaagttaattttctgtcttatgtcgtcttgactgtggcagccctgcccatgctcaaacagagtaacggaagcatcgtcgtcgtgtcgtcactcgctggcaaagttgcctaccccatggtggcagcatattctgcgtccaagttcgctctggacggcttcttttcttcaatccggaaggagtacagcgtttctagagtgaacgtgtctatcacactgtgtgtcctgggactgatcgacaccgagactgcaatgaaagccgtgtccggtattgtgcatatgcaagccgcccccaaagaagaatgcgctctggagataataaagggcggagcattaagacaggaagaggtgtattatgattcaagcttatggactaccctattaatcaggaatccttgccggaagatcctcgaattcctgtatagcaccagttataacatggatcgtttcatcaacaaatag

SEQ ID NO: 82447 - DNA, 879 bp, Artificial Sequence
  derived and/or modified sequence
atggcctttatgaaaaaatacctgctaccaatattggggctgtttatggcatattactattactctgcaaatgaagaatttcggccagaaatgctgcagggcaagaaagtcatcgtgaccggcgcaagcaaaggcatcggtagagagatggcctatcaccttgccaagatgggtgcacacgtggttgtgacagcaaggtccaaggaaactttgcagaaggtggtgtctcactgccttgagctcggcgccgcctccgcacactatattgccgggactatggaggacatgacttttgccgaacagttcgtagctcaagctgggaaactgatgggaggactcgatatgttgatcctgaaccacataactaacacctcactgaatctgtttcacgatgacattcaccatgtgagaaagagcatggaagtaaacttcctcagctacgtggtgttgacagtggccgccctgcccatgctcaagcagagcaatgggagtattgtggtagtaagctctctagctggcaaggttgcatatcccatggtagcagcctactcggcctctaaatttgccttagacggatttttctccagcatcagaaaagagtactcagtgtctcgtgttaacgtctccattaccctatgcgtacttggtcttatcgatacagagactgccatgaaggccgtgagcggcattgtgcatatgcaggccgcaccaaaggaagaatgtgccctggaaatcatcaaagggggcgcactaaggcaagaggaagtgtattatgattcctcgctctggaccaccttacttattcggaatccatgtcggaagattctggagttcctctacagcacctcatacaacatggatcgctttatcaacaagtag

SEQ ID NO: 82448 - DNA, 1415 bp, Artificial Sequence
  derived and/or modified sequence
ggaggagggagagagagagaagagaagaaaaagaaaaaagaacatcaataaaaagaagtcagatttgttcgaaatcttgaggagtcttcaggccagctccctgtcggatggcttttatgaaaaaatatctcctccccattctggggctcttcatggcctactactactattctgcaaacgaggaattcagaccagagatgctccaaggaaagaaagtgattgtcacaggggccagcaaagggatcggaagagagatggcttatcatctggcgaagatgggagcccatgtggtggtgacagcgaggtcaaaagaaactctacagaaggtggtatcccactgcctggagcttggagcagcctcagcacactacattgctggcaccatggaagacatgaccttcgcagagcaatttgttgcccaagcaggaaagctcatgggaggactagacatgctcattctcaaccacatcaccaacacttctttgaatctttttcatgatgatattcaccatgtgcgcaaaagcatggaagtcaacttcctcagttacgtggtcctgactgtagctgccttgcccatgctgaagcagagcaatggaagcattgttgtcgtctcctctctggctgggaaagtggcttatccaatggttgctgcctattctgcaagcaagtttgctttggatgggttcttctcctccatcagaaaggaatattcagtgtccagggtcaatgtatcaatcactctctgtgttcttggcctcatagacacagaaacagccatgaaggcagtttctgggatagtccatatgcaagcagctccaaaggaggaatgtgccctggagatcatcaaagggggagctctgcgccaagaagaagtgtattatgacagctcactctggaccactcttctgatcagaaatccatgcaggaagatcctggaatttctctactcaacgagctataatatggacagattcataaacaagtaggaactccctgagggctgggcatgctgagggattttgggactgttctgtctcatgtttatctgagctcttatctatgaagacatcttcccagagtgtccccagagacatgcaagtcatgggtcacacctgacaaatggaaggagttcctctaacatttgcaaaatggaaatgtaataataatgaatgtcatgcaccgctgcagccagcagttgtaaaattgttagtaaacataggtataattaccagatagttatattaaatttatatcttatatataataatatgtgatgattaatacaatattaattataataaaggtcacataaactttataaattcataactggtagctataacttgagcttattcaggatggtttctttaaaaccataaactgtacaaatgaaatttttcaatatttgtttctta

SEQ ID NO: 82449 - DNA, 1319 bp, Artificial Sequence
  derived and/or modified sequence
acaattcagaggctgctgcctgcttaggaggttgtagaaagctctgtaggttctctctgtgtgtcctacaggagtcttcaggccagctccctgtcggatggcttttatgaaaaaatatctcctccccattctggggctcttcatggcctactactactattctgcaaacgaggaattcagaccagagatgctccaaggaaagaaagtgattgtcacaggggccagcaaagggatcggaagagagatggcttatcatctggcgaagatgggagcccatgtggtggtgacagcgaggtcaaaagaaactctacagaaggtggtatcccactgcctggagcttggagcagcctcagcacactacattgctggcaccatggaagacatgaccttcgcagagcaatttgttgcccaagcaggaaagctcatgggaggactagacatgctcattctcaaccacatcaccaacacttctttgaatctttttcatgatgatattcaccatgtgcgcaaaagcatggaagtcaacttcctcagttacgtggtcctgactgtagctgccttgcccatgctgaagcagagcaatggaagcattgttgtcgtctcctctctggctgggaaagtggcttatccaatggttgctgcctattctgcaagcaagtttgctttggatgggttcttctcctccatcagaaaggaatattcagtgtccagggtcaatgtatcaatcactctctgtgttcttggcctcatagacacagaaacagccatgaaggcagtttctgggatagtccatatgcaagcagctccaaaggaggaatgtgccctggagatcatcaaagggggagctctgcgccaagaagaagtgtattatgacagctcactctggaccactcttctgatcagaaatccatgcaggaagatcctggaatttctctactcaacgagctataatatggacagattcataaacaagtaggaactccctgagggctgggcatgctgagggattttgggactgttctgtctcatgtttatctgagctcttatctatgaagacatcttcccagagtgtccccagagacatgcaagtcatgggtcacacctgacaaatggaaggagttcctctaacatttgcaaaatggaaatgtaataataatgaatgtcatgcaccgctgcagccagcagttgtaaaattgttagtaaacataggtataattaccagatagttatattaaatttatatcttatatataataatatgtgatgattaatacaatattaattataataaaggtcacataaactttataaattcataa

SEQ ID NO: 82450 - DNA, 1391 bp, Artificial Sequence
  derived and/or modified sequence
ccgcaaaggaagagagagatgaaacagaaggaaaggcagaggaggagggagagagagagaagagaagaaaaagaaaaaagaacatcaataaaaagaagtcagatttgttcgaaatcttgaggttctctctgtgtgtcctacaggagtcttcaggccagctccctgtcggatggcttttatgaaaaaatatctcctccccattctggggctcttcatggcctactactactattctgcaaacgaggaattcagaccagagatgctccaaggaaagaaagtgattgtcacaggggccagcaaagggatcggaagagagatggcttatcatctggcgaagatgggagcccatgtggtggtgacagcgaggtcaaaagaaactctacagaaggtggtatcccactgcctggagcttggagcagcctcagcacactacattgctggcaccatggaagacatgaccttcgcagagcaatttgttgcccaagcaggaaagctcatgggaggactagacatgctcattctcaaccacatcaccaacacttctttgaatctttttcatgatgatattcaccatgtgcgcaaaagcatggaagtcaacttcctcagttacgtggtcctgactgtagctgccttgcccatgctgaagcagagcaatggaagcattgttgtcgtctcctctctggctgggaaagtggcttatccaatggttgctgcctattctgcaagcaagtttgctttggatgggttcttctcctccatcagaaaggaatattcagtgtccagggtcaatgtatcaatcactctctgtgttcttggcctcatagacacagaaacagccatgaaggcagtttctgggatagtccatatgcaagcagctccaaaggaggaatgtgccctggagatcatcaaagggggagctctgcgccaagaagaagtgtattatgacagctcactctggaccactcttctgatcagaaatccatgcaggaagatcctggaatttctctactcaacgagctataatatggacagattcataaacaagtaggaactccctgagggctgggcatgctgagggattttgggactgttctgtctcatgtttatctgagctcttatctatgaagacatcttcccagagtgtccccagagacatgcaagtcatgggtcacacctgacaaatggaaggagttcctctaacatttgcaaaatggaaatgtaataataatgaatgtcatgcaccgctgcagccagcagttgtaaaattgttagtaaacataggtataattaccagatagttatattaaatttatatcttatatataataatatgtgatgattaatacaatattaattataataaaggtcacataaactttataaattcataa

SEQ ID NO: 82451 - DNA, 879 bp, Artificial Sequence
  derived and/or modified sequence
atggccttcatgaagaagtacctgctgcccatcctgggcctcttcatggcctactactactacagcgccaatgaggagttccggcctgagatgctgcagggcaagaaggtgattgtgactggagccagcaagggcatcggccgggagatggcctaccacctggccaagatgggcgcccacgtggtggtgacagcccggagcaaggagaccctgcagaaggtggtgagccactgcctggagctgggcgccgccagcgcccactacatcgccggcaccatggaggacatgacctttgctgagcagtttgtggcccaggccggcaagctgatgggcggcctggacatgctgatcctgaaccacatcaccaacaccagcctgaacctcttccatgatgacatccaccacgtgaggaagtccatggaggtgaacttcctgtcctatgtggtgctgactgtggccgccctgcccatgctgaagcagagcaatggcagcatcgtggtggtgagcagcctggccggcaaggtggcctaccccatggtggccgcctacagcgccagcaagtttgccctggatggcttcttcagcagcatcaggaaggagtacagcgtgtcccgggtgaatgtgtccatcaccctgtgtgtgctgggcctgattgacacagaaacagccatgaaggctgtgtctggcatcgtgcacatgcaggccgcccccaaggaggagtgtgccctggagatcatcaagggcggggccctgcggcaggaggaggtgtactatgacagcagcctgtggaccaccctgctgatccggaacccctgcaggaagatcctggagttcctgtacagcaccagctacaacatggaccgcttcatcaacaagtag

SEQ ID NO: 82452 - DNA, 879 bp, Artificial Sequence
  derived and/or modified sequence
atggccttcatgaagaagtacctgctgcccatcctgggcctgttcatggcatattattactactcagccaacgaggagttccgacccgagatgcttcaaggaaaaaaggtgattgtgaccggtgcttccaaggggattggcagggagatggcttatcacctggctaagatgggagcccatgtggttgtgacagccaggtccaaggagactctccagaaggtggtgtcacactgccttgagttgggagccgcctctgcccattacatcgctgggaccatggaggacatgacatttgcggagcagtttgtcgctcaggcagggaagctgatgggagggctcgacatgctgatactaaatcatatcaccaacacatccctcaatctgttccacgacgacatccaccacgtgaggaagtcaatggaggtcaacttcctctcctacgtggtgctcacggtcgccgccttgcctatgctgaagcaaagtaatggctccattgtggttgtcagtagtctggctggaaaggttgcgtatcctatggtggctgcatattccgccagtaagtttgcacttgatggcttcttctcttccatccggaaggaatatagcgtttccagggttaacgtctccattacgctgtgcgtgttgggcctcatcgacaccgagacagccatgaaggctgtgagcggaatcgtgcatatgcaggcagctcctaaagaggaatgcgctctggaaataatcaagggcggcgcactccggcaggaagaagtctactacgactccagcttatggactacccttctgattcgaaacccttgcaggaagatactggaatttctgtactccacaagctataacatggatcgttttatcaataaatag

SEQ ID NO: 82453 - DNA, 879 bp, Artificial Sequence
  derived and/or modified sequence
atggccttcatgaagaagtacctgctgcccatcctgggcctgttcatggcttactattactattccgccaatgaggaattcaggccagagatgctgcagggtaaaaaggtgattgtcacaggggcgtctaaaggcatagggcgtgagatggcctaccacttggccaagatgggggctcatgtggtcgtgaccgcgaggagtaaagaaacactccagaaggtcgtgtcccactgtttggaactgggtgcggcgtctgcccactacatagccgggaccatggaagacatgaccttcgccgagcaattcgtggctcaagctggtaaacttatgggagggctcgacatgctgatcctgaatcacatcacaaacacatcactaaacctgttccacgacgatattcaccacgtcagaaaatccatggaggtcaatttcttatcttacgtggtcttgacagtagcagcgcttcctatgctcaaacaatctaatggctccatagtggtggttagcagcctggcgggcaaagtagcctatcccatggtggctgcctacagcgccagtaaattcgccctggacgggttcttcagttccataaggaaggagtattccgtttctagagtaaatgtgtctattacactgtgcgtcctgggcctcatcgataccgagaccgctatgaaagccgtgagtggcattgttcatatgcaggccgccccaaaagaagaatgcgccctggagattatcaaggggggagccttgagacaggaagaagtttactacgacagctcgttatggacaactctgctgatcaggaatccatgtcggaagattctggaatttttatactccacgtcatataacatggataggtttatcaacaagtag

SEQ ID NO: 82454 - DNA, 879 bp, Artificial Sequence
  derived and/or modified sequence
atggccttcatgaagaagtacctgctgcccatcctgggcctgttcatggcttattactattactccgctaacgaagaatttcggcctgagatgttacaaggaaagaaagtgatcgtaactggggcctcaaaaggtattggccgggaaatggcctaccatctggccaaaatgggcgcgcacgtcgtagttaccgcccgctctaaggagacgctgcagaaggtggtttcgcactgcctggaacttggggccgccagtgctcactacatagcggggactatggaagacatgacatttgccgagcagttcgtggcccaggccggcaaactcatggggggactcgacatgcttatcctgaatcatatcactaacacctcccttaatctcttccatgacgacattcaccacgtccggaagtcgatggaagtcaatttcctttcgtacgtggtccttacagtggctgccctgcctatgcttaaacaatctaacgggtcaatcgttgtggttagctccctcgcaggcaaggtggcatacccaatggtagctgcgtattccgcctccaagtttgcattggacggtttcttcagttccattcgcaaagagtactctgtatcacgagtgaatgtgtcaatcacactgtgtgttctcggcctaattgatacagagaccgccatgaaggcggtctccggtattgttcacatgcaggcagctcccaaggaggagtgcgctctggagattattaaaggtggagccctccgtcaggaagaagtgtattatgattctagtctctggactaccttgctgattaggaatccgtgtcgcaagattcttgagttcctgtactcaacatcctacaacatggacaggttcattaacaaatag

SEQ ID NO: 82455 - DNA, 879 bp, Artificial Sequence
  derived and/or modified sequence
atggcctttatgaaaaaatatctgctcccgattctaggcctgttcatggcctactattactacagcgctaacgaagaatttaggccagagatgcttcagggcaagaaagtcattgtgacgggggctagcaagggtatcgggagagagatggcatatcacctggcaaagatgggcgcacatgtggttgtgaccgctagatccaaggagacattgcaaaaggtcgtttcacactgcttggagctaggtgctgctagtgcccactacatagctggcaccatggaagacatgaccttcgccgagcagttcgtggctcaggcgggaaagctgatgggaggattagatatgctgatccttaaccatataaccaacacatcactgaatctttttcacgacgatatacaccacgtccgaaaatccatggaagttaacttccttagctatgttgtacttacggtcgctgctctccctatgcttaagcagagtaacggatccatagtcgtggtttcttcactggctggaaaagtcgcctacccgatggtggccgcatatagcgctagtaaattcgccctggacggctttttcagcagcattcgcaaggagtacagtgtaagtcgggtcaacgtgtccatcaccctgtgcgtcctcggactgatcgacactgaaacggccatgaaagccgtatcaggcatcgtgcatatgcaggctgcacctaaggaagaatgcgctctcgagattattaagggcggtgcactgcgacaagaggaagtctactatgactcctcattgtggacgaccctgctcattagaaacccctgtagaaagattctggagttcctgtattccacctcttacaacatggatagatttatcaacaagtag

SEQ ID NO: 82456 - DNA, 879 bp, Artificial Sequence
  derived and/or modified sequence
atggccttcatgaagaagtacttacttccaatacttggtctcttcatggcgtactactattacagcgccaacgaggaatttcggccagaaatgctgcaggggaaaaaagtgattgtgacaggcgcaagcaaaggcattggaagagaaatggcttaccacttggccaagatgggagcacacgtggtcgtgacagcgagatcgaaggagactttgcaaaaggtcgtgagccactgtctggagctgggtgccgcttccgcacactatattgctgggacaatggaagacatgacttttgccgaacagttcgtagctcaggccggtaaactgatggggggactggacatgctcattctaaaccacattaccaacaccagcctgaatctcttccacgatgatatccatcacgtgcgcaagagcatggaagtgaattttctgagttatgtggtcctaaccgtcgccgcactgcccatgctgaagcaatctaatgggtccatagtcgtggtttccagcctggccggaaaagtagcctaccctatggtggcagcgtactctgctagcaaattcgccctcgacggcttcttctcctctattagaaaagaatacagcgtgtctcgagtgaacgtaagcatcacactatgtgtgctgggcttaattgacacagagactgcaatgaaggccgttagcgggattgtacatatgcaggcagccccaaaagaggagtgtgcactggaaatcattaaggggggagcattacgacaggaggaggtatactacgactcttccctgtggactactctactaattcgcaacccttgccgcaagatcttggagtttctttactccacctcctataacatggaccgatttataaacaagtag

SEQ ID NO: 82457 - DNA, 879 bp, Artificial Sequence
  derived and/or modified sequence
atggccttcatgaagaagtatttgctgcccatactgggtctgtttatggcctattactattacagtgctaacgaagaatttcgaccagaaatgctccaaggcaagaaggtgatcgtcaccggggctagcaagggaattggaagagagatggcttaccatcttgccaagatgggcgctcatgtggtcgtgaccgctcggagtaaggagacacttcagaaggttgtctcccactgcctggagctgggcgcagcgagtgctcactatatcgctggaaccatggaagatatgacattcgccgagcagtttgtcgcccaggcgggaaaacttatgggaggtttggatatgctcatccttaaccacataactaatacgagcttgaatttgttccatgacgacatccatcatgtgcggaaatctatggaggtcaacttcctctcctatgtcgtgctgaccgtggccgcactgcccatgctgaagcagtcaaatggaagcatcgtggtcgtttcatcacttgctgggaaagtggcgtacccaatggtggcggcatactccgcctccaagttcgccctggacggcttctttagttccataagaaaagagtattcagtgtctagggttaacgtctctataaccctgtgcgtgttaggcttgattgataccgaaactgctatgaaagcagtgtccgggattgttcatatgcaggccgcacccaaagaggagtgtgccctggaaataatcaagggtggggcacttcggcaggaggaggtgtactatgactcatccctctggacaacactgcttatacggaacccctgccgcaagatcctggagtttttgtatagcaccagttataacatggaccgatttattaataaatag

SEQ ID NO: 82458 - DNA, 879 bp, Artificial Sequence
  derived and/or modified sequence
atggccttcatgaagaagtacctgctgcccatcctgggcctgttcatggcctactactactacagcgccaacgaggagttcagacccgagatgctgcagggcaagaaggtgatcgtgaccggcgccagcaagggcatcggcagagagatggcctaccacctggccaagatgggcgcccacgtggtggtgaccgccagaagcaaggagaccctgcagaaggtggtgagccactgcctggagctgggcgccgccagcgcccactacatcgccggcaccatggaggacatgaccttcgccgagcagttcgtggcccaggccggcaagctgatgggcggcctggacatgctgatcctgaaccacatcaccaacaccagcctgaacctgttccacgacgacatccaccacgtgagaaagagcatggaggtgaacttcctgagctacgtggtgctgaccgtggccgccctgcccatgctgaagcagagcaacggcagcatcgtggtggtgagcagcctggccggcaaggtggcctaccccatggtggccgcctacagcgccagcaagttcgccctggacggcttcttcagcagcatcagaaaggagtacagcgtgagcagagtgaacgtgagcatcaccctgtgcgtgctgggcctgatcgacaccgagaccgccatgaaggccgtgagcggcatcgtgcacatgcaggccgcccccaaggaggagtgcgccctggagatcatcaagggcggcgccctgagacaggaggaggtgtactacgacagcagcctgtggaccaccctgctgatcagaaacccctgcagaaagatcctggagttcctgtacagcaccagctacaacatggacagattcatcaacaagtag

SEQ ID NO: 82459 - protein, 933 aa, Artificial Sequence
  derived and/or modified sequence
MRALAVLSVTLVMACTEAFFPFISRGKELLWGKPEESRVSSVLEESKRLVDTAMYATMQRNLKKRGILSPAQLLSFSKLPEPTSGVIARAAEIMETSIQAMKRKVNLKTQQSQHPTDALSEDLLSIIANMSGCLPYMLPPKCPNTCLANKYRPITGACNNRDHPRWGASNTALARWLPPVYEDGFSQPRGWNPGFLYNGFPLPPVREVTRHVIQVSNEVVTDDDRYSDLLMAWGQYIDHDIAFTPQSTSKAAFGGGADCQMTCENQNPCFPIQLPEEARPAAGTACLPFYRSSAACGTGDQGALFGNLSTANPRQQMNGLTSFLDASTVYGSSPALERQLRNWTSAEGLLRVHARLRDSGRAYLPFVPPRAPAACAPEPGIPGETRGPCFLAGDGRASEVPSLTALHTLWLREHNRLAAALKALNAHWSADAVYQEARKVVGALHQIITLRDYIPRILGPEAFQQYVGPYEGYDSTANPTVSNVFSTAAFRFGHATIHPLVRRLDASFQEHPDLPGLWLHQAFFSPWTLLRGGGLDPLIRGLLARPAKLQVQDQLMNEELTERLFVLSNSSTLDLASINLQRGRDHGLPGYNEWREFCGLPRLETPADLSTAIASRSVADKILDLYKHPDNIDVWLGGLAENFLPRARTGPLFACLIGKQMKALRDGDWFWWENSHVFTDAQRRELEKHSLSRVICDNTGLTRVPMDAFQVGKFPEDFESCDSITGMNLEAWRETFPQDDKCGFPESVENGDFVHCEESGRRVLVYSCRHGYELQGREQLTCTQEGWDFQPPLCKDVNECADGAHPPCHASARCRNTKGGFQCLCADPYELGDDGRTCVDSGRLPRVTWISMSLAALLIGGFAGLTSTVICRWTRTGTKSTLPISETGGGTPELRCGKHQAVGTSPQRAAAQDSEQESAGMEGRDTHRLPRAL

SEQ ID NO: 82460 - DNA, 2802 bp, Artificial Sequence
  derived and/or modified sequence
atgagagccctggccgtgctgagcgtgaccctggtgatggcctgcaccgaggccttcttccccttcatcagcagaggcaaggagctgctgtggggcaagcccgaggagagcagagtgagcagcgtgctggaggagagcaagagactggtggacaccgccatgtacgccaccatgcagagaaacctgaagaagagaggcatcctgagccccgcccagctgctgagcttcagcaagctgcccgagcccaccagcggcgtgatcgccagagccgccgagatcatggagaccagcatccaggccatgaagagaaaggtgaacctgaagacccagcagagccagcaccccaccgacgccctgagcgaggacctgctgagcatcatcgccaacatgagcggctgcctgccctacatgctgccccccaagtgccccaacacctgcctggccaacaagtacagacccatcaccggcgcctgcaacaacagagaccaccccagatggggcgccagcaacaccgccctggccagatggctgccccccgtgtacgaggacggcttcagccagcccagaggctggaaccccggcttcctgtacaacggcttccccctgccccccgtgagagaggtgaccagacacgtgatccaggtgagcaacgaggtggtgaccgacgacgacagatacagcgacctgctgatggcctggggccagtacatcgaccacgacatcgccttcaccccccagagcaccagcaaggccgccttcggcggcggcgccgactgccagatgacctgcgagaaccagaacccctgcttccccatccagctgcccgaggaggccagacccgccgccggcaccgcctgcctgcccttctacagaagcagcgccgcctgcggcaccggcgaccagggcgccctgttcggcaacctgagcaccgccaaccccagacagcagatgaacggcctgaccagcttcctggacgccagcaccgtgtacggcagcagccccgccctggagagacagctgagaaactggaccagcgccgagggcctgctgagagtgcacgccagactgagagacagcggcagagcctacctgcccttcgtgccccccagagcccccgccgcctgcgcccccgagcccggcatccccggcgagaccagaggcccctgcttcctggccggcgacggcagagccagcgaggtgcccagcctgaccgccctgcacaccctgtggctgagagagcacaacagactggccgccgccctgaaggccctgaacgcccactggagcgccgacgccgtgtaccaggaggccagaaaggtggtgggcgccctgcaccagatcatcaccctgagagactacatccccagaatcctgggccccgaggccttccagcagtacgtgggcccctacgagggctacgacagcaccgccaaccccaccgtgagcaacgtgttcagcaccgccgccttcagattcggccacgccaccatccaccccctggtgagaagactggacgccagcttccaggagcaccccgacctgcccggcctgtggctgcaccaggccttcttcagcccctggaccctgctgagaggcggcggcctggaccccctgatcagaggcctgctggccagacccgccaagctgcaggtgcaggaccagctgatgaacgaggagctgaccgagagactgttcgtgctgagcaacagcagcaccctggacctggccagcatcaacctgcagagaggcagagaccacggcctgcccggctacaacgagtggagagagttctgcggcctgcccagactggagacccccgccgacctgagcaccgccatcgccagcagaagcgtggccgacaagatcctggacctgtacaagcaccccgacaacatcgacgtgtggctgggcggcctggccgagaacttcctgcccagagccagaaccggccccctgttcgcctgcctgatcggcaagcagatgaaggccctgagagacggcgactggttctggtgggagaacagccacgtgttcaccgacgcccagagaagagagctggagaagcacagcctgagcagagtgatctgcgacaacaccggcctgaccagagtgcccatggacgccttccaggtgggcaagttccccgaggacttcgagagctgcgacagcatcaccggcatgaacctggaggcctggagagagaccttcccccaggacgacaagtgcggcttccccgagagcgtggagaacggcgacttcgtgcactgcgaggagagcggcagaagagtgctggtgtacagctgcagacacggctacgagctgcagggcagagagcagctgacctgcacccaggagggctgggacttccagccccccctgtgcaaggacgtgaacgagtgcgccgacggcgcccaccccccctgccacgccagcgccagatgcagaaacaccaagggcggcttccagtgcctgtgcgccgacccctacgagctgggcgacgacggcagaacctgcgtggacagcggcagactgcccagagtgacctggatcagcatgagcctggccgccctgctgatcggcggcttcgccggcctgaccagcaccgtgatctgcagatggaccagaaccggcaccaagagcaccctgcccatcagcgagaccggcggcggcacccccgagctgagatgcggcaagcaccaggccgtgggcaccagcccccagagagccgccgcccaggacagcgagcaggagagcgccggcatggagggcagagacacccacagactgcccagagccctgtag

SEQ ID NO: 82461 - DNA, 2802 bp, Artificial Sequence
  derived and/or modified sequence
atgagggctctcgccgttttgtccgttaccctggtgatggcttgcactgaggcattctttccctttattagcaggggcaaggagctcctttggggcaaacctgaagagagccgcgtttcgagcgttttggaagagagcaagagactggtcgatactgccatgtatgcaaccatgcaacgtaatctcaagaaacgagggatactgagtcccgctcagcttctaagcttcagtaaacttcccgaacctaccagcggagtgatcgccagggccgcggaaattatggaaactagcattcaggccatgaagcggaaagtgaacctcaagacccagcaatctcagcacccaaccgatgcactctctgaagaccttctgtctataatagctaatatgagcggttgcctgccctacatgcttcctcccaaatgcccgaacacctgtttagccaacaaatacagacccattactggggcctgcaacaaccgtgaccacccccgctggggagcttccaatactgcgttagctagatggttgccaccggtgtatgaggatgggttctcccagcctcgcggctggaatccaggtttcctgtataacgggttcccactcccccctgttcgggaagtaacaaggcacgtgatccaggtctcaaacgaagttgtcaccgatgacgatcgatacagcgacctgcttatggcttggggccagtacatcgaccacgatattgcttttacaccgcagtcgaccagtaaggccgccttcggtggcggtgctgattgccagatgacttgtgagaaccagaatccatgtttcccaatccagctgcccgaggaggctaggccggccgccggcacagcctgcttgcccttttaccgttcttcagcggcctgtggaacaggcgaccagggtgctctattcgggaatttgtccaccgctaatccccggcagcaaatgaacggacttaccagtttcctagatgcatctaccgtatatggaagtagcccagccctcgagcggcagctcagaaattggacttcagccgagggtttgctcagagtccatgccaggctccgagattccggccgagcttatctcccattcgtgccaccacgtgcgcccgctgcctgtgctccagaaccaggtattccaggagagacgaggggcccctgttttctagccggtgacggtagagcatctgaagtgccctccctaactgccctgcacactctatggctgcgggagcacaaccgtctagccgctgcacttaaagcccttaatgcacactggtcagccgacgccgtttaccaggaggccaggaaagttgtcggagccctgcaccaaatcatcaccctgcgggactatattccccggattctagggcctgaggcctttcagcagtatgtggggccctatgaagggtatgattccacagccaaccccaccgtttccaacgttttttccacggccgcgttccgttttggtcatgccacgatacatcctctagtgcggcgtcttgatgcatcctttcaggagcaccctgatctgccaggcctttggctgcatcaagcgtttttctcgccttggaccctactgcgtggaggggggctggacccactgatcagaggtttgctcgccaggccggcaaagctgcaggtgcaggatcagctcatgaatgaagaattgacagagagactgttcgtcctgtcaaatagctccaccctcgatttggcttccataaacctacagaggggcagagaccacggactgcccggttataacgagtggcgagaattctgcgggctgccaaggctagaaacccccgcagacctaagcacggcaattgccagccgaagcgttgctgataagatcctggacctctataaacatccagacaacatcgatgtgtggttgggcggtctggctgagaactttctgccccgagcccgcactggcccgctttttgcatgcctgatcgggaaacagatgaaagccctgcgtgacggagattggttttggtgggagaacagccacgtattcactgacgcacagcgccgggagctcgaaaagcactccctgtccagagtaatctgcgacaacacaggtctaacaagagttccgatggacgcgtttcaggtcggcaagttccctgaagactttgagtcctgtgactcaattactggcatgaatctagaggcttggagggagacctttccccaagacgacaaatgcgggttccctgaaagtgtggagaatggcgacttcgtccactgcgaggagtctggcaggagagtgctggtgtatagctgccgccacggctacgaacttcagggccgagagcagcttacttgtactcaggagggctgggacttccagccgcctttatgcaaagacgtgaatgaatgcgccgatggtgcgcaccccccgtgccatgcctctgccaggtgtagaaataccaagggtggcttccagtgtctatgtgcggatccctacgaattgggcgacgacgggcgcacatgcgtggattccggccgtctgccgcgggtgacatggattagcatgtctctggcagccctgttgatcggcggatttgctgggcttacatccactgttatctgtcggtggacccggaccggaacaaaaagcactctgcctataagtgaaacgggtgggggcacccctgaactgaggtgtggaaaacaccaggccgttggtacgtccccccagcgggccgctgcacaggattccgagcaggagtcagctggaatggagggccgagacactcaccggctgccacgggctttatag

SEQ ID NO: 82462 - DNA, 2802 bp, Artificial Sequence
  derived and/or modified sequence
atgagggccttggctgttctgtcggtcacattggtgatggcatgtactgaggcattttttccttttatcagccgcggtaaggagttattgtgggggaagcctgaggaaagtagagtgtctagcgtgttggaggagagcaagagactcgtggacacagctatgtacgccacaatgcagcgcaatctaaagaaacgggggattctcagccccgcccagctgctatctttctcgaaactgcccgagccaacctctggggtcattgcccgggccgcagagattatggagacaagtatccaggccatgaagaggaaggtgaatttgaagacccaacagtcccagcatccaaccgacgccctttcagaggatctgctcagcatcatagctaacatgagcggatgtctgccttatatgcttccaccaaagtgccccaacacttgtctcgctaacaaatacagacccataacaggagcctgcaacaacagggatcacccacggtggggtgccagcaacaccgcgctcgccagatggctgcctcctgtgtacgaagatggctttagtcagcctcgtggttggaaccctggatttctgtacaacggcttccctctcccacctgttagggaggtgactcgacatgtgatccaggtctctaatgaggtggtcaccgatgacgatagatattcagacctgctgatggcgtggggccaatatattgaccatgacatcgcttttaccccccagagcaccagcaaagccgccttcggagggggagcagactgccagatgacatgtgagaaccagaatccctgcttccctattcagctccccgaagaagcacggcccgcagcagggacagcctgcctcccattttataggtcttccgctgcctgtgggactggcgaccagggagcactcttcggtaacctgtctacagccaatccacggcaacagatgaacggcctgaccagttttttggacgccagtaccgtgtacggctcctcccccgccctggagcgacaacttcggaactggacctcagcagagggcctgctcagggttcacgcgagactgagagactcagggcgggcttatctgccattcgtaccgccaagggccccagcagcatgcgcgcccgaaccaggaatacccggtgagacaagaggtccgtgcttcctggcaggtgatggaagggcatcagaagttccaagtctcacagccttgcataccctttggctcagagagcacaaccggctggccgctgccctgaaagcactgaatgcccactggagcgccgacgctgtgtatcaggaagccaggaaagtcgtaggagccctacaccagatcattactctcagagactatatcccccgtatcctcggccccgaggccttccagcagtatgtgggcccttatgaggggtacgactcgactgcgaatcctactgtttctaatgttttctctactgccgcttttaggtttggccatgccactatacatcccctggtgcgacgattggatgcgagtttccaggagcacccggacctgcccggtctgtggctgcatcaggcatttttctctccttggacattactgcggggtggtggcctcgatcctttaataaggggcctcttagcgcgccctgcgaaactacaggtgcaggatcagctaatgaacgaagaactgacagaaaggcttttcgtactgagcaatagttccacattggacctagcctccatcaacctacagagggggcgagaccacggtctgcccggctataacgagtggagagaattttgtgggctccctcggttagagacaccagccgacctgtccaccgctatcgcatcaaggtccgtggctgacaaaatcctggacttatataagcaccctgataatattgacgtttggctcgggggactagcggaaaattttctccctcgcgcccgaaccgggcccttgtttgcgtgccttataggtaaacagatgaaggctctcagagacggggactggttttggtgggaaaattctcatgtgttcacagacgctcaacgccgggaactcgagaaacactccctgtcaagagtgatatgtgacaatacgggactgactcgcgtgccgatggatgcatttcaagtggggaagtttcctgaagattttgagtcctgtgattctattacgggaatgaacttggaggcgtggagggaaactttcccccaggacgacaaatgtggattccccgagtctgtggagaacggcgacttcgtgcattgtgaagaatccggacggagggtcctggtgtattcctgccgccatggctacgaactgcagggcagggaacaattaacttgtacccaggaggggtgggacttccagccccccctgtgcaaagacgttaacgagtgcgccgatggagcccaccctccttgccacgctagcgccaggtgcaggaatacaaaggggggcttccagtgtttatgcgcagacccgtacgaactgggagatgatgggaggacttgtgtagattctggccgtctgccccgggtgacgtggatcagtatgagcctggctgccctcctgataggaggcttcgccggcctgacctctacagttatttgccgatggaccagaacagggactaagtccactctgcctatctctgaaaccggtggcggcaccccagagctgagatgtggcaaacatcaggcagtaggcaccagccctcagagggccgcggcgcaagattcggaacaggagagtgccggcatggagggccgggacacccaccgcctccctagagccctctag

SEQ ID NO: 82463 - DNA, 2802 bp, Artificial Sequence
  derived and/or modified sequence
atgagggccctggccgtgctgtctgtgaccctggtgatggcctgcacagaggccttcttccccttcatcagccggggcaaggagctgctgtggggcaagccagaggagagccgggtgtcctctgtgctggaggagagcaagaggctggtggacacagccatgtatgccaccatgcagaggaacctgaagaagaggggcatcctgagccctgcccagctgctgtccttcagcaagctgcctgagcccaccagcggcgtgattgcccgggctgctgagatcatggagaccagcatccaggccatgaagaggaaggtgaacctgaagacccagcagagccagcaccccacagatgccctgtctgaggacctgctgagcatcatcgccaacatgagcggctgcctgccctacatgctgccccccaagtgccccaacacctgcctggccaacaagtaccggcccatcactggagcctgcaacaacagagaccacccccgctggggcgccagcaacacagccctggcccgctggctgccccctgtgtatgaagatggcttcagccagccccggggctggaaccctggcttcctgtacaacggcttccccctgccccctgtgcgggaggtgaccaggcatgtgatccaggtgtccaatgaggtggtgacagatgatgaccgctacagcgacctgctgatggcctggggccagtacatcgaccatgacatcgccttcaccccccagagcaccagcaaggccgcctttggaggcggcgctgactgccagatgacctgtgagaaccagaacccctgcttccccatccagctgcctgaggaggcccggcctgctgctggaacagcctgcctgcccttctaccgcagcagcgctgcctgtggcaccggggaccagggcgccctgtttggaaacctgagcacagccaacccccggcagcagatgaatggcctgaccagcttcctggatgccagcacagtgtatggcagcagccctgccctggagcggcagctgaggaactggaccagcgctgagggcctgctgcgggtgcacgcccggctgcgggacagcggccgggcctacctgccctttgtgcccccccgggccccagctgcctgtgcccctgagcccggcatccctggagagacccggggcccctgcttcctggccggagatggccgggccagcgaggtgcccagcctgacagccctgcacaccctgtggctgcgggagcacaaccggctggccgccgccctgaaggccctgaatgcccactggagcgcagatgctgtgtaccaggaggccaggaaggtggtgggcgccctgcaccagatcatcaccctgcgggactacatcccccgcatcctgggccctgaggccttccagcagtatgtgggcccctatgagggctatgacagcacagccaaccccaccgtgtccaatgtgttcagcacagctgccttccgcttcggccacgccaccatccaccccctggtgcggcggctggatgccagcttccaggagcacccagacctgcccggcctgtggctgcaccaggccttcttcagcccctggaccctgctgcggggcggcggcctggaccccctcatccggggcctgctggcccggcctgccaagctgcaggtgcaggaccagctgatgaatgaggagctgacagagcggctgtttgtgctgagcaacagcagcaccctggacctggccagcatcaacctgcagaggggccgggaccacggcctgcccggctacaatgagtggagggagttctgtggcctgccccggctggagaccccagctgacctgagcacagccatcgccagccgctctgtggccgacaagatcctggacctgtacaagcacccagacaacattgatgtgtggctgggcggcctggccgagaacttcctgccccgggccaggacaggccccctgtttgcctgcctgattggcaagcagatgaaggccctgagagatggagactggttctggtgggagaacagccacgtgttcacagatgcccagaggcgggagctggagaagcacagcctgagcagggtcatctgtgacaacacaggcctgaccagggtgcccatggatgccttccaggtgggcaagtttcctgaggactttgagagctgtgacagcatcaccggcatgaacctggaggcctggagggagaccttcccccaggatgacaagtgtggcttccctgagagcgtggagaatggagactttgtgcactgtgaggagagcggcagaagagtgctggtgtacagctgccgccacggctatgagctgcagggccgggagcagctgacctgcacccaggagggctgggacttccagccccccctgtgcaaggatgtgaatgaatgtgctgatggagcccaccccccctgccacgccagcgcccgctgcaggaacaccaagggcggcttccagtgcctgtgtgccgacccctatgagctgggagatgatggccgcacctgtgtggacagcggccgcctgccccgggtgacctggatctccatgagcctggccgccctgctgattggaggctttgctggcctgaccagcaccgtcatctgccgctggaccaggacaggcaccaagagcaccctgcccatcagcgagactggaggcggcaccccagagctgcgctgtgggaagcaccaggccgtgggcaccagcccccagagagctgctgcccaggacagcgagcaggagagcgctggcatggagggccgggacacccaccggctgccccgggccctgtag

SEQ ID NO: 82464 - DNA, 2802 bp, Artificial Sequence
  derived and/or modified sequence
atgcgggccctggccgtgctgagcgtgaccctggtgatggcctgcactgaagctttctttcccttcatcagccgaggaaaggaactgctctgggggaagccggaagagagcagagtctcgagcgttttggaagagagtaagcggctcgtggacaccgctatgtacgccaccatgcagaggaatctgaaaaagcgcggcatcttgagcccagcccagctgttgtctttctctaaattgcccgagcccacatccggagtaattgcccgggcggccgagatcatggagacaagtatccaggctatgaagagaaaggtgaacctcaagacccagcaaagccagcaccctacagacgccctctcagaggacctcctgtccattatcgcaaatatgtctggttgtcttccatatatgctgccccctaagtgtccaaatacatgccttgcaaacaaataccgaccaattactggagcatgcaacaaccgcgatcatcctagatggggcgcatctaataccgccttggccaggtggctcccaccggtgtacgaggatgggttttctcagcctcggggctggaatcctgggtttctttacaatggattccctttaccccccgtgagagaagtgacgagacacgtgatccaggtgagtaatgaggtcgttacagatgacgataggtactcagacctacttatggcgtggggccagtatatcgaccacgacatagcctttaccccgcagtctacctcaaaggcggcttttggtggaggtgcagactgtcagatgacatgtgagaatcaaaatccttgttttcctatccagttacccgaggaggcacggcccgccgctgggaccgcttgtctccccttctatagaagctctgctgcttgtgggaccggggatcaaggggcgctgttcgggaacctttccacggccaatccacggcagcaaatgaatggcctgacctccttcctggatgcaagcactgtctatggcagctcgcccgcgcttgagagacagctcagaaattggacttctgcagaaggtttgctccgagtgcacgcccgcttaagagattctgggagagcctatttaccctttgtgccacccagagctccggcagcctgtgccccagaacccggcatccccggagaaacacgtgggccctgcttcctcgccggggatggcagagctagcgaagtcccctccctgacagccctgcacaccctgtggctcagggagcataacaggctggctgcagccttgaaagccttgaatgctcactggtcggctgatgcagtatatcaggaggctagaaaggtagtgggagcccttcatcagataatcactcttcgagactacataccaaggatcctcggcccagaagccttccagcagtatgtgggaccctacgagggatatgactccactgctaaccccactgtgagtaatgtctttagcaccgcggcctttcgattcggccacgctaccatccaccctctagtcagacgcctcgatgcttcgttccaagagcatccagaccttcccggcctgtggctccaccaggccttcttttctccctggacgttgctaagaggagggggtctggatccactgatacgcggcctcttggccaggcccgcaaaactgcaagtgcaggaccagctgatgaacgaagaattgactgaaagattattcgttctcagtaattcatcaacattggacctggcatcaattaatctccagaggggaagggaccacggcctgcctggttacaacgagtggcgggagttctgcggcctgccgcgcctggagactcctgctgatttatcaacagctatcgcttcccgaagcgtggcagacaaaattctggacctgtacaaacaccccgacaacattgatgtgtggttggggggactcgctgaaaattttcttcccagggcaaggacaggccccctcttcgcctgtctcatcggcaagcagatgaaggccctgcgagacggcgactggttttggtgggaaaacagtcacgtgttcactgatgcgcagcggcgggagctcgagaaacactcattgtcccgagtgatatgtgacaatacgggcctcacacgtgttccaatggatgcttttcaggttggaaaatttccggaggatttcgagtcctgcgatagcattaccggcatgaacttagaagcatggcgagaaaccttccctcaagacgataagtgtggtttccccgaatccgtcgaaaacggggactttgtgcattgcgaggagagtggtcgccgggtattggtctattcttgtcgccatggatatgagttacagggccgggaacagcttacatgcacccaggaagggtgggactttcagcctcccctctgtaaagatgtaaacgagtgcgctgacggtgctcaccctccctgtcatgcttccgcacggtgccgaaacacaaaaggcggcttccaatgtctttgcgccgatccatacgagctcggtgacgacggaaggacatgtgtggacagtgggcgtctgcctcgtgtaacttggatcagtatgtccttagcagccctgctgatcggtggcttcgctgggctcactagtaccgttatttgtaggtggacacgtacaggaacaaagtcaacattgcccataagcgagaccggcggaggcacacctgaactccgttgtggaaagcatcaggccgtcgggacgagcccccagcgagcagctgctcaggattcagaacaggagtcagccggcatggaggggagggacactcaccgactgccccgagccctttag

SEQ ID NO: 82465 - DNA, 2802 bp, Artificial Sequence
  derived and/or modified sequence
atgcgggccctggccgtgctgagcgtgaccctggtgatggcctgcactgaagcatttttcccattcatctccagaggcaaggaacttttatgggggaagcccgaagagtcacgagtatcttctgtgctggaggagagcaaacgcctcgttgatacagccatgtacgcaacgatgcaacggaatctaaaaaaaaggggaatcctgagccctgcgcaactactgtcgttctctaagctgccagaaccgacaagcggcgtcattgcacgagccgccgaaattatggagactagcatccaagcgatgaagcgcaaagtcaatctgaaaacgcaacagagtcagcatcctaccgatgccctcagcgaagaccttctcagcattatcgcaaacatgagcgggtgcctcccttatatgcttccgccgaagtgccccaacacttgtctggccaataaatatcgacccatcaccggcgcatgcaacaacagggatcatcctaggtggggagcctctaatacagctttggcccggtggctgccccccgtatacgaggatggtttctcacagccacgcggctggaaccctgggttcttgtacaacggatttccgctgccacctgttcgtgaagtgacgaggcatgtgatccaagtgtcaaacgaggtagtaaccgatgacgaccgatacagcgaccttctcatggcttggggccaatacattgatcatgacatcgcctttacacctcaatcaacctccaaggcagccttcgggggcggagccgattgccagatgacatgcgaaaatcaaaatccatgctttcccatacaactaccagaggaggctcgcccagctgcaggcactgcatgtctgccattctaccggtctagcgccgcttgtggcaccggggatcagggagccttgttcggaaatctctccactgcaaatccaaggcagcagatgaatggcttgacaagctttctggacgcatctacagtgtatgggtctagcccggccctcgaaagacagctgcgaaattggacatcagcagaaggcctgctgagggtacacgctagactcagagattctggacgagcgtacctgccattcgtcccacctagggcgcccgctgcctgtgcccccgaacccggaatccctggggagacccggggcccgtgcttccttgcaggcgatggaagagcatcggaggtgccaagtttgactgcccttcacaccttatggcttcgagaacacaataggttagccgcagccctaaaggccttaaacgctcactggtccgcggacgctgtctaccaggaagctcgaaaagtggtcggtgctctgcaccaaattatcaccctgagggactacattccaaggatcctgggtccagaggcattccaacagtacgtgggaccgtacgaaggatacgactcaactgctaatccgacagtgagtaatgtcttctcaaccgcagcgttcaggttcggacacgccactatccaccccctggttaggcggctagacgcctcatttcaggagcatcccgacctcccgggtctgtggttgcaccaggcatttttcagtccttggaccctactgcgaggcggaggtctggaccctctgatccggggcctcctcgctcgtcctgccaagttgcaggtgcaggaccaacttatgaacgaagaactgaccgaacggctcttcgtgcttagcaacagtagcacacttgacctggcgtcaattaacttacagcgcgggcgggaccatggcctgccaggctacaatgagtggcgcgaattttgtggtctgcccagattagaaacacctgcggacctgtcaacggctatagcttcgcggtcagtcgccgacaaaatcttggatctgtacaaacatccagataacatcgacgtctggcttggcgggctggccgagaactttctcccccgcgcccgcactggccctctcttcgcttgcctaataggcaagcagatgaaagccctccgggatggcgattggttttggtgggagaacagtcatgtgttcacagatgcccagcgtcgtgagctggagaaacattcactgtcccgggtcatctgtgataacaccggactgacccgcgtgcctatggatgctttccaagtgggaaaattcccagaagatttcgagtcatgcgatagtataacgggtatgaacttagaggcctggcgcgagacattcccacaagacgacaagtgcggcttccctgagagtgtggagaatggggatttcgtccattgcgaggagtctggcaggcgcgttctcgtctacagctgtagacatggttatgaactgcagggccgcgaacagttgacgtgcacccaggagggctgggatttccagccacccctgtgtaaggacgtgaacgagtgtgccgacggcgcccatcctccatgccatgccagcgcaagatgccgcaatacaaaaggcggatttcagtgcctctgcgccgacccttacgaactgggggatgatggcaggacctgtgtggatagtggaagacttcccagagtcacctggattagcatgagtttagctgcactgttgataggcgggttcgccgggctgacctccacagttatttgcagatggactaggaccggaacaaagtccaccttacccatttccgagactgggggaggcacgccggagttgaggtgcggcaagcaccaggctgttggtactagcccacagcgcgccgcggcccaggactctgagcaggaaagcgcagggatggaaggacgggacacacacaggctcccccgggccctttag

SEQ ID NO: 82466 - DNA, 2802 bp, Artificial Sequence
  derived and/or modified sequence
atgcgtgcgctggctgtgctgagcgtcacattggtgatggcgtgcacagaggcgttctttccgttcattagtcgaggaaaggagctgctgtggggcaaacccgaggagtcgagggtctcgagtgtgctagaagagtcaaagcgcctagttgatactgcaatgtacgcaaccatgcagcggaacctcaaaaagcgcggaatcttgtcccctgcgcagttactgtcttttagtaaactgcctgagccaacttctggcgtgatcgccagggccgcagaaattatggagaccagcattcaggccatgaagagaaaagtaaatctcaagactcagcagtctcagcatccaacggacgccctgtctgaagatctgctgtccattattgctaatatgagtggctgcctgccctacatgcttccacccaagtgtcctaatacttgcttggcaaataagtatcgacccatcaccggtgcgtgcaacaatagagatcaccccaggtggggagcatctaacactgctctcgcaaggtggctgcctccggtgtacgaagatggcttttcacagcctagggggtggaaccccggttttttgtataacggctttccgctgccccctgtgagagaggttactcgacacgtcatacaagtgtcaaatgaagtagtcactgatgatgaccgttatagtgatctgcttatggcttggggacagtatattgaccatgatatcgcatttaccccgcagagcaccagcaaagctgcctttggcggaggagcggattgccagatgacctgcgagaaccagaatccctgcttcccaatacaactccctgaagaagccagacccgctgccggaacagcctgtttacctttttatcgatcctccgctgcttgtggtaccggcgaccagggtgcactgttcggtaacctatctactgcaaacccgagacagcaaatgaacgggctcaccagcttcttggatgcttccacggtgtatggtagctcacccgctctggagcgtcaactgcggaactggacctctgctgaaggactgctgagagtgcacgctagactgagagacagtggccgtgcctatctgcctttcgttccacccagagcccctgctgcttgtgcgccagaacctggtattcctggcgagaccagaggtccttgctttctggcgggagatgggagagcttccgaggtcccgagtctcacagccctacatacattatggctgcgcgagcataatcgacttgcagcggctctgaaagcacttaacgctcattggtcagctgatgcggtctaccaggaggctcgcaaggtagtgggtgccctgcaccaaataattacactccgcgactatattccacgtatccttggaccagaagctttccaacagtatgttggtccgtatgagggatacgattccactgcaaaccctactgtgagcaacgtgtttagtaccgcggctttccgatttggacatgccactattcatcctttagtccgtcgactcgacgcgtccttccaggagcaccccgatctgccaggcctgtggctccaccaggcattcttcagcccctggaccctcctgcgcggtggagggctggatccccttatcaggggcctgcttgctcgacctgcaaagctgcaggtccaggatcagctcatgaacgaggagctgacggagcggctgttcgtattgtccaatagcagcactctcgatctcgcgagcatcaacctgcaacgtggcagagaccacggtctccctgggtataatgagtggagggagttttgcggccttcctagactagaaactccggctgacctgtctacggctatcgccagccggtcggtcgccgacaagattttagatctgtataagcaccctgataacatcgatgtgtggctgggaggcctagcagagaatttcctgccgcgagctaggacggggcctctattcgcttgcttgattgggaaacagatgaaggcactgagagacggagattggttctggtgggagaatagccacgtcttcacagatgcccagcgccgagaacttgagaagcactcactgagtcgggtgatctgtgacaatacgggcctcacaagagtcccaatggacgcttttcaagttgggaagttcccggaagacttcgagtcctgtgactcaataacagggatgaacctggaggcatggcgggaaacattcccacaagacgacaaatgcgggttcccagagtcggtcgaaaatggcgatttcgtccactgtgaggagtccggacgacgtgtcctggtctactcgtgtagacacgggtacgagctccagggaagggagcagctgacctgtactcaggagggctgggactttcagcccccattatgcaaggacgtgaacgagtgtgctgacggcgctcaccccccatgccatgcctcggccagatgcaggaacaccaaaggcggtttccagtgtctgtgtgcagatccttatgagctgggcgacgacggtcgaacttgtgtagactccggcagactgccaagggttacctggatttcaatgtccctcgctgccctcctcatcggcggtttcgcagggctgacctctaccgtaatttgccggtggactcgaaccggtacaaaaagcaccttgcccatatccgagacaggaggcggtactcctgagctccgttgcggcaaacatcaagcagttggcacctcgccacaacgcgcagcagcccaggacagtgagcaggagagcgccggaatggaaggacgggacactcaccggctccccagagctttatag

SEQ ID NO: 82467 - DNA, 2802 bp, Artificial Sequence
  derived and/or modified sequence
atgcgggcacttgccgtactatcagtaactcttgtgatggcatgtaccgaggccttctttcccttcattagccggggaaaagagctgctctggggaaagcctgaagaatcaagagtatcttccgtactggaggagagcaagaggctggttgataccgcgatgtatgctacaatgcagcgtaacttgaaaaaacgcggtattctgtctccagcccagctcctgtctttcagtaagcttcctgaaccaacctctggagtgatagctcgcgcagcagaaataatggaaacttctatacaagctatgaagagaaaggtgaatctgaagacccaacagtctcaacatcccaccgacgcactgagtgaggacctgctgtcaatcattgccaacatgagcggatgcctgccctatatgctgccgccaaagtgtcccaatacatgtctggccaacaagtataggccgatcacaggggcttgcaacaacagagaccatcctaggtggggcgcaagcaatacagctctggcacgatggctcccgccagtttacgaagacggatttagtcagcctcggggttggaacccgggattcttatacaacggatttcccttgcctccagttagggaagttacccgccatgtcattcaggtctctaacgaggttgtcacggatgatgatcggtattcagatttgctgatggcgtggggacagtacatagatcacgatatcgcattcacaccacaaagtacttccaaggccgctttcggcggaggcgcagattgtcagatgacctgcgaaaaccagaacccctgctttccaattcagctgcccgaagaggcaagacctgccgcaggaactgcctgcttgcccttttaccggtcttcagctgcatgtggaacgggcgaccaaggagctcttttcgggaatctgagcacagccaacccaaggcagcagatgaacggcctgacgagctttcttgatgccagcacagtgtacgggtcgagtcccgcacttgaacggcagctgcggaactggacgagtgctgaaggcctgttgcgggttcacgcacgcctgagggattcgggaagagcttatcttccctttgtgcctccacgcgctcccgctgcatgcgcgcctgagcctggtattcccggtgagaccagaggaccctgcttcctcgctggtgatggcagagcatctgaagtccccagcctgactgctttacacaccctgtggctgagggaacacaatcggctagcagctgctctgaaggctctcaacgctcactggtccgccgacgccgtttatcaggaagctagaaaagtcgtgggcgcattacaccaaattataaccttacgcgattatataccgcgaattttaggcccagaggcattccagcaatacgtcgggccttacgagggctatgactcaaccgccaatcccaccgtcagcaacgtattctccacagcagcattccgcttcgggcatgcaacaattcatccactggttagacgactagatgccagctttcaagaacaccctgatctaccaggattatggctgcatcaggccttttttagcccctggactctccttaggggagggggactagaccccctcatcagaggccttttggctaggccagcgaaactgcaagtgcaggaccagctgatgaatgaagagctgacagagaggttattcgtgctgtcaaatagcagcacactcgacttggcgagcattaatcttcagagaggccgagatcacggtctgccaggctacaatgaatggagggagttctgcgggttgccccgactagagacccctgccgacctgtccacagccatagctagtaggtccgtggccgataagatcctggacctgtacaagcacccagacaatatagatgtgtggcttggaggacttgccgaaaatttcctgccccgagccaggactggcccactgtttgcatgcctaatcggcaagcagatgaaagcgctgagggacggcgattggttttggtgggagaacagccacgtcttcacagacgcccagagaagagaactcgagaagcacagcttgtctagggtcatctgcgacaatacaggcctcactagagtcccaatggatgcctttcaggtggggaaattccctgaagacttcgagagctgcgactcgatcacaggcatgaacctggaggcttggagagagactttcccacaggacgataaatgtggatttcctgagagcgtagagaatggagactttgtgcattgcgaggaatctggtcgacgggttctcgtgtattcgtgtcgccacggttatgagttgcaggggagggagcaactgacctgtacacaggaggggtgggattttcaaccacctttgtgtaaagacgtcaacgagtgcgccgacggagcacaccctccatgtcatgccagcgctcgatgcagaaataccaagggagggtttcagtgcctttgtgcagacccatacgagttgggcgacgatggacgcacctgcgtcgattctgggagactccccagagtcacttggatttctatgtcactcgccgctctcctcatcgggggatttgccggtctcacgtcgacagtgatttgtcgatggactcggactggcaccaaatcaactttgcccatttccgaaactggagggggaacaccagaactccggtgcggcaagcaccaggccgtgggcacgtcaccccagagagccgctgctcaggacagtgaacaagaaagcgcgggtatggaaggaagagacacccaccgcctcccacgtgcactgtag

SEQ ID NO: 82468 - DNA, 3138 bp, Artificial Sequence
  derived and/or modified sequence
aggcaattaaggcgcccatttcagaagagttacagccgtgaaaattactcagcagtgcagttggctgagaagaggaaaaaagaatgagagcgctcgctgtgctgtctgtcacgctggttatggcctgcacagaagccttcttccccttcatctcgagagggaaagaactcctttggggaaagcctgaggagtctcgtgtctctagcgtcttggaggaaagcaagcgcctggtggacaccgccatgtacgccacgatgcagagaaacctcaagaaaagaggaatcctttctccagctcagcttctgtctttttccaaacttcctgagccaacaagcggagtgattgcccgagcagcagagataatggaaacatcaatacaagcgatgaaaagaaaagtcaacctgaaaactcaacaatcacagcatccaacggatgctttatcagaagatctgctgagcatcattgcaaacatgtctggatgtctcccttacatgctgcccccaaaatgcccaaacacttgcctggcgaacaaatacaggcccatcacaggagcttgcaacaacagagaccaccccagatggggcgcctccaacacggccctggcacgatggctccctccagtctatgaggacggcttcagtcagccccgaggctggaaccccggcttcttgtacaacgggttcccactgcccccggtccgggaggtgacaagacatgtcattcaagtttcaaatgaggttgtcacagatgatgaccgctattctgacctcctgatggcatggggacaatacatcgaccacgacatcgcgttcacaccacagagcaccagcaaagctgccttcgggggaggggctgactgccagatgacttgtgagaaccaaaacccatgttttcccatacaactcccggaggaggcccggccggccgcgggcaccgcctgtctgcccttctaccgctcttcggccgcctgcggcaccggggaccaaggcgcgctctttgggaacctgtccacggccaacccgcggcagcagatgaacgggttgacctcgttcctggacgcgtccaccgtgtatggcagctccccggccctagagaggcagctgcggaactggaccagtgccgaagggctgctccgcgtccacgcgcgcctccgggactccggccgcgcctacctgcccttcgtgccgccacgcgcgcctgcggcctgtgcgcccgagcccggcatccccggagagacccgcgggccctgcttcctggccggagacggccgcgccagcgaggtcccctccctgacggcactgcacacgctgtggctgcgcgagcacaaccgcctggccgcggcgctcaaggccctcaatgcgcactggagcgcggacgccgtgtaccaggaggcgcgcaaggtcgtgggcgctctgcaccagatcatcaccctgagggattacatccccaggatcctgggacccgaggccttccagcagtacgtgggtccctatgaaggctatgactccaccgccaaccccactgtgtccaacgtgttctccacagccgccttccgcttcggccatgccacgatccacccgctggtgaggaggctggacgccagcttccaggagcaccccgacctgcccgggctgtggctgcaccaggctttcttcagcccatggacattactccgtggaggtggtttggacccactaatacgaggccttcttgcaagaccagccaaactgcaggtgcaggatcagctgatgaacgaggagctgacggaaaggctctttgtgctgtccaattccagcaccttggatctggcgtccatcaacctgcagaggggccgggaccacgggctgccaggttacaatgagtggagggagttctgcggcctgcctcgcctggagacccccgctgacctgagcacagccatcgccagcaggagcgtggccgacaagatcctggacttgtacaagcatcctgacaacatcgatgtctggctgggaggcttagctgaaaacttcctccccagggctcggacagggcccctgtttgcctgtctcattgggaagcagatgaaggctctgcgggacggtgactggttttggtgggagaacagccacgtcttcacggatgcacagaggcgtgagctggagaagcactccctgtctcgggtcatctgtgacaacactggcctcaccagggtgcccatggatgccttccaagtcggcaaattccccgaagactttgagtcttgtgacagcatcactggcatgaacctggaggcctggagggaaacctttcctcaagacgacaagtgtggcttcccagagagcgtggagaatggggactttgtgcactgtgaggagtctgggaggcgcgtgctggtgtattcctgccggcacgggtatgagctccaaggccgggagcagctcacttgcacccaggaaggatgggatttccagcctcccctctgcaaagatgtgaacgagtgtgcagacggtgcccaccccccctgccacgcctctgcgaggtgcagaaacaccaaaggcggcttccagtgtctctgcgcggacccctacgagttaggagacgatgggagaacctgcgtagactccgggaggctccctcgggtgacttggatctccatgtcgctggctgctctgctgatcggaggcttcgcaggtctcacctcgacggtgatttgcaggtggacacgcactggcactaaatccacactgcccatctcggagacaggcggaggaactcccgagctgagatgcggaaagcaccaggccgtagggacctcaccgcagcgggccgcagctcaggactcggagcaggagagtgctgggatggaaggccgggatactcacaggctgccgagagccctctgagggcaaagtggcaggacactgcagaacagcttcatgttcccaaaatcaccgtacgactcttttccaaacacaggcaaatccgaaatcagcaggacgactgttttcccaacacgggtaaatctagtaccatgtcgtagttactctcaggcatggatgaataaatgttatagctgcatttgtctggccttttcttgtaaacattgcctgatttgttccttctggggctttgccattaaaatgtatttacagatta

SEQ ID NO: 82469 - DNA, 3145 bp, Artificial Sequence
  derived and/or modified sequence
ggaaggcaattaaggcgcccatttcagaagagttacagccgtgaaaattactcagcagtgcagttggctgagaagaggaaaaaaggtcagaatgagagcgctcgctgtgctgtctgtcacgctggttatggcctgcacagaagccttcttccccttcatctcgagagggaaagaactcctttggggaaagcctgaggagtctcgtgtctctagcgtcttggaggaaagcaagcgcctggtggacaccgccatgtacgccacgatgcagagaaacctcaagaaaagaggaatcctttctccagctcagcttctgtctttttccaaacttcctgagccaacaagcggagtgattgcccgagcagcagagataatggaaacatcaatacaagcgatgaaaagaaaagtcaacctgaaaactcaacaatcacagcatccaacggatgctttatcagaagatctgctgagcatcattgcaaacatgtctggatgtctcccttacatgctgcccccaaaatgcccaaacacttgcctggcgaacaaatacaggcccatcacaggagcttgcaacaacagagaccaccccagatggggcgcctccaacacggccctggcacgatggctccctccagtctatgaggacggcttcagtcagccccgaggctggaaccccggcttcttgtacaacgggttcccactgcccccggtccgggaggtgacaagacatgtcattcaagtttcaaatgaggttgtcacagatgatgaccgctattctgacctcctgatggcatggggacaatacatcgaccacgacatcgcgttcacaccacagagcaccagcaaagctgccttcgggggaggggctgactgccagatgacttgtgagaaccaaaacccatgttttcccatacaactcccggaggaggcccggccggccgcgggcaccgcctgtctgcccttctaccgctcttcggccgcctgcggcaccggggaccaaggcgcgctctttgggaacctgtccacggccaacccgcggcagcagatgaacgggttgacctcgttcctggacgcgtccaccgtgtatggcagctccccggccctagagaggcagctgcggaactggaccagtgccgaagggctgctccgcgtccacgcgcgcctccgggactccggccgcgcctacctgcccttcgtgccgccacgcgcgcctgcggcctgtgcgcccgagcccggcatccccggagagacccgcgggccctgcttcctggccggagacggccgcgccagcgaggtcccctccctgacggcactgcacacgctgtggctgcgcgagcacaaccgcctggccgcggcgctcaaggccctcaatgcgcactggagcgcggacgccgtgtaccaggaggcgcgcaaggtcgtgggcgctctgcaccagatcatcaccctgagggattacatccccaggatcctgggacccgaggccttccagcagtacgtgggtccctatgaaggctatgactccaccgccaaccccactgtgtccaacgtgttctccacagccgccttccgcttcggccatgccacgatccacccgctggtgaggaggctggacgccagcttccaggagcaccccgacctgcccgggctgtggctgcaccaggctttcttcagcccatggacattactccgtggaggtggtttggacccactaatacgaggccttcttgcaagaccagccaaactgcaggtgcaggatcagctgatgaacgaggagctgacggaaaggctctttgtgctgtccaattccagcaccttggatctggcgtccatcaacctgcagaggggccgggaccacgggctgccaggttacaatgagtggagggagttctgcggcctgcctcgcctggagacccccgctgacctgagcacagccatcgccagcaggagcgtggccgacaagatcctggacttgtacaagcatcctgacaacatcgatgtctggctgggaggcttagctgaaaacttcctccccagggctcggacagggcccctgtttgcctgtctcattgggaagcagatgaaggctctgcgggacggtgactggttttggtgggagaacagccacgtcttcacggatgcacagaggcgtgagctggagaagcactccctgtctcgggtcatctgtgacaacactggcctcaccagggtgcccatggatgccttccaagtcggcaaattccccgaagactttgagtcttgtgacagcatcactggcatgaacctggaggcctggagggaaacctttcctcaagacgacaagtgtggcttcccagagagcgtggagaatggggactttgtgcactgtgaggagtctgggaggcgcgtgctggtgtattcctgccggcacgggtatgagctccaaggccgggagcagctcacttgcacccaggaaggatgggatttccagcctcccctctgcaaagatgtgaacgagtgtgcagacggtgcccaccccccctgccacgcctctgcgaggtgcagaaacaccaaaggcggcttccagtgtctctgcgcggacccctacgagttaggagacgatgggagaacctgcgtagactccgggaggctccctcgggtgacttggatctccatgtcgctggctgctctgctgatcggaggcttcgcaggtctcacctcgacggtgatttgcaggtggacacgcactggcactaaatccacactgcccatctcggagacaggcggaggaactcccgagctgagatgcggaaagcaccaggccgtagggacctcaccgcagcgggccgcagctcaggactcggagcaggagagtgctgggatggaaggccgggatactcacaggctgccgagagccctctgagggcaaagtggcaggacactgcagaacagcttcatgttcccaaaatcaccgtacgactcttttccaaacacaggcaaatccgaaatcagcaggacgactgttttcccaacacgggtaaatctagtaccatgtcgtagttactctcaggcatggatgaataaatgttatagctgcatttgtctggccttttcttgtaaacattgcctgatttgttccttctggggctttgccattaaaatgtatttacagatt

SEQ ID NO: 82470 - DNA, 3143 bp, Artificial Sequence
  derived and/or modified sequence
ggaaggcaattaaggcgcccatttcagaagagttacagccgtgaaaattactcagcagtgcagttggctgagaagaggaaaaaaggtcagaatgagagcgctcgctgtgctgtctgtcacgctggttatggcctgcacagaagccttcttccccttcatctcgagagggaaagaactcctttggggaaagcctgaggagtctcgtgtctctagcgtcttggaggaaagcaagcgcctggtggacaccgccatgtacgccacgatgcagagaaacctcaagaaaagaggaatcctttctccagctcagcttctgtctttttccaaacttcctgagccaacaagcggagtgattgcccgagcagcagagataatggaaacatcaatacaagcgatgaaaagaaaagtcaacctgaaaactcaacaatcacagcatccaacggatgctttatcagaagatctgctgagcatcattgcaaacatgtctggatgtctcccttacatgctgcccccaaaatgcccaaacacttgcctggcgaacaaatacaggcccatcacaggagcttgcaacaacagagaccaccccagatggggcgcctccaacacggccctggcacgatggctccctccagtctatgaggacggcttcagtcagccccgaggctggaaccccggcttcttgtacaacgggttcccactgcccccggtccgggaggtgacaagacatgtcattcaagtttcaaatgaggttgtcacagatgatgaccgctattctgacctcctgatggcatggggacaatacatcgaccacgacatcgcgttcacaccacagagcaccagcaaagctgccttcgggggaggggctgactgccagatgacttgtgagaaccaaaacccatgttttcccatacaactcccggaggaggcccggccggccgcgggcaccgcctgtctgcccttctaccgctcttcggccgcctgcggcaccggggaccaaggcgcgctctttgggaacctgtccacggccaacccgcggcagcagatgaacgggttgacctcgttcctggacgcgtccaccgtgtatggcagctccccggccctagagaggcagctgcggaactggaccagtgccgaagggctgctccgcgtccacgcgcgcctccgggactccggccgcgcctacctgcccttcgtgccgccacgcgcgcctgcggcctgtgcgcccgagcccggcatccccggagagacccgcgggccctgcttcctggccggagacccgcgccagcgaggtcccctccctgacggcactgcacacgctgtggctgcgcgagcacaaccgcctggccgcggcgctcaaggccctcaatgcgcactggagcgcggacgccgtgtaccaggaggcgcgcaaggtcgtgggcgctctgcaccagatcatcaccctgagggattacatccccaggatcctgggacccgaggccttccagcagtacgtgggtccctatgaaggctatgactccaccgccaaccccactgtgtccaacgtgttctccacagccgccttccgcttcggccatgccacgatccacccgctggtgaggaggctggacgccagcttccaggagcaccccgacctgcccgggctgtggctgcaccaggctttcttcagcccatggacattactccgtggaggtggtttggacccactaatacgaggccttcttgcaagaccagccaaactgcaggtgcaggatcagctgatgaacgaggagctgacggaaaggctctttgtgctgtccaattccagcaccttggatctggcgtccatcaacctgcagaggggccgggaccacgggctgccaggttacaatgagtggagggagttctgcggcctgcctcgcctggagacccccgctgacctgagcacagccatcgccagcaggagcgtggccgacaagatcctggacttgtacaagcatcctgacaacatcgatgtctggctgggaggcttagctgaaaacttcctccccagggctcggacagggcccctgtttgcctgtctcattgggaagcagatgaaggctctgcgggacggtgactggttttggtgggagaacagccacgtcttcacggatgcacagaggcgtgagctggagaagcactccctgtctcgggtcatctgtgacaacactggcctcaccagggtgcccatggatgccttccaagtcggcaaattccccgaagactttgagtcttgtgacagcatcactggcatgaacctggaggcctggagggaaacctttcctcaagacgacaagtgtggcttcccagagagcgtggagaatggggactttgtgcactgtgaggagtctgggaggcgcgtgctggtgtattcctgccggcacgggtatgagctccaaggccgggagcagctcacttgcacccaggaaggatgggatttccagcctcccctctgcaaagatgtgaacgagtgtgcagacggtgcccaccccccctgccacgcctctgcgaggtgcagaaacaccaaaggcggcttccagtgtctctgcgcggacccctacgagttaggagacgatgggagaacctgcgtagactccgggaggctccctcgggtgacttggatctccatgtcgctggctgctctgctgatcggaggcttcgcaggtctcacctcgacggtgatttgcaggtggacacgcactggcactaaatccacactgcccatctcggagacaggcggaggaactcccgagctgagatgcggaaagcaccaggccgtagggacctcaccgcagcgggccgcagctcaggactcggagcaggagagtgctgggatggaaggccgggatactcacaggctgccgagagccctctgagggcaaagtggcaggacactgcagaacagcttcatgttcccaaaatcaccgtacgactcttttccaaacacaggcaaatccgaaatcagcaggacgactgttttcccaacacgggtaaatctagtaccatgtcgtagttactctcaggcatggatgaataaatgttatagctgcatttgtctggccttttcttgtaaacattgcctgatttgttccttctggggctttgccattaaaatgtatttacagatt

SEQ ID NO: 82471 - protein, 876 aa, Artificial Sequence
  derived and/or modified sequence
MRALAVLSVTLVMACTEAFFPFISRGKELLWGKPEESRVSSVLEESKRLVDTAMYATMQRNLKKRGILSPAQLLSFSKLPEPTSGVIARAAEIMETSIQAMKRKVNLKTQQSQHPTDALSEDLLSIIANMSGCLPYMLPPKCPNTCLANKYRPITGACNNRDHPRWGASNTALARWLPPVYEDGFSQPRGWNPGFLYNGFPLPPVREVTRHVIQVSNEVVTDDDRYSDLLMAWGQYIDHDIAFTPQSTSKAAFGGGADCQMTCENQNPCFPIQLPEEARPAAGTACLPFYRSSAACGTGDQGALFGNLSTANPRQQMNGLTSFLDASTVYGSSPALERQLRNWTSAEGLLRVHARLRDSGRAYLPFVPPRAPAACAPEPGIPGETRGPCFLAGDGRASEVPSLTALHTLWLREHNRLAAALKALNAHWSADAVYQEARKVVGALHQIITLRDYIPRILGPEAFQQYVGPYEGYDSTANPTVSNVFSTAAFRFGHATIHPLVRRLDASFQEHPDLPGLWLHQAFFSPWTLLRGGYNEWREFCGLPRLETPADLSTAIASRSVADKILDLYKHPDNIDVWLGGLAENFLPRARTGPLFACLIGKQMKALRDGDWFWWENSHVFTDAQRRELEKHSLSRVICDNTGLTRVPMDAFQVGKFPEDFESCDSITGMNLEAWRETFPQDDKCGFPESVENGDFVHCEESGRRVLVYSCRHGYELQGREQLTCTQEGWDFQPPLCKDVNECADGAHPPCHASARCRNTKGGFQCLCADPYELGDDGRTCVDSGRLPRVTWISMSLAALLIGGFAGLTSTVICRWTRTGTKSTLPISETGGGTPELRCGKHQAVGTSPQRAAAQDSEQESAGMEGRDTHRLPRAL

SEQ ID NO: 82472 - DNA, 2631 bp, Artificial Sequence
  derived and/or modified sequence
atgagagccctggccgtgctgagcgtgaccctggtgatggcctgcaccgaggccttcttccccttcatcagcagaggcaaggagctgctgtggggcaagcccgaggagagcagagtgagcagcgtgctggaggagagcaagagactggtggacaccgccatgtacgccaccatgcagagaaacctgaagaagagaggcatcctgagccccgcccagctgctgagcttcagcaagctgcccgagcccaccagcggcgtgatcgccagagccgccgagatcatggagaccagcatccaggccatgaagagaaaggtgaacctgaagacccagcagagccagcaccccaccgacgccctgagcgaggacctgctgagcatcatcgccaacatgagcggctgcctgccctacatgctgccccccaagtgccccaacacctgcctggccaacaagtacagacccatcaccggcgcctgcaacaacagagaccaccccagatggggcgccagcaacaccgccctggccagatggctgccccccgtgtacgaggacggcttcagccagcccagaggctggaaccccggcttcctgtacaacggcttccccctgccccccgtgagagaggtgaccagacacgtgatccaggtgagcaacgaggtggtgaccgacgacgacagatacagcgacctgctgatggcctggggccagtacatcgaccacgacatcgccttcaccccccagagcaccagcaaggccgccttcggcggcggcgccgactgccagatgacctgcgagaaccagaacccctgcttccccatccagctgcccgaggaggccagacccgccgccggcaccgcctgcctgcccttctacagaagcagcgccgcctgcggcaccggcgaccagggcgccctgttcggcaacctgagcaccgccaaccccagacagcagatgaacggcctgaccagcttcctggacgccagcaccgtgtacggcagcagccccgccctggagagacagctgagaaactggaccagcgccgagggcctgctgagagtgcacgccagactgagagacagcggcagagcctacctgcccttcgtgccccccagagcccccgccgcctgcgcccccgagcccggcatccccggcgagaccagaggcccctgcttcctggccggcgacggcagagccagcgaggtgcccagcctgaccgccctgcacaccctgtggctgagagagcacaacagactggccgccgccctgaaggccctgaacgcccactggagcgccgacgccgtgtaccaggaggccagaaaggtggtgggcgccctgcaccagatcatcaccctgagagactacatccccagaatcctgggccccgaggccttccagcagtacgtgggcccctacgagggctacgacagcaccgccaaccccaccgtgagcaacgtgttcagcaccgccgccttcagattcggccacgccaccatccaccccctggtgagaagactggacgccagcttccaggagcaccccgacctgcccggcctgtggctgcaccaggccttcttcagcccctggaccctgctgagaggcggctacaacgagtggagagagttctgcggcctgcccagactggagacccccgccgacctgagcaccgccatcgccagcagaagcgtggccgacaagatcctggacctgtacaagcaccccgacaacatcgacgtgtggctgggcggcctggccgagaacttcctgcccagagccagaaccggccccctgttcgcctgcctgatcggcaagcagatgaaggccctgagagacggcgactggttctggtgggagaacagccacgtgttcaccgacgcccagagaagagagctggagaagcacagcctgagcagagtgatctgcgacaacaccggcctgaccagagtgcccatggacgccttccaggtgggcaagttccccgaggacttcgagagctgcgacagcatcaccggcatgaacctggaggcctggagagagaccttcccccaggacgacaagtgcggcttccccgagagcgtggagaacggcgacttcgtgcactgcgaggagagcggcagaagagtgctggtgtacagctgcagacacggctacgagctgcagggcagagagcagctgacctgcacccaggagggctgggacttccagccccccctgtgcaaggacgtgaacgagtgcgccgacggcgcccaccccccctgccacgccagcgccagatgcagaaacaccaagggcggcttccagtgcctgtgcgccgacccctacgagctgggcgacgacggcagaacctgcgtggacagcggcagactgcccagagtgacctggatcagcatgagcctggccgccctgctgatcggcggcttcgccggcctgaccagcaccgtgatctgcagatggaccagaaccggcaccaagagcaccctgcccatcagcgagaccggcggcggcacccccgagctgagatgcggcaagcaccaggccgtgggcaccagcccccagagagccgccgcccaggacagcgagcaggagagcgccggcatggagggcagagacacccacagactgcccagagccctgtag

SEQ ID NO: 82473 - DNA, 2631 bp, Artificial Sequence
  derived and/or modified sequence
atgagagctcttgctgtgctcagcgtgaccctggtcatggcctgtaccgaggctttctttccttttatttctagaggtaaagagctattgtgggggaagcctgaggagagtagagtgtccagtgtgttggaagagagtaagcgcctggttgacacagcaatgtatgccacaatgcagcgtaatctcaagaagcgcggaatcctctctcctgcgcagcttctcagcttctcgaagcttcccgaacctacatccggtgtcattgccagagccgccgagattatggagacatctatacaggccatgaaaaggaaagtgaatcttaagacacagcagagccagcatcccaccgacgcactgtccgaggacctactgtccatcatcgcaaatatgtccggttgtctcccatatatgctgccacctaagtgtcctaacacctgtctggcaaataagtatcgacctatcactggagcttgtaataacagagatcatcctcgttggggcgcctctaacaccgcactagctcggtggctgcccccagtgtatgaggacggcttttcccaacctcgaggatggaatcctggcttcctctacaacggtttcccactgccgcccgtgcgagaagttacaaggcatgtgattcaggtctccaacgaggtggtcactgatgacgaccgctattccgatttgctaatggcctgggggcagtatattgaccatgacatcgcttttaccccacagtccactagtaaggccgcattcgggggcggcgccgattgtcaaatgacctgcgaaaaccaaaacccctgcttccctatccagcttccagaggaggctcgtcctgccgccggcacggcgtgtctgcctttttatcgttccagcgccgcatgtggaaccggggaccagggtgcgcttttcggcaacctgtcgacggccaaccccagacagcagatgaatggcctcaccagcttcctagatgcttccaccgtttatggctcgagcccagccctggagcgccaactgcggaactggactagtgcagaggggctccttagagtccatgccagactcagggattcgggaagagcctatctgccatttgtccctccccgcgccccagcggcctgtgctcccgagcccgggatcccaggggaaacacggggcccatgctttctcgctggggatgggcgggcaagcgaggtccctagtctgacagccctgcacacgctttggctgagagaacacaaccgccttgctgccgccttgaaggcactgaacgctcactggagcgccgacgccgtttaccaggaggcacggaaggtggtcggcgcactccaccagatcatcacacttagggactatatcccccgcatcctagggcctgaggctttccagcagtacgtggggccatatgaggggtacgatagcacagctaatccaacagtttcaaacgtttttagcacagccgcttttcgctttggccacgccactattcacccccttgtgaggaggctggacgcttcctttcaagagcaccccgacttgccagggttgtggctgcatcaagcattcttttccccctggactctcttacgcggcggctacaatgagtggcgcgaattttgtggcctgcctaggctcgagaccccggccgatctgagcactgccatagcgtcgagatctgtggccgacaagattttggatctttacaaacacccggacaatattgatgtgtggttaggggggctggccgagaacttcctgcccagagccagaactggacccctgtttgcttgtctaataggaaaacagatgaaagcccttagggatggtgattggttctggtgggagaattcacatgtgttcaccgatgcccagcggagagaactggagaagcatagtctttcccgagtcatctgtgacaacaccgggctcacacgggtgccaatggatgcatttcaagtgggaaagtttccagaggactttgaatcctgcgatagcataacaggcatgaacctagaagcttggcgcgagacttttcctcaggacgacaagtgcgggttccctgagtctgtggaaaatggcgattttgtccattgtgaggaaagcggccgcagggtgttggtgtattcttgtaggcacgggtacgaattgcaggggagggagcagcttacttgcacacaggagggttgggatttccaacctcctttgtgtaaagacgttaacgaatgcgcggatggtgctcatcccccctgccacgcttccgcacggtgccgcaacaccaaggggggttttcaatgtttatgtgctgatccctacgaattgggcgacgacggcagaacctgcgtggacagtggccgactaccgagggtgacatggatcagcatgtcattggccgctctgctgatcggaggctttgccggcctcacctcaacagtgatttgcagatggaccaggaccggcacaaagagtactctacccatcagtgagactggaggggggacgccagaactccgctgtggaaaacaccaagccgtcggcacttctccccagagagcagctgcccaggatagtgagcaggagagcgcaggtatggaaggccgcgatacacaccgcctccctagagccctctag

SEQ ID NO: 82474 - DNA, 2631 bp, Artificial Sequence
  derived and/or modified sequence
atgagggccctggccgtgctgtctgtgaccctggtgatggcctgcacagaggccttcttccccttcatcagccggggcaaggagctgctgtggggcaagccagaggagagccgggtgtcctctgtgctggaggagagcaagaggctggtggacacagccatgtatgccaccatgcagaggaacctgaagaagaggggcatcctgagccctgcccagctgctgtccttcagcaagctgcctgagcccaccagcggcgtgattgcccgggctgctgagatcatggagaccagcatccaggccatgaagaggaaggtgaacctgaagacccagcagagccagcaccccacagatgccctgtctgaggacctgctgagcatcatcgccaacatgagcggctgcctgccctacatgctgccccccaagtgccccaacacctgcctggccaacaagtaccggcccatcactggagcctgcaacaacagagaccacccccgctggggcgccagcaacacagccctggcccgctggctgccccctgtgtatgaagatggcttcagccagccccggggctggaaccctggcttcctgtacaacggcttccccctgccccctgtgcgggaggtgaccaggcatgtgatccaggtgtccaatgaggtggtgacagatgatgaccgctacagcgacctgctgatggcctggggccagtacatcgaccatgacatcgccttcaccccccagagcaccagcaaggccgcctttggaggcggcgctgactgccagatgacctgtgagaaccagaacccctgcttccccatccagctgcctgaggaggcccggcctgctgctggaacagcctgcctgcccttctaccgcagcagcgctgcctgtggcaccggggaccagggcgccctgtttggaaacctgagcacagccaacccccggcagcagatgaatggcctgaccagcttcctggatgccagcacagtgtatggcagcagccctgccctggagcggcagctgaggaactggaccagcgctgagggcctgctgcgggtgcacgcccggctgcgggacagcggccgggcctacctgccctttgtgcccccccgggccccagctgcctgtgcccctgagcccggcatccctggagagacccggggcccctgcttcctggccggagatggccgggccagcgaggtgcccagcctgacagccctgcacaccctgtggctgcgggagcacaaccggctggccgccgccctgaaggccctgaatgcccactggagcgcagatgctgtgtaccaggaggccaggaaggtggtgggcgccctgcaccagatcatcaccctgcgggactacatcccccgcatcctgggccctgaggccttccagcagtatgtgggcccctatgagggctatgacagcacagccaaccccaccgtgtccaatgtgttcagcacagctgccttccgcttcggccacgccaccatccaccccctggtgcggcggctggatgccagcttccaggagcacccagacctgcccggcctgtggctgcaccaggccttcttcagcccctggaccctgctgcggggcggctacaatgagtggagggagttctgtggcctgccccggctggagaccccagctgacctgagcacagccatcgccagccgctctgtggccgacaagatcctggacctgtacaagcacccagacaacattgatgtgtggctgggcggcctggccgagaacttcctgccccgggccaggacaggccccctgtttgcctgcctgattggcaagcagatgaaggccctgagagatggagactggttctggtgggagaacagccacgtgttcacagatgcccagaggcgggagctggagaagcacagcctgagcagggtcatctgtgacaacacaggcctgaccagggtgcccatggatgccttccaggtgggcaagttcccagaagattttgagagctgtgacagcatcaccggcatgaacctggaggcctggagggagaccttcccccaggatgacaagtgtggcttccctgagagcgtggagaatggagactttgtgcactgtgaggagagcggccggcgggtgctggtgtacagctgcagacatggctatgagctgcagggccgggagcagctgacctgcacccaggagggctgggacttccagccccccctgtgcaaggatgtgaatgaatgtgctgatggagcccaccccccctgccacgccagcgcccgctgcaggaacaccaagggcggcttccagtgcctgtgtgccgacccctatgagctgggagatgatggccgcacctgtgtggacagcggccgcctgccccgggtgacctggatctccatgagcctggccgccctgctgattggaggctttgctggcctgaccagcaccgtcatctgccgctggaccaggacaggcaccaagagcaccctgcccatcagcgagaccggcggcggcaccccagagctgcgctgtgggaagcaccaggccgtgggcaccagcccccagagagctgctgcccaggacagcgagcaggagagcgctggcatggagggccgggacacccaccggctgccccgggccctgtag

SEQ ID NO: 82475 - DNA, 2631 bp, Artificial Sequence
  derived and/or modified sequence
atgcgggccctggccgtgctgagcgtgaccctggtgatggcctgcaccgaggcgtttttcccttttatctccaggggaaaagaactgctctggggcaagccagaagaaagccgggtctcttcagtgctggaggagtccaagagactggtggacaccgccatgtacgctaccatgcagagaaatctcaagaagagaggaatcctctccccagcccagctgctgtccttcagtaagctgccagaaccaactagtggggttattgctcgggctgctgagatcatggaaacaagtatacaggctatgaagcggaaggtcaaccttaaaactcagcagtcccagcaccctaccgatgcactgtccgaggatctactgtctataattgcaaatatgtctggttgtctgccttacatgttgccccccaaatgccccaacacctgcctggcaaacaaatatcggcctataaccggagcctgtaacaatagagaccatccgagatggggtgcctctaatactgccctggcccgatggttaccacccgtgtatgaggacggctttagtcagcctcggggctggaatccagggtttctttataacgggtttcctctgccccccgtgcgggaggtgactcggcacgtcatacaggtcagcaatgaagtagtgactgatgacgacagatacagtgatctcctgatggcctggggccagtacattgaccacgacattgccttcacgcctcaaagtacaagtaaggcagcatttggtggcggcgctgattgtcagatgacttgtgaaaaccagaacccctgctttcccatccagctgcccgaggaggcgcggccagccgcgggaacggcgtgtcttcctttctaccggagttctgccgcttgtgggaccggcgatcaaggagccttgttcggcaacctgtcaacagccaatcccagacagcagatgaacggcctgaccagctttttggacgcctcaactgtgtacgggagctcacctgcgttagagcgacaactacgcaattggactagcgccgaaggcctgttgcgagtacacgctcggctgagagatagtggacgagcctatttgcccttcgtaccacctagggcacctgcggcgtgcgcaccagagccagggattcctggggaaacccgagggccttgctttctcgcaggcgacggaagggccagtgaagtcccctccctaaccgccctgcacacactttggctccgtgagcacaacagacttgccgccgccctgaaggctttgaatgctcactggtcagcagacgctgtgtaccaggaggcgcggaaggtcgtgggggcccttcatcagatcatcaccctacgtgattatatccctagaatactgggcccagaggcattccaacagtatgtcgggccatatgaaggctacgacagcactgccaaccccacagtaagcaatgtattttctaccgctgcgtttcgtttcggccacgctactatccacccccttgtgaggcgcttagacgcctcatttcaggagcaccccgatctccctggcctgtggcttcaccaagcgtttttttcaccctggactctgctgagaggtggctataacgagtggagggagttctgcggtctgccccgtttagagacacctgcagatctttccaccgctattgcatcccgtagtgttgccgacaagattttggatctctacaagcaccccgacaatattgatgtatggttggggggactggctgagaatttcctgccacgcgccagaaccggaccactattcgcatgtcttattgggaaacagatgaaagctttacgcgacggagactggttttggtgggagaacagccatgtcttcacagatgcccaacgcagagaactggagaagcacagcctcagcagagtgatttgcgacaatacgggcttaacccgtgtccccatggacgcctttcaggtgggaaaatttcccgaagattttgaaagttgcgacagtataacggggatgaatttggaagcttggagagagactttcccccaggatgataagtgtggttttcctgagtccgttgaaaatggggactttgtccactgcgaagagtccgggcgccgggttctcgtttactcttgccgccacgggtatgaactgcagggcagagagcaactcacctgcacacaagaggggtgggattttcagcccccactgtgtaaggacgtgaatgagtgtgccgatggcgctcacccaccctgccatgcttctgcgagatgccgtaacacgaagggtggcttccagtgtctgtgcgccgatccctatgagctgggggacgacgggcgtacatgcgtggattcaggccggctccctcgcgtaacatggatctccatgagtctggccgctcttctgattggaggattcgctggactgacttccaccgtgatttgtaggtggacgcgaacaggcacaaaatcaactttgccaatcagtgagaccggagggggcacaccagagctgcggtgtggaaaacatcaagcagtaggcacgtccccacaaagggcggccgcccaggactctgaacaggaatcagccggcatggaggggcgtgacactcatcggctgcctcgtgccctgtag

SEQ ID NO: 82476 - DNA, 2631 bp, Artificial Sequence
  derived and/or modified sequence
atgagagcattagcggtcttgagcgttaccttggtgatggcctgcaccgaggcttttttcccattcattagccgcggtaaagagctcttgtggggaaaacccgaggagagcagagtgagttctgttttggaggagtccaaaaggcttgtggacaccgccatgtacgccactatgcagagaaatcttaagaagcgtggcatactgagccccgctcagctcctgagcttctcaaagcttccggagcctacctctggtgtgatcgccagggccgctgagattatggagacatccatacaagccatgaagaggaaagtgaaccttaagacacaacagagtcagcatcccacggacgccctgagtgaagatctgttgagcatcattgccaatatgtccggttgtctgccatacatgctcccaccgaaatgccccaacacatgcctggcaaataagtaccggccaatcaccggcgcttgcaataatagggaccaccctcgttggggcgcaagtaataccgcactagctcggtggttgccacctgtgtatgaggatggttttagccagcctaggggatggaacccaggatttctctataatgggtttcctttgccacctgtgagggaggtaacgagacacgtgatccaggtcagcaatgaggtcgtgacagatgacgataggtactcggatctgctgatggcatggggtcagtatatcgatcacgacatagccttcacacctcagagcacttccaaagcagccttcggaggcggtgcagactgccagatgacatgcgaaaaccagaatccttgctttcccatccaactcccggaggaggccagacccgctgcaggcacggcgtgtctgccgttctatagaagctccgccgcttgcggcacaggcgaccagggcgctctgtttgggaacctcagcacagcaaacccacgccaacaaatgaatggcctgacgtccttccttgacgcttctacggtatacggcagttccccggctctggagagacagctcaggaactggacctcagctgagggcttactgcgtgtgcatgctcggcttagagactcaggcagggcctatttgccatttgtcccaccgagagccccagctgcatgtgcaccggagcctgggatacccggtgaaacaaggggtccctgtttccttgcaggcgacggtcgtgcatccgaggtgcctagcctgactgcgctgcatacactctggcttagagagcacaatcgccttgccgctgcgctgaaagcactcaacgcacactggtctgctgacgccgtctaccaggaggccagaaaggtcgtgggagctctgcatcaaattattactctaagagactacatcccaaggattcttgggccagaggcctttcagcaatacgtcgggccatacgagggctacgactctaccgccaacccaaccgtgtctaatgtgttcagtacagcagcttttcgcttcgggcatgctacgatccaccccctggttagaaggctcgatgcatcctttcaagagcaccccgatctacctgggttatggctacaccaggcattcttctcaccctggacattattgcggggtgggtacaacgagtggagggaattttgcggtctcccaaggcttgaaacacccgctgacctgtcaaccgccattgccagccgttccgtggccgataagatcctggatttgtataagcaccctgataacatcgacgtttggctgggcggactggcggaaaattttctacccagagcacgtaccggtccactcttcgcatgcctgatcggcaagcagatgaaagccctcagagatggcgactggttttggtgggaaaattctcatgtatttacagacgcacagcgtcgtgagctggaaaaacactctctctccagggtaatctgtgataatacagggctgacccgagtgcccatggatgccttccaagtggggaagttccccgaagactttgagagctgtgactcaattactggcatgaacttggaggcgtggcgtgagaccttcccccaagatgacaagtgcgggtttcccgagtccgtggagaatggggactttgtccactgcgaggaaagcggcaggagggtattggtctacagctgcagacatggatatgagctgcagggaagggaacagttaacttgtacgcaagagggctgggatttccagccccctctttgtaaggacgtgaacgagtgcgccgatggggcacaccccccttgtcacgcctctgcccgatgccgcaatacaaagggaggattccaatgtctgtgtgccgatccctatgagcttggggacgacggccgtacgtgtgtcgactctggaagactgcccagggtaacttggataagtatgagtctggccgctttgctgattggagggttcgctggtcttacctcaacagtgatctgccgctggaccagaacggggaccaaaagcaccctgccgatctctgagactggtggcggtacacctgaactgcgctgcggtaagcaccaagccgtggggactagcccacagagggctgccgcacaggactccgaacaggaaagcgccggtatggaaggaagagacacacatagacttcctcgcgcactgtag

SEQ ID NO: 82477 - DNA, 2956 bp, Artificial Sequence
  derived and/or modified sequence
catttcagaagagttacagccgtgaaaattactcagcagtgcagttggctgagaagaggaaaaaaggtcagaatgagagcgctcgctgtgctgtctgtcacgctggttatggcctgcacagaagccttcttccccttcatctcgagagggaaagaactcctttggggaaagcctgaggagtctcgtgtctctagcgtcttggaggaaagcaagcgcctggtggacaccgccatgtacgccacgatgcagagaaacctcaagaaaagaggaatcctttctccagctcagcttctgtctttttccaaacttcctgagccaacaagcggagtgattgcccgagcagcagagataatggaaacatcaatacaagcgatgaaaagaaaagtcaacctgaaaactcaacaatcacagcatccaacggatgctttatcagaagatctgctgagcatcattgcaaacatgtctggatgtctcccttacatgctgcccccaaaatgcccaaacacttgcctggcgaacaaatacaggcccatcacaggagcttgcaacaacagagaccaccccagatggggcgcctccaacacggccctggcacgatggctccctccagtctatgaggacggcttcagtcagccccgaggctggaaccccggcttcttgtacaacgggttcccactgcccccggtccgggaggtgacaagacatgtcattcaagtttcaaatgaggttgtcacagatgatgaccgctattctgacctcctgatggcatggggacaatacatcgaccacgacatcgcgttcacaccacagagcaccagcaaagctgccttcgggggaggggctgactgccagatgacttgtgagaaccaaaacccatgttttcccatacaactcccggaggaggcccggccggccgcgggcaccgcctgtctgcccttctaccgctcttcggccgcctgcggcaccggggaccaaggcgcgctctttgggaacctgtccacggccaacccgcggcagcagatgaacgggttgacctcgttcctggacgcgtccaccgtgtatggcagctccccggccctagagaggcagctgcggaactggaccagtgccgaagggctgctccgcgtccacgcgcgcctccgggactccggccgcgcctacctgcccttcgtgccgccacgcgcgcctgcggcctgtgcgcccgagcccggcatccccggagagacccgcgggccctgcttcctggccggagacggccgcgccagcgaggtcccctccctgacggcactgcacacgctgtggctgcgcgagcacaaccgcctggccgcggcgctcaaggccctcaatgcgcactggagcgcggacgccgtgtaccaggaggcgcgcaaggtcgtgggcgctctgcaccagatcatcaccctgagggattacatccccaggatcctgggacccgaggccttccagcagtacgtgggtccctatgaaggctatgactccaccgccaaccccactgtgtccaacgtgttctccacagccgccttccgcttcggccatgccacgatccacccgctggtgaggaggctggacgccagcttccaggagcaccccgacctgcccgggctgtggctgcaccaggctttcttcagcccatggacattactccgtggaggttacaatgagtggagggagttctgcggcctgcctcgcctggagacccccgctgacctgagcacagccatcgccagcaggagcgtggccgacaagatcctggacttgtacaagcatcctgacaacatcgatgtctggctgggaggcttagctgaaaacttcctccccagggctcggacagggcccctgtttgcctgtctcattgggaagcagatgaaggctctgcgggacggtgactggttttggtgggagaacagccacgtcttcacggatgcacagaggcgtgagctggagaagcactccctgtctcgggtcatctgtgacaacactggcctcaccagggtgcccatggatgccttccaagtcggcaaattccccgaagactttgagtcttgtgacagcatcactggcatgaacctggaggcctggagggaaacctttcctcaagacgacaagtgtggcttcccagagagcgtggagaatggggactttgtgcactgtgaggagtctgggaggcgcgtgctggtgtattcctgccggcacgggtatgagctccaaggccgggagcagctcacttgcacccaggaaggatgggatttccagcctcccctctgcaaagatgtgaacgagtgtgcagacggtgcccaccccccctgccacgcctctgcgaggtgcagaaacaccaaaggcggcttccagtgtctctgcgcggacccctacgagttaggagacgatgggagaacctgcgtagactccgggaggctccctcgggtgacttggatctccatgtcgctggctgctctgctgatcggaggcttcgcaggtctcacctcgacggtgatttgcaggtggacacgcactggcactaaatccacactgcccatctcggagacaggcggaggaactcccgagctgagatgcggaaagcaccaggccgtagggacctcaccgcagcgggccgcagctcaggactcggagcaggagagtgctgggatggaaggccgggatactcacaggctgccgagagccctctgagggcaaagtggcaggacactgcagaacagcttcatgttcccaaaatcaccgtacgactcttttccaaacacaggcaaatccgaaatcagcaggacgactgttttcccaacacgggtaaatctagtaccatgtcgtagttactctcaggcatggatgaataaatgttatagctgcatttgtctggccttttcttgtaaacattgcctgatttgttccttctggggctttgccattaaaatgtatttacagatta

SEQ ID NO: 82478 - protein, 909 aa, Artificial Sequence
  derived and/or modified sequence
MNAYLTKQHSCSRGSDGMDAVRSAPTLIRDAHCACGWQRNCQGLGYSSQTMPSSGPGGPASNRTGGSSFNRTLWDSVRKSPHKTSTKGKGTCGEHCTCPHGWFSPAQASPAPIIVNTDTLDTIPYVNGTEIEYEFEEITLERGNSGLGFSIAGGTDNPHIGDDPGIFITKIIPGGAAAEDGRLRVNDCILRVNEVDVSEVSHSKAVEALKEAGSIVRLYVRRRRPILETVVEIKLFKGPKGLGFSIAGGVGNQHIPGDNSIYVTKIIDGGAAQKDGRLQVGDRLLMVNNYSLEEVTHEEAVAILKNTSEVVYLKVGKPTTIYMTDPYGPPDITHSYSPPMENHLLSGNNGTLEYKTSLPPISPGRYSPIPKHMLVDDDYTRPPEPVYSTVNKLCDKPASPRHYSPVECDKSFLLSAPYSHYHLGLLPDSEMTSHSQHSTATRQPSMTLQRAVSLEGEPRKVVLHKGSTGLGFNIVGGEDGEGIFVSFILAGGPADLSGELQRGDQILSVNGIDLRGASHEQAAAALKGAGQTVTIIAQYQPEDYARFEAKIHDLREQMMNHSMSSGSGSLRTNQKRSLYVRAMFDYDKSKDSGLPSQGLSFKYGDILHVINASDDEWWQARRVMLEGDSEEMGVIPSKRRVERKERARLKTVKFNAKPGVIDSKGSFNDKRKKSFIFSRKFPFYKNKEQSEQETSDPERGQEDLILSYEPVTRQEINYTRPVIILGPMKDRINDDLISEFPDKFGSCVPHTTRPKRDYEVDGRDYHFVISREQMEKDIQEHKFIEAGQYNDNLYGTSVQSVRFVAERGKHCILDVSGNAIKRLQVAQLYPIAIFIKPRSLEPLMEMNKRLTEEQAKKTYDRAIKLEQEFGEYFTAIVQGDTLEDIYNQCKLVIEEQSGPFIWIPSKEKL

SEQ ID NO: 82479 - DNA, 2730 bp, Artificial Sequence
  derived and/or modified sequence
atgaacgcttatctcacgaagcagcattcatgcagcagggggtcagacgggatggatgcagtcaggtctgcccctactctgatcagagatgcacattgtgcgtgtggttggcaaagaaactgtcagggcctgggatacagttcacagacaatgcccagttccggccccgggggcccagcctccaacagaacaggaggctcctccttcaaccgcaccctctgggactccgtacgcaagtcgccccacaaaaccagtactaaggggaaaggtacatgtggagagcactgcacttgcccacacggatggtttagtccagcccaagcctccccagctcccatcatcgtcaacacggatactctggacaccatcccgtatgtgaacggaactgagatcgaatacgagtttgaggagatcaccctggaacgggggaacagcggactggggttcagcatagctggaggaacagacaatccacatataggcgatgaccccggcatctttatcactaagatcatacctggcggcgctgcagctgaggatggccgccttcgggtgaatgactgtatcctgagggtcaatgaggtcgatgtgtccgaagtcagccacagcaaggccgtggaagccctcaaagaagcgggaagtatagtaaggctatatgtccgacggcgcaggcctatcctggagaccgtggtggagattaagctctttaaaggtccaaagggtctgggcttttcaatcgcgggcggggtaggaaatcagcacattccaggggataattccatttacgtgacaaaaattatagacggcggagctgctcagaaggacggcaggttgcaggtgggggacagactgctcatggtaaataactactctctggaagaggttacccacgaagaggcagtggctatcctaaagaatacctcagaagttgtgtatctcaaagtaggtaagcccaccaccatctatatgactgatccttatggtccccccgacataactcactcctacagcccccccatggaaaaccatttactctcgggcaacaacgggactctcgaatacaaaactagtctgcctcccatttcaccgggcaggtacagcccgattcccaagcatatgctcgttgatgacgattatactcgccccccagaacctgtgtactcaacagtcaacaaactttgtgacaaacctgccagccctcggcactacagtccagttgagtgtgataagagtttcctgctttccgctccatacagccattaccatctggggctcctgcctgattccgagatgacttcacattcccagcattccaccgctacacggcagccctcaatgacccttcagcgtgctgtgagccttgaaggtgaaccaaggaaggtagtcctgcataaaggtagtacaggcctgggatttaatattgtcggaggggaggacggagagggaatcttcgtgagctttatcttagccggcggtcccgcggacctgagcggggagctgcaacgaggggatcagatcttatcagtcaatggcatagatctcagaggagcatcccatgaacaagctgccgccgcgctgaaaggggccggacaaaccgtgaccattatcgcacagtatcaaccggaggactatgccaggtttgaagccaaaattcacgaccttagggaacagatgatgaatcattccatgtctagcggttccggctcattgagaaccaaccagaagaggtctctgtatgtgcgagctatgttcgactacgacaaatcgaaagacagcggtctgccctctcaggggctgtccttcaagtacggagacatcctgcacgtgatcaatgcctcagatgacgagtggtggcaggctcgaagagtgatgctggagggggacagcgaggagatgggtgtaatccctagtaagaggcgggttgagcgcaaggagcgagccagacttaagaccgtgaagttcaacgcaaaaccgggcgttatagacagcaaaggtagctttaatgataagcgcaagaaaagttttatttttagtcgtaagttccccttctacaagaacaaagagcagagcgagcaggaaacctcagacccagagagagggcaagaggacctgatactgtcgtacgaacctgtgaccaggcaggaaataaattacactaggcccgtgataatcctggggccgatgaaagatcgcattaatgatgatcttatttccgagttcccggataagtttggatcgtgtgttcctcataccacaaggccaaagcgggactacgaagtggacgggcgagactatcactttgttatttctcgggaacagatggaaaaagacattcaggagcacaaatttatagaggccggacagtataacgacaacctgtacggcacaagtgttcagagcgtacggtttgtggcggaacgcggtaaacactgcatactggacgtgtccggcaacgcaattaagagattacaggtagctcagttatatcctattgccatttttatcaaaccccggtcactcgaaccactgatggaaatgaacaagcgtctgacagaggaacaggccaaaaagacatatgacagggccataaagctcgaacaagaatttggcgaatatttcaccgctatcgtgcagggggacactctggaggacatttacaatcagtgtaaactggtgattgaggaacaaagtggtccctttatatggatcccgtcaaaggagaaactatag

SEQ ID NO: 82480 - DNA, 2730 bp, Artificial Sequence
  derived and/or modified sequence
atgaatgcctacctgaccaagcagcacagctgcagccggggcagtgatggcatggatgctgtgcgcagcgcccccaccctcatcagagatgcccactgtgcctgtggctggcagaggaactgccagggcctgggctacagcagccagaccatgcccagcagcggccctgggggccctgccagcaacagaactggaggcagcagcttcaacagaaccctgtgggacagcgtgaggaagagcccccacaagaccagcaccaagggcaagggcacctgtggggagcactgcacctgcccccacggctggttctccccagcccaggccagccctgcccccatcatcgtgaacacagacaccctggacaccatcccctacgtgaatggaacagaaattgaatatgaatttgaggagatcaccctggagcggggcaacagcggcctgggcttcagcattgctgggggcacagacaacccccacatcggagatgaccccggcatcttcatcaccaagatcatccctggaggagctgctgctgaagatggccgcctgcgggtgaatgactgcatcctgcgggtgaatgaggtggatgtgtctgaggtgagccacagcaaggctgtggaggccctgaaggaggccggcagcatcgtgcggctgtatgtgagaagaagaagacccatcctggagaccgtggtggagatcaagctgttcaagggccccaagggcctgggcttcagcattgctggaggagtgggcaaccagcacatccctggggacaacagcatctacgtgaccaagatcattgatggaggagctgcccagaaggatggccgcctgcaggtgggggaccggctgctgatggtgaacaactacagcctggaggaggtgacccatgaggaggccgtggccatcctgaagaacaccagcgaggtggtgtacctgaaggtgggcaagcccaccaccatctacatgacagacccctacggccccccagacatcacccacagctacagcccccccatggagaaccacctgctgagcggcaacaacggcaccctggagtacaagaccagcctgccccccatcagccctggccgctacagccccatccccaagcacatgctggtggatgatgactacacccggcccccagagcctgtgtacagcacagtgaacaagctgtgtgacaagccagccagccccaggcactacagccctgtggagtgtgacaagagcttcctgctgagcgccccctacagccactaccacctgggcctgctgcctgattctgagatgaccagccacagccagcacagcacagccacccggcagcccagcatgaccctgcagagagctgtgtccctggagggggagcccaggaaggtggtgctgcacaagggcagcacaggcctgggcttcaacatcgtgggcggggaggatggagagggcatctttgtgtccttcatcctggccggcggccctgctgacctgtctggagagctgcagagaggagaccagatcctgtctgtgaatggcatcgacctgcggggggccagccatgagcaggccgccgccgccctgaagggagctggccagacagtgaccatcatcgcccagtaccagcctgaggactatgccaggtttgaggccaagatccatgacctgcgggagcagatgatgaaccacagcatgagcagcggcagcggcagcctgcggaccaaccagaagaggagcctgtatgtgcgggccatgtttgattatgacaagagcaaggacagcggcctgcccagccagggcctgtccttcaagtatggagacatcctgcacgtgatcaatgccagtgatgatgagtggtggcaggccaggagagtgatgctggagggggacagcgaggagatgggcgtcatccccagcaagagaagagtggagaggaaggagcgggcccggctgaagacagtgaagttcaatgccaagccaggagtgattgacagcaagggcagcttcaatgacaagaggaagaagagcttcatcttcagcaggaagttccccttctacaagaacaaggagcagagcgagcaggagaccagtgaccctgagcggggccaggaggacctgatcctgtcctatgagcctgtgacccggcaggagatcaactacaccaggcctgtgatcatcctgggccccatgaaggaccgcatcaatgatgacctgatcagcgagttcccagacaagtttggcagctgtgtgccccacaccacccggcccaagagggactatgaggtggatggccgggactaccactttgtgatcagccgggagcagatggagaaggacatccaggagcacaagttcatcgaggccggccagtacaatgacaacctgtatggcacctctgtgcagagcgtgcgctttgtggccgagcggggcaagcactgcatcctggatgtgtctggaaatgccatcaagaggctgcaggtggcccagctgtaccccatcgccatcttcatcaagcccaggagcctggagcccctgatggagatgaacaagaggctgacagaggagcaggccaagaagacctatgaccgggccatcaagctggagcaggagtttggagagtacttcaccgccatcgtgcagggcgacaccctggaggacatctacaaccagtgcaagctggtgattgaggagcagagcggccccttcatctggatccccagcaaggagaagctgtag

SEQ ID NO: 82481 - DNA, 2730 bp, Artificial Sequence
  derived and/or modified sequence
atgaacgcctacctgaccaagcagcacagctgcagccggggcagcgacgggatggacgccgtaagatccgctcctacactcattcgagacgcccattgcgcctgcggttggcagcgcaactgtcagggactgggctattcctcacaaaccatgccttcctctgggcccggcgggccagcctcaaaccgtaccgggggatcctcttttaataggaccctgtgggacagtgtccgcaaatctccccacaagacaagcaccaagggcaaggggacgtgcggggagcactgtacttgcccacacggctggttttccccagcacaagcatcaccagctcccatcattgttaatacagacaccctcgatacaataccctacgttaatggaactgaaatcgagtacgagttcgaggaaattaccttggagcgcggaaactcgggcctgggcttctcgatcgctggcgggactgataacccccacataggagatgatcccgggattttcattactaagatcatccctgggggcgcggctgctgaggacggccgcttgagagtgaatgactgcatcctccgcgtgaacgaggttgatgtgagcgaagtatcacattctaaagccgtggaggccctgaaagaagcagggtcgatcgtgcgactctacgtccgcagaagaagacccattcttgaaacagtcgtagaaatcaagctgttcaagggtcctaagggacttggattcagcattgccggcggcgttggtaatcaacatatccccggggataacagcatctacgtgacgaaaattatcgatggaggggcggcacagaaggacggccgcctacaggtgggggaccggctgctgatggtaaacaactatagcctggaagaggtgacacacgaggaagctgttgccatactgaagaacacctccgaagtggtgtatctcaaagttggaaagccaactaccatctatatgactgatccttacgggccacctgacatcacacacagttattctcccccgatggaaaatcacctcttgtccgggaataacggcaccctggagtataagaccagcctcccaccaatctcccccgggagatactcacctatccctaagcatatgttggtggatgatgattatactaggccacctgagcctgtgtacagcacagtaaataagctgtgtgacaaacctgcatcacccaggcactatagtcccgtcgagtgtgacaaatctttcctgttgagcgctccttactctcactaccacctggggcttttgccagactcggaaatgacatctcacagtcaacacagcacggccacacggcagccaagcatgaccctgcagagggctgtgtcactggagggggagcctaggaaggttgtccttcacaagggctcgaccggcttaggttttaatatcgtcgggggagaagatggcgagggcatcttcgtgagtttcattctcgctggaggacctgcggacctatctggagagctgcaacgaggagatcagatcctctcagtgaatggcatcgatctccgcggtgcctcccatgagcaagcggctgcagccctcaaaggggcggggcagacggtgaccatcattgcccagtatcagccggaagattacgcacggttcgaggccaagatccacgacctcagagagcaaatgatgaatcattcaatgagctccggtagcgggtctctgcgcactaaccaaaagcgcagcctgtatgtgagagcaatgttcgattatgacaagagcaaagattctggcctcccatcccagggcctgagcttcaaatatggtgatattctacacgttattaatgcttcagacgacgaatggtggcaagctagaagagtgatgctcgaaggtgactcagaagaaatgggggtgattccctcgaagaggagagtagaaaggaaagagcgggcaagactgaagactgtcaagtttaacgcaaaacctggggtgattgacagcaaggggtcctttaacgataagcgaaagaagtcattcatattctcgcgcaaattcccattctataagaataaggagcagtcagaacaggagacctctgaccctgaacgtggacaagaggatcttatacttagctacgagcctgttactcgccaggagatcaactatacccgacccgtgataatcctggggcccatgaaggatcgaataaacgatgaccttatctcggaattccccgataagttcggatcgtgtgtgccacacaccacaaggcctaagagggactacgaagtcgacggtagagactaccactttgtgatatctcgtgaacagatggagaaagatatccaggaacataagttcatcgaagccgggcagtacaatgataatctctacggcacctcggtacagtcagttcgattcgtcgcggagagaggcaaacattgcatactagatgtaagtggcaatgcaattaaacgactgcaagtcgcgcagctttatcccattgccatctttattaagccacgctctttggagcctctgatggagatgaacaagaggctgactgaggagcaagccaaaaaaacttacgaccgcgccataaagctggaacaagaattcggagaatacttcactgctatagttcagggggatactcttgaggacatctacaaccagtgcaagctggttatcgaggagcagtcagggcctttcatttggataccaagcaaggagaagctgtag

SEQ ID NO: 82482 - DNA, 2730 bp, Artificial Sequence
  derived and/or modified sequence
atgaatgcctacctgaccaagcagcactcctgctcacgaggctctgatggaatggatgcagtccgaagtgcacccactctaattcgtgatgctcattgcgcttgcggctggcagcgtaattgtcaaggcctcggatattcttctcagaccatgccttcttcggggcctggtggacctgccagtaatcgcacaggaggctcctcattcaacagaaccctgtgggactctgttcggaaatctccccacaagacgtccaccaaggggaaagggacctgcggtgaacattgcacctgtccacatggttggttctcacctgcacaggcttctcctgcccctatcattgttaatacagataccctggataccattccttatgtgaatggaacagaaattgaatatgaatttgaggaaatcacccttgaacgtggaaatagtggccttggattttcgattgccggaggcactgacaatcctcatatcggagatgatcctggtatctttataacaaagatcatacccggaggagccgcagccgaagacggcagactacgtgttaacgattgtattctgagagtcaacgaagtcgatgtctcagaagtctcccatagcaaggccgtcgaggctctgaaggaagccggatccattgtccggctctacgtgaggagacggagaccaattctggagacggtggtggagatcaagctgttcaaaggtcctaaggggctcggctttagcatcgccggaggagtgggaaaccaacacattccaggcgacaattccatctacgtaaccaaaatcatcgatgggggtgcagcccagaaagacggacggctgcaggtgggcgacagactactcatggtcaataattactctctggaagaggtgacccacgaagaagccgttgctatcctcaaaaatacttccgaggtcgtatatctgaaggtcggaaaacctaccaccatttatatgacggatccttatggtcctcctgatatcacacattcttattcgcccccaatggagaaccatttgctcagcggaaataacgggaccctggaatataagactagcctcccacctatctcgcccggaagatattcccccatccctaaacacatgctcgtggatgatgattacactcggccacccgaacctgtttattctactgtgaacaagttatgcgataagcccgctagtcccagacattacagtcctgtagaatgcgacaagagctttcttttaagcgctccttacagccactaccaccttggcttgctgccggattctgagatgaccagtcacagtcagcattctaccgcaacgaggcaaccctcaatgacgctgcagcgcgctgtgtcactggagggagagcccagaaaggtggtgctccacaagggctctactgggcttggctttaatatcgtggggggtgaggacggcgaggggatatttgttagctttatcctggcaggagggccagctgacctgagcggcgagctccagagaggtgatcagatactctccgtcaatggtatcgacctccggggagcttcacatgaacaggcagcggcagcccttaaaggcgctggccagactgtgaccatcatcgcacagtaccagcccgaggattacgccagatttgaggcaaagatccacgacttgagggaacagatgatgaaccacagcatgtcctctggttctggttccctgaggactaatcagaagcgaagcctttacgtgagagcaatgtttgattatgacaaatcaaaggattccggcctcccgtctcaagggctgtctttcaaatacggagatattctgcacgtgattaatgcgtctgacgatgagtggtggcaggctagaagggtcatgcttgaaggtgattcagaagagatgggggtgatacccagcaaaagacgcgtggagcgaaaagagcgcgctcggttgaaaaccgtgaagttcaatgccaagcctggcgttatcgacagtaaaggaagctttaatgacaaaaggaagaagtctttcatcttctcccgcaagtttccattttataagaataaggagcagtctgaacaggagactagcgacccagagcgtggacaagaggacttgatcctatcttatgaacccgtaaccagacaggaaatcaattatacccgtcctgtaataatccttggtcctatgaaagatcgaatcaatgatgacctgatcagcgaattccctgacaagttcggttcttgcgtgccacatacaacaagaccaaagcgcgattacgaagtggacggtcgcgactaccattttgtgattagtcgggagcaaatggagaaagatattcaggaacacaaatttatcgaggcgggacagtataatgacaatttgtatggtacctctgtccagtctgttagattcgtagccgaacggggaaaacattgtattttggacgtgagtggcaatgctatcaagagacttcaagttgcacaactctaccctatcgccatttttattaagcccaggagcctggaacccctgatggagatgaacaaaaggttgactgaggagcaggcgaaaaagacatatgatcgggcaatcaagctcgagcaggaattcggtgagtattttacagcaatcgtgcagggtgacactctcgaagatatctataaccagtgtaaactagtcattgaagaacaaagtggaccctttatctggattccgtcaaaggagaaactatag

SEQ ID NO: 82483 - DNA, 2730 bp, Artificial Sequence
  derived and/or modified sequence
atgaacgcctacctgaccaagcagcacagctgcagcagaggcagcgacggcatggacgccgtgagaagcgcccccaccctgatcagagacgcccactgcgcctgcggctggcagagaaactgccagggcctgggctacagcagccagaccatgcccagcagcggccccggcggccccgccagcaacagaaccggcggcagcagcttcaacagaaccctgtgggacagcgtgagaaagagcccccacaagaccagcaccaagggcaagggcacctgcggcgagcactgcacctgcccccacggctggttcagccccgcccaggccagccccgcccccatcatcgtgaacaccgacaccctggacaccatcccctacgtgaacggcaccgagatcgagtacgagttcgaggagatcaccctggagagaggcaacagcggcctgggcttcagcatcgccggcggcaccgacaacccccacatcggcgacgaccccggcatcttcatcaccaagatcatccccggcggcgccgccgccgaggacggcagactgagagtgaacgactgcatcctgagagtgaacgaggtggacgtgagcgaggtgagccacagcaaggccgtggaggccctgaaggaggccggcagcatcgtgagactgtacgtgagaagaagaagacccatcctggagaccgtggtggagatcaagctgttcaagggccccaagggcctgggcttcagcatcgccggcggcgtgggcaaccagcacatccccggcgacaacagcatctacgtgaccaagatcatcgacggcggcgccgcccagaaggacggcagactgcaggtgggcgacagactgctgatggtgaacaactacagcctggaggaggtgacccacgaggaggccgtggccatcctgaagaacaccagcgaggtggtgtacctgaaggtgggcaagcccaccaccatctacatgaccgacccctacggcccccccgacatcacccacagctacagcccccccatggagaaccacctgctgagcggcaacaacggcaccctggagtacaagaccagcctgccccccatcagccccggcagatacagccccatccccaagcacatgctggtggacgacgactacaccagaccccccgagcccgtgtacagcaccgtgaacaagctgtgcgacaagcccgccagccccagacactacagccccgtggagtgcgacaagagcttcctgctgagcgccccctacagccactaccacctgggcctgctgcccgacagcgagatgaccagccacagccagcacagcaccgccaccagacagcccagcatgaccctgcagagagccgtgagcctggagggcgagcccagaaaggtggtgctgcacaagggcagcaccggcctgggcttcaacatcgtgggcggcgaggacggcgagggcatcttcgtgagcttcatcctggccggcggccccgccgacctgagcggcgagctgcagagaggcgaccagatcctgagcgtgaacggcatcgacctgagaggcgccagccacgagcaggccgccgccgccctgaagggcgccggccagaccgtgaccatcatcgcccagtaccagcccgaggactacgccagattcgaggccaagatccacgacctgagagagcagatgatgaaccacagcatgagcagcggcagcggcagcctgagaaccaaccagaagagaagcctgtacgtgagagccatgttcgactacgacaagagcaaggacagcggcctgcccagccagggcctgagcttcaagtacggcgacatcctgcacgtgatcaacgccagcgacgacgagtggtggcaggccagaagagtgatgctggagggcgacagcgaggagatgggcgtgatccccagcaagagaagagtggagagaaaggagagagccagactgaagaccgtgaagttcaacgccaagcccggcgtgatcgacagcaagggcagcttcaacgacaagagaaagaagagcttcatcttcagcagaaagttccccttctacaagaacaaggagcagagcgagcaggagaccagcgaccccgagagaggccaggaggacctgatcctgagctacgagcccgtgaccagacaggagatcaactacaccagacccgtgatcatcctgggccccatgaaggacagaatcaacgacgacctgatcagcgagttccccgacaagttcggcagctgcgtgccccacaccaccagacccaagagagactacgaggtggacggcagagactaccacttcgtgatcagcagagagcagatggagaaggacatccaggagcacaagttcatcgaggccggccagtacaacgacaacctgtacggcaccagcgtgcagagcgtgagattcgtggccgagagaggcaagcactgcatcctggacgtgagcggcaacgccatcaagagactgcaggtggcccagctgtaccccatcgccatcttcatcaagcccagaagcctggagcccctgatggagatgaacaagagactgaccgaggagcaggccaagaagacctacgacagagccatcaagctggagcaggagttcggcgagtacttcaccgccatcgtgcagggcgacaccctggaggacatctacaaccagtgcaagctggtgatcgaggagcagagcggccccttcatctggatccccagcaaggagaagctgtag

SEQ ID NO: 82484 - DNA, 3482 bp, Artificial Sequence
  derived and/or modified sequence
atgaatgcatacctcaccaagcaacacagctgcagccgggggtccgatgggatggatgccgtcaggagtgcgcccaccctgatcagggatgcccactgtgcttgtggctggcagaggaactgtcaggggctcgggtacagttctcagaccatgccctcctcaggaccagggggcccagcttcaaacaggaccggggggtccagcttcaacaggaccttgtgggacagtgtgcggaaaagcccccacaagacgagcaccaagggcaaagggacttgtggggagcattgtacctgcccacatggttggttcagcccagcacaggccagtcctgctcctataattgtcaacacagatactttggacacaattccttatgtcaatgggacagaaattgaatatgaatttgaagaaattacactggagagggggaattctggcctgggattcagtattgctggggggacagataatccccacattggagatgaccctggcatatttattacgaagattataccaggaggtgctgcagcagaggatggcagactcagggtcaatgattgtatcttgcgggtgaatgaggttgatgtgtcagaggtttcccacagtaaagcggtggaagccctgaaggaagcagggtctatcgttcggctgtatgtgcgtagaagacgacctattttggagaccgttgtggaaatcaaactgttcaaaggccctaaaggtttaggcttcagtattgcaggaggtgtggggaaccaacacattcctggagacaacagcatttatgtaactaaaattatagatggaggagctgcacaaaaagatggaaggttgcaagtaggagatagactactaatggtaaacaactacagtttagaagaagtaacacacgaagaggcagtagcaatattaaagaacacatcagaggtagtttatttaaaagttggcaaacccactaccatttatatgactgatccttatggtccacctgatattactcactcttattctccaccaatggaaaaccatctactctctggcaacaatggcactttagaatataaaacctccctgccacccatctctccaggaaggtactcaccaattccaaagcacatgcttgttgacgacgactacaccaggcctccggaacctgtttacagcactgtgaacaaactatgtgataagcctgcttctcccaggcactattcccctgttgagtgtgacaaaagcttcctcctctcagctccctattcccactaccacctaggcctgctacctgactctgagatgaccagtcattcccaacatagcaccgcaactcgtcagccttcaatgactctccaacgggccgtctccctggaaggagagcctcgcaaggtagtcctgcacaaaggctccactggcctgggcttcaacattgtcggtggggaagatggagaaggtatttttgtgtccttcattctggctggtggaccagcagacctaagtggggagctccagagaggagaccagatcctatcggtgaatggcattgacctccgtggtgcatcccacgagcaggcagctgctgcactaaagggggctggacagacagtgacgattatagcacaatatcaacctgaagattacgctcgatttgaggccaaaatccatgacctacgagagcagatgatgaaccacagcatgagctccgggtccggatccctgcgaaccaatcagaaacgctccctctacgtcagagccatgttcgactacgacaagagcaaggacagtgggctgccaagtcaaggacttagttttaaatatggagatattctccacgttatcaatgcctctgatgatgagtggtggcaagccaggagagtcatgctggagggagacagtgaggagatgggggtcatccccagcaaaaggagggtggaaagaaaggaacgtgcccgattgaagacagtgaagtttaatgccaaacctggagtgattgattcgaaagggtcattcaatgacaagcgtaaaaagagcttcatcttttcacgaaaattcccattctacaagaacaaggagcagagtgagcaggaaaccagtgatcctgaacgaggacaagaagacctcattctttcctatgagcctgttacaaggcaggaaataaactacacccggccggtgattatcctggggcccatgaaggatcggatcaatgacgacttgatatctgaattccctgataaatttggctcctgtgtgcctcatactacgaggccaaagcgagactacgaggtggatggcagagactatcactttgtcatttccagagaacaaatggagaaagatatccaagagcacaagtttatagaagccggccagtacaatgacaatttatatggaaccagtgtgcagtctgtgagatttgtagcagaaagaggcaaacactgtatacttgatgtatcaggaaatgctatcaagcggttacaagttgcccagctctatcccattgccatcttcataaaacccaggtctctggaacctcttatggagatgaataagcgtctaacagaggaacaagccaagaaaacctatgatcgagcaattaagctagaacaagaatttggagaatattttacagctattgtccaaggagatactttagaagatatatataaccaatgcaagcttgttattgaagagcaatctgggcctttcatctggattccctcaaaggaaaagttataaattagctactgcgcctctgacaacgacagaagagcatttagaagaacaaaatatatataacatactacttggaggcttttatgtttttgttgcatttatgtttttgcagtcaatgtgaattcttacgaatgtacaacacaaactgtatgaagccatgaaggaaacagaggggccaaagggtgggacagaaaagacattgcagtatgaaggaaggctttggtttgctcaaagtgccaggtgtagggatgaacctctgacgggctttctgcccaagagatgagatgagagcctcctcaccccagcagatgtccagagctgatttagctgcagagctctctgtgtcttttgctttaaagaaaaattgccagcactcgaacctcatcagccttcccattacccacatctgtaattggtacactttgaattttataactatgcacatcttttgatttcttaacaagcaaatgaaagaaagaaggaaaaaagaaaggaatccctttggagatgacatactatcagggaaggataagtgtgtagttttttgactggcatctgcaaagacaagaatttcataaaatttgcaagtgtatggaggactaacctcactgacaggaggggattccacctgggattagctttatgattgttgattgcctattttgccatttataaactgaaagaaggcactaaagatgagaataatttatacaataaaaatatattaaatgtatagaaacaaatttctataggtt

SEQ ID NO: 82485 - protein, 532 aa, Artificial Sequence
  derived and/or modified sequence
MERDSHGNASPARTPSAGASPAQASPAGTPPGRASPAQASPAQASPAGTPPGRASPAQASPAGTPPGRASPGRASPAQASPAQASPARASPALASLSRSSSGRSSSARSASVTTSPTRVYLVRATPVGAVPIRSSPARSAPATRATRESPVQFWQGHTGIRYKEQRESCPKHAVRCDGVVDCKLKSDELGCVRFDWDKSLLKIYSGSSHQWLPICSSNWNDSYSEKTCQQLGFESAHRTTEVAHRDFANSFSILRYNSTIQESLHRSECPSQRYISLQCSHCGLRAMTGRIVGGALASDSKWPWQVSLHFGTTHICGGTLIDAQWVLTAAHCFFVTREKVLEGWKVYAGTSNLHQLPEAASIAEIIINSNYTDEEDDYDIALMRLSKPLTLSAHIHPACLPMHGQTFSLNETCWITGFGKTRETDDKTSPFLREVQVNLIDFKKCNDYLVYDSYLTPRMMCAGDLRGGRDSCQGDSGGPLVCEQNNRWYLAGVTSWGTGCGQRNKPGVYTKVTEVLPWIYSKMESEVRFRKS

SEQ ID NO: 82486 - DNA, 1599 bp, Artificial Sequence
  derived and/or modified sequence
atggagagagacagccacggcaacgccagccccgccagaacccccagcgccggcgccagccccgcccaggccagccccgccggcaccccccccggcagagccagccccgcccaggccagccccgcccaggccagccccgccggcaccccccccggcagagccagccccgcccaggccagccccgccggcaccccccccggcagagccagccccggcagagccagccccgcccaggccagccccgcccaggccagccccgccagagccagccccgccctggccagcctgagcagaagcagcagcggcagaagcagcagcgccagaagcgccagcgtgaccaccagccccaccagagtgtacctggtgagagccacccccgtgggcgccgtgcccatcagaagcagccccgccagaagcgcccccgccaccagagccaccagagagagccccgtgcagttctggcagggccacaccggcatcagatacaaggagcagagagagagctgccccaagcacgccgtgagatgcgacggcgtggtggactgcaagctgaagagcgacgagctgggctgcgtgagattcgactgggacaagagcctgctgaagatctacagcggcagcagccaccagtggctgcccatctgcagcagcaactggaacgacagctacagcgagaagacctgccagcagctgggcttcgagagcgcccacagaaccaccgaggtggcccacagagacttcgccaacagcttcagcatcctgagatacaacagcaccatccaggagagcctgcacagaagcgagtgccccagccagagatacatcagcctgcagtgcagccactgcggcctgagagccatgaccggcagaatcgtgggcggcgccctggccagcgacagcaagtggccctggcaggtgagcctgcacttcggcaccacccacatctgcggcggcaccctgatcgacgcccagtgggtgctgaccgccgcccactgcttcttcgtgaccagagagaaggtgctggagggctggaaggtgtacgccggcaccagcaacctgcaccagctgcccgaggccgccagcatcgccgagatcatcatcaacagcaactacaccgacgaggaggacgactacgacatcgccctgatgagactgagcaagcccctgaccctgagcgcccacatccaccccgcctgcctgcccatgcacggccagaccttcagcctgaacgagacctgctggatcaccggcttcggcaagaccagagagaccgacgacaagaccagccccttcctgagagaggtgcaggtgaacctgatcgacttcaagaagtgcaacgactacctggtgtacgacagctacctgacccccagaatgatgtgcgccggcgacctgagaggcggcagagacagctgccagggcgacagcggcggccccctggtgtgcgagcagaacaacagatggtacctggccggcgtgaccagctggggcaccggctgcggccagagaaacaagcccggcgtgtacaccaaggtgaccgaggtgctgccctggatctacagcaagatggagagcgaggtgagattcagaaagagctag

SEQ ID NO: 82487 - DNA, 1599 bp, Artificial Sequence
  derived and/or modified sequence
atggaacgggacagtcatggcaatgcaagccccgcccggactccatccgccggagcatctccagctcaggcgtcacccgcgggcacaccgccgggacgagcgtcccccgcacaggccagcccagcccaggctagccccgctgggactcctcctgggcgggcgtccccagcccaagcgtccccggcaggcactcctcctgggcgcgcaagtcctggcagagcctcccccgcccaagcttctccggcgcaagcttctccggcacgcgcatctcctgctctcgctagtctctcgagatccagtagtggcaggtcctccagcgcccgatctgcctctgttaccacatctccgacacgcgtgtatctcgtgagagccacaccagtgggagccgtccccattcgcagctcacctgcgcgctccgccccggcaaccagagcaacccgggagtctcccgtacagttctggcaaggacacaccgggatccgctataaggagcagagagagtcctgtcccaagcatgccgttcggtgtgatggtgtagtagactgtaagctcaagtcggatgaactgggttgtgtcagattcgactgggataagtccctgttgaagatctatagcggctcgagccaccagtggctcccaatttgcagctccaattggaacgatagttactctgagaaaacttgccagcagctggggttcgaatcggctcatcgaacgactgaagtcgcccatcgcgactttgccaactctttctctattcttaggtacaacagtactattcaggaatccctgcaccgcagcgagtgcccctcccagcgctacatcagtctgcagtgctcccactgcggcctgcgcgctatgacagggagaatcgtaggtggcgctctagcatccgacagtaagtggccatggcaggtgagtcttcattttggcacaacccacatctgcggaggcacgctgatagatgcacaatgggtgttaaccgccgctcactgcttcttcgttacaagagagaaagttctagaaggttggaaggtctacgccggaacctcaaacctccaccagctgcctgaagcagcctccatcgctgaaataatcatcaattcgaattacaccgacgaggaggatgactacgacattgcattgatgagactgtcgaaacccctgactctttccgcccatattcatcctgcatgcttacccatgcatggacagaccttcagcctgaatgagacctgttggatcaccggctttggaaagactagagagactgacgacaaaacgagtccattcctcagagaagttcaagtcaacttaattgacttcaagaaatgtaacgattatttggtctacgacagttatcttaccccgagaatgatgtgtgcaggggacctccgcggcggacgcgatagttgccagggcgacagcggcggcccgttggtctgtgagcagaataataggtggtacctagcaggtgtaacatcctggggcacagggtgcggccagcgcaacaagcccggtgtatacacaaaggttacagaggtgctcccatggatttattcaaagatggagtcagaggtaaggttccgcaagtcttag

SEQ ID NO: 82488 - DNA, 1599 bp, Artificial Sequence
  derived and/or modified sequence
atggagcgggacagccacggcaatgccagccctgcccggacccccagcgctggggccagccctgcccaggccagccctgctggcaccccacctggccgggccagccctgcccaggccagccctgcccaggccagccctgctggcaccccacctggccgggccagccctgcccaggccagccctgctggcaccccacctggccgggccagccctggccgggccagccctgcccaggccagccctgcccaggccagccctgcccgggccagccctgccctggccagcctgagccgcagcagcagcggccgcagcagcagcgcccggagcgcctctgtgaccaccagccccaccagggtgtacctggtgcgggccacccctgtgggcgctgtgcccatccgcagcagccctgcccggagcgccccagccacccgggccacccgggagagccctgtgcagttctggcagggccacacaggcatccgctacaaggagcagcgggagagctgccccaagcatgctgtgcgctgtgatggagtggtggactgcaagctgaagagtgatgagctgggctgtgtgcgctttgactgggacaagagcctgctgaagatctacagcggcagcagccaccagtggctgcccatctgcagcagcaactggaatgacagctacagcgagaagacctgccagcagctgggctttgaaagtgcccacaggaccacagaggtggcccaccgggactttgccaacagcttcagcatcctgcgctacaacagcaccatccaggagagcctgcacaggtctgagtgccccagccagcgctacatcagcctgcagtgcagccactgcggcctgcgggccatgactggaagaattgtgggcggggccctggccagtgacagcaagtggccctggcaggtgtccctgcacttcggcaccacccacatctgtggcggcaccctgattgatgcccagtgggtgctgacagctgcccactgcttctttgtgacccgggagaaggtgctggagggctggaaggtgtatgccggcaccagcaacctgcaccagctgcctgaggccgccagcattgctgagatcatcatcaacagcaactacacagatgaagaagatgattatgacatcgccctgatgaggctgagcaagcccctgaccctgagcgcccacatccacccagcctgcctgcccatgcacggccagaccttcagcctgaatgagacctgctggatcaccggctttgggaagacccgggagacagatgacaagaccagccccttcctgcgggaggtgcaggtgaacctgattgacttcaagaagtgcaatgactacctggtgtatgacagctacctgacccccaggatgatgtgtgccggggacctgcggggcggccgggacagctgccagggcgacagcggcggccccctggtgtgtgagcagaacaaccgctggtacctggccggcgtgacctcctggggcaccggctgcggccagaggaacaagccaggagtgtacaccaaggtgacagaggtgctgccctggatctacagcaagatggagagcgaggtgcgcttcaggaagagctag

SEQ ID NO: 82489 - DNA, 1599 bp, Artificial Sequence
  derived and/or modified sequence
atggagcgggacagccacggcaacgccagccccgcccggacccccagcgccggagcctctccggcccaggcctcacctgccgggaccccacccggcagagctagtccagcgcaggcaagccccgcccaagcctcaccagcgggcaccccacccggacgagcgtccccagcacaggccagtcctgccgggactcctcccggccgggctagtccagggagggcctcccctgctcaggcatctccagcacaggcatcccccgcgcgggcatccccagctttagcctctctgtcgaggagcagctcgggtagatcttctagcgcacgatccgcgagcgtgactacctctccaacccgagtgtatctggtcagggccactcccgtcggcgccgtgccgattaggagttcccccgcccgcagcgcccctgctactcgtgcaactagggaaagccctgttcagttctggcagggacacactggaatcagatacaaggagcagagagaaagctgtccaaaacacgcagttagatgtgatggtgttgtcgactgtaagctcaaaagtgacgaactgggctgcgtgagatttgactgggacaagtccctcctcaaaatttactccgggtccagtcaccaatggctgccgatctgttcgtccaattggaatgacagctactcagagaaaacctgtcagcagctgggcttcgagagtgctcaccgaacaaccgaagtagcccaccgagactttgctaacagtttttctatccttaggtacaacagcacaatacaggagagcctgcatcggtcagaatgtccttctcagcgctacatttccctgcagtgctcacactgtggactgcgcgcaatgactggccggattgtgggaggggcattagcctcagacagtaaatggccttggcaggtttcactgcattttggtaccactcacatctgtggcggaaccctcatcgacgctcaatgggtgctgacggcagcacattgctttttcgtgaccagagagaaggtgcttgaaggctggaaggtgtatgctggcacgtccaatctccatcagctgcctgaagccgcatccattgccgaaatcatcataaatagcaactataccgatgaggaggatgattatgacatcgccctcatgaggctgtctaagccacttacactgtcagcccacatccaccccgcctgtctcccaatgcacgggcagaccttctccttaaacgaaacctgctggatcaccgggtttggcaagaccagagaaacagacgataagacatctccattccttagggaagtgcaggtcaacctgattgactttaagaaatgcaatgattacctcgtttatgactcctatctaactccgaggatgatgtgtgccggggacctgagaggcggcagagattcatgccagggggacagtggaggcccactggtatgtgaacagaacaaccggtggtacctggcaggtgttacaagctggggaaccgggtgtggacagcgcaacaaacccggagtttataccaaggtgaccgaagtccttccctggatttattcgaagatggagtctgaggtcaggttccggaaatcttag

SEQ ID NO: 82490 - DNA, 1599 bp, Artificial Sequence
  derived and/or modified sequence
atggagcgggactcccacggcaatgcatcgcccgctcgcacaccttccgcaggtgccagcccagcgcaggcatcaccagcaggcacaccgccaggcagagcaagccctgcccaagcgtccccagctcaggccagcccagcaggcacacccccaggacgggcttctcctgcacaagccagtccagctggcacaccgcctggccgagcaagtccaggtcgggcttcaccggcacaggccagtccggcacaggcatctcctgcccgagcctccccggcactagcatcactttcgaggtcaagttcaggaagatcctcctccgctcggtcagcctcagtcacaacttcaccaaccagggtgtacctggtccgcgctacgcctgttggagctgtgcccattagatctagcccagccaggagcgcgcctgcaacgagagccaccagagaatccccagtacaattttggcaaggtcacaccggaatcagatacaaagagcagagagaatcttgcccaaaacatgcagttcgctgcgacggggtggtcgactgcaaactgaagtcagacgaattaggctgtgttcgattcgactgggataaaagccttcttaagatctacagcggcagctcacatcagtggctgccaatttgttccagtaattggaacgattcatattcagaaaagacctgccagcaattgggctttgaatccgcgcaccgtactacagaagtggctcaccgggacttcgcaaactccttcagcattttgcgttacaattccacaatccaggaaagcctacaccggagtgaatgcccgagtcagaggtacatcagtctgcagtgttcccactgtgggctgcgtgccatgacaggtaggattgttggcggagccctggctagcgactctaagtggccctggcaggtgtcccttcacttcggcaccactcatatctgcggaggaacccttattgacgcacaatgggttctgaccgctgcacattgctttttcgtgacaagagagaaagtactggagggatggaaagtttacgccggaactagtaatttgcaccaattgcctgaggctgcatccattgcggaaatcatcataaactccaattataccgatgaagaagatgattatgatatcgctctcatgcgtctttctaagcctctgacactcagcgctcatatccatccagcctgcttgcccatgcatggacagacgtttagtctgaatgaaacatgctggattacaggttttggtaagacccgggaaacagatgataagacttctccttttctgcgcgaagtgcaagtcaacctcattgatttcaaaaaatgtaatgattatttagtttatgatagctatctgacaccaagaatgatgtgcgccggagatcttagaggaggaagggatagctgtcaaggagactctgggggtccattagtgtgtgagcagaacaacaggtggtatttagccggagtaactagctggggcaccggatgcggtcaaaggaataaaccaggggtctacactaaggtgacagaagtacttccttggatttatagtaaaatggaaagtgaggtaaggttccgtaaatcatag

SEQ ID NO: 82491 - DNA, 3269 bp, Artificial Sequence
  derived and/or modified sequence
tgagaagccagggaccaagatggatcttctcctcgacatcagctaagcctggaggactcttcccctcagagaccatggagagggacagccacgggaatgcatctccagcaagaacaccttcagctggagcatctccagcccaggcatctccagctgggacacctccaggccgggcatctccagcccaggcatctccagcccaggcatctccagctgggacacctccgggccgggcatctccagcccaggcatctccagctggtacacctccaggccgggcatctccaggccgggcatctccagcccaggcatctccagcccaggcatctccagcccgggcatctccggctctggcatcactttccaggtcctcatccggcaggtcatcatccgccaggtcagcctcggtgacaacctccccaaccagagtgtaccttgttagagcaacaccagtgggggctgtacccatccgatcatctcctgccaggtcagcaccagcaaccagggccaccagggagagcccagtccagttctggcagggccacacagggatcaggtacaaggagcagagggagagctgtcccaagcacgctgttcgctgtgacggggtggtggactgcaagctgaagagtgacgagctgggctgcgtgaggtttgactgggacaagtctctgcttaaaatctactctgggtcctcccatcagtggcttcccatctgtagcagcaactggaatgactcctactcagagaagacctgccagcagctgggtttcgagagtgctcaccggacaaccgaggttgcccacagggattttgccaacagcttctcaatcttgagatacaactccaccatccaggaaagcctccacaggtctgaatgcccttcccagcggtatatctctctccagtgttcccactgcggactgagggccatgaccgggcggatcgtgggaggggcgctggcctcggatagcaagtggccttggcaagtgagtctgcacttcggcaccacccacatctgtggaggcacgctcattgacgcccagtgggtgctcactgccgcccactgcttcttcgtgacccgggagaaggtcctggagggctggaaggtgtacgcgggcaccagcaacctgcaccagttgcctgaggcagcctccattgccgagatcatcatcaacagcaattacaccgatgaggaggacgactatgacatcgccctcatgcggctgtccaagcccctgaccctgtccgctcacatccaccctgcttgcctccccatgcatggacagacctttagcctcaatgagacctgctggatcacaggctttggcaagaccagggagacagatgacaagacatcccccttcctccgggaggtgcaggtcaatctcatcgacttcaagaaatgcaatgactacttggtctatgacagttaccttaccccaaggatgatgtgtgctggggaccttcgtgggggcagagactcctgccagggagacagcggggggcctcttgtctgtgagcagaacaaccgctggtacctggcaggtgtcaccagctggggcacaggctgtggccagagaaacaaacctggtgtgtacaccaaagtgacagaagttcttccctggatttacagcaagatggagagcgaggtgcgattcagaaaatcctaaccagctggcctgctgctctgcacagcaccggctgctgtgaagactctggccatggtgactggccatgtgtggcatcatctgggctaatggccaccgggcaccatcggactcccacctccactgtctgctgcctctgtgtgtgtgtgtgtgtgtgtgtgtgtgtgtgcatatgtgtgcattgccactctcccaagtttttcagaaaccagcagagctgtcaactcttctcaaaatcccaggctggaaattacctggagacaagagttgagtaccgtggatgttcctacaggagtgtccatagatggatggaggaggtggagcccagagcccaaggaagagctgggaattcttgcttctctgaccctcacttacagactagcccagtgtgggcagatgccagcggcccaggtggcgccattgctgtcctgggatggatcgtgggttttggtggatgcagcttcccagggcctggaccgtcttcggtgaaaagctgctcccgttggctttatgagcatcaagtcctcacccagaccccctgctggtgccgtggatgtcaccagtcggactgtgctgtggctaaccaggctgacaactgagatgaggattcactgtactcatttggtcacaagctgctggggcgggttttattttattttatttttatatttaagaaatgaaaatacgggtatttttaaagattctccaaaaagtccagaagccttgacagctggcatcaatcagcccaagacccccaggggattcatgggaaatgtcgtattttagagtcctacagaatatttctggcctcaaggaactggatgaagagactggacaaagtccccaggatgggcatcccccaagtcactacagcatctggagcccctaggagatactcagggaagcaaatccttgtttgggctggcaagcaaatccgacacgacgaggtccacaaactgtttctgcatcccagggctctgacgaaggcgttaagaaacagatgctgttcccgcgtaggctcccaggggccccagggaggtccaggtggactgcctctctcattcccagtagctgtcctgggactttgggatttcttctcagctttctccacctttcagtttctcagttgtttcagaaacatagcaatgacataaaaactgctatggagagaaagctaacatggtcccatgccttccaggcagccctgctgaaggatctaagttggccctgttcctgcaaatcatcaacgtgcctggactcgccagctaaaagcctgggccttccccagccttttttctggggcacctattcctctgccagtcctgctcccctcaccttccttgggcccgtcagagtcttttgtggtgctgtgcttctcagaggcaggatccaagcagatcagcccagcctagcccagctcaggcaggccatggccgctcaagggaaagactgccccagaagagcaagctggagaggctgggcaggggctgatggggctgggtacactggggaatgttagcaagactgggaaggaggccacattcctgtctgcagcagccgccagcgatggtcttcagcaataaaagttgtgtgacctga

SEQ ID NO: 82492 - protein, 491 aa, Artificial Sequence
  derived and/or modified sequence
MERDSHGNASPARTPSAGASPAQASPAGTPPGRASPAQASPAQASPAGTPPGRASPAQASPAGTPPGRASPGRASPAQASPAQASPARASPALASLSRSSSGRSSSARSASVTTSPTRVYLVRATPVGAVPIRSSPARSAPATRATRESPGTSLPKFTWREGQKQLPLIGCVLLLIALVVSLIILFQFWQGHTGIRYKEQRESCPKHAVRCDGVVDCKLKSDELGCVRFDWDKSLLKIYSGSSHQWLPICSSNWNDSYSEKTCQQLGFESAHRTTEVAHRDFANSFSILRYNSTIQESLHRSECPSQRYISLQCSHCGLRAMTGRIVGGALASDSKWPWQVSLHFGTTHICGGTLIDAQWVLTAAHCFFVTREKVLEGWKVYAGTSNLHQLPEAASIAEIIINSNYTDEEDDYDIALMRLSKPLTLSGEGICTPRSPAPQPQHPLQPSHLSASVNSYPGPKASAGQKSKTLKDPYMEHFCFIIRETEAQGL

SEQ ID NO: 82493 - DNA, 1476 bp, Artificial Sequence
  derived and/or modified sequence
atggagagagacagccacggcaacgccagccccgccagaacccccagcgccggcgccagccccgcccaggccagccccgccggcaccccccccggcagagccagccccgcccaggccagccccgcccaggccagccccgccggcaccccccccggcagagccagccccgcccaggccagccccgccggcaccccccccggcagagccagccccggcagagccagccccgcccaggccagccccgcccaggccagccccgccagagccagccccgccctggccagcctgagcagaagcagcagcggcagaagcagcagcgccagaagcgccagcgtgaccaccagccccaccagagtgtacctggtgagagccacccccgtgggcgccgtgcccatcagaagcagccccgccagaagcgcccccgccaccagagccaccagagagagccccggcaccagcctgcccaagttcacctggagagagggccagaagcagctgcccctgatcggctgcgtgctgctgctgatcgccctggtggtgagcctgatcatcctgttccagttctggcagggccacaccggcatcagatacaaggagcagagagagagctgccccaagcacgccgtgagatgcgacggcgtggtggactgcaagctgaagagcgacgagctgggctgcgtgagattcgactgggacaagagcctgctgaagatctacagcggcagcagccaccagtggctgcccatctgcagcagcaactggaacgacagctacagcgagaagacctgccagcagctgggcttcgagagcgcccacagaaccaccgaggtggcccacagagacttcgccaacagcttcagcatcctgagatacaacagcaccatccaggagagcctgcacagaagcgagtgccccagccagagatacatcagcctgcagtgcagccactgcggcctgagagccatgaccggcagaatcgtgggcggcgccctggccagcgacagcaagtggccctggcaggtgagcctgcacttcggcaccacccacatctgcggcggcaccctgatcgacgcccagtgggtgctgaccgccgcccactgcttcttcgtgaccagagagaaggtgctggagggctggaaggtgtacgccggcaccagcaacctgcaccagctgcccgaggccgccagcatcgccgagatcatcatcaacagcaactacaccgacgaggaggacgactacgacatcgccctgatgagactgagcaagcccctgaccctgagcggcgagggcatctgcacccccagaagccccgccccccagccccagcaccccctgcagcccagccacctgagcgccagcgtgaacagctaccccggccccaaggccagcgccggccagaagagcaagaccctgaaggacccctacatggagcacttctgcttcatcatcagagagaccgaggcccagggcctgtag

SEQ ID NO: 82494 - DNA, 1476 bp, Artificial Sequence
  derived and/or modified sequence
atggagcgtgactcccacgggaatgcatcacctgcccgcacgccttccgctggtgcttctcccgcccaggcatccccagctgggacccccccgggccgggccagcccagcccaggctagtcctgcccaagcttcgcccgctggcaccccgccaggtagagcctcccctgcgcaggctagccctgccggaactcctcccggtcgagctagccccgggcgggccagtcccgctcaagcgtcgccggctcaagcctcacctgctcgcgctagcccggccctggcttccttgagtagatcctcgagcggaagatcttcctccgcacggtccgcttcagtgaccacaagtccaacccgcgtgtatcttgtgcgggccaccccggtgggagcagttccgattcgaagctccccagcccggagcgcaccagccacccgagctacccgggagtcacctggaaccagtcttccgaagtttacttggcgagaagggcaaaaacaattacctctgatcggctgtgtcctgttgctaatagctctcgtagtgagcctgatcatcctcttccaattctggcagggacacaccgggatccgctacaaagaacagcgggaaagctgcccgaaacacgccgtgcgttgcgacggcgtggtggattgtaagttaaagtcagacgagcttggctgcgtgcgcttcgattgggataaatcactgctgaagatctattcaggcagttcacatcagtggctccccatttgttcgtctaactggaatgattcctattcagagaaaacttgccagcagctgggatttgaatcagctcaccggacgaccgaagtggcgcacagagattttgccaattcgttcagcatcctcaggtacaactctaccattcaggaaagcttacatcggtccgagtgtccctcacaacgctacatttctctgcagtgcagtcattgtggactccgggctatgactgggcgcatagtcggtggagcactggcctctgattctaaatggccctggcaagtttccctgcacttcgggacaacacacatctgtggcggtaccttaatagacgcacagtgggtccttacagccgcacactgtttttttgttacccgcgagaaggttttggagggatggaaggtgtacgcgggtactagcaatttgcatcagctgcctgaagccgctagtatcgctgagataatcatcaactcaaactatactgacgaagaggacgactacgacatcgcactgatgagactcagcaaacccctaaccctgagtggcgaaggtatttgtacacccagatctcccgctccccagccccagcatccccttcaaccttcacacctcagtgcctctgtcaatagctatcctggcccaaaagcctctgccggtcagaagtctaagacactgaaggacccctatatggaacacttttgcttcattatacgagagaccgaagcccagggactttag

SEQ ID NO: 82495 - DNA, 1476 bp, Artificial Sequence
  derived and/or modified sequence
atggagcgggacagccacggcaatgccagccctgcccggacccccagcgctggggccagccctgcccaggccagccctgctggcaccccacctggccgggccagccctgcccaggccagccctgcccaggccagccctgctggcaccccacctggccgggccagccctgcccaggccagccctgctggcaccccacctggccgggccagccctggccgggccagccctgcccaggccagccctgcccaggccagccctgcccgggccagccctgccctggccagcctgagccgcagcagcagcggccgcagcagcagcgcccggagcgcctctgtgaccaccagccccaccagggtgtacctggtgcgggccacccctgtgggcgctgtgcccatccgcagcagccctgcccggagcgccccagccacccgggccacccgggagagccctggcaccagcctgcccaagttcacctggagggagggccagaagcagctgcccctgattggctgtgtgctgctgctgattgccctggtggtgtccctcatcatcctcttccagttctggcagggccacacaggcatccgctacaaggagcagcgggagagctgccccaagcatgctgtgcgctgtgatggagtggtggactgcaagctgaagagtgatgagctgggctgtgtgcgctttgactgggacaagagcctgctgaagatctacagcggcagcagccaccagtggctgcccatctgcagcagcaactggaatgacagctacagcgagaagacctgccagcagctgggctttgagagcgcccacaggaccacagaggtggcccaccgggactttgccaacagcttcagcatcctgcgctacaacagcaccatccaggagagcctgcacagaagtgaatgtcccagccagcgctacatcagcctgcagtgcagccactgcggcctgcgggccatgacaggccgcatcgtgggcggggccctggccagtgacagcaagtggccctggcaggtgtccctgcacttcggcaccacccacatctgtggcggcaccctgattgatgcccagtgggtgctgacagctgcccactgcttctttgtgacccgggagaaggtgctggagggctggaaggtgtatgccggcaccagcaacctgcaccagctgcctgaggccgccagcattgctgagatcatcatcaacagcaactacacagatgaggaggatgattatgacatcgccctgatgaggctgagcaagcccctgaccctgtctggagagggcatctgcacccccaggagccctgccccccagccccagcaccccctgcagcccagccacctgagcgcctctgtgaacagctacccaggccccaaggccagcgctggccagaagagcaagaccctgaaggacccctacatggagcacttctgcttcatcatccgggagacagaggcccagggcctgtag

SEQ ID NO: 82496 - DNA, 1476 bp, Artificial Sequence
  derived and/or modified sequence
atggagcgggacagccacggcaacgccagccccgcccggaccccctctgcaggggctagccccgcccaggctagccccgcaggaactccccctggccgtgcaagtcctgcacaagccagcccagcccaggcctcacctgccggtacaccgcctggcagggcgtcacccgcacaggcaagccccgcaggaacaccgcccggccgagcatctcccggtagggcctcccctgcgcaggcttcccctgctcaggcctcccctgcccgcgcctctccagcactggctagcttgtcgcgtagttcatcaggccgatcatcctccgcaagaagtgctagcgtgaccaccagcccaacccgcgtctatctggtccgggcaacaccggtcggagctgtgcctataaggtccagcccagcccggtccgctcctgcgacccgggcaacccgcgaatcccccggcacgagccttcctaaatttacatggagggagggccagaagcaactcccactcattggatgcgttttactgctgatagccttagtggtgagtttaatcatcctgttccagttttggcaaggacacaccggtattcgctataaggagcagagggagagctgtcccaagcatgctgtgcgctgtgacggcgtggtggactgtaaactgaagagcgacgagctgggttgcgtgcggttcgattgggacaaatccctgctcaagatctattctggcagctcacaccagtggctccccatctgttccagtaactggaatgacagttattccgagaagacctgccagcagcttgggtttgagtcggctcataggaccacggaagtggcccacagggattttgctaactctttcagtattttacggtataattctaccatacaggagagcctgcaccgcagtgagtgcccatctcaacggtatatttctctgcagtgttcccactgcgggctcagggccatgactgggcgcatcgtcggtggcgctctggcaagcgattccaagtggccgtggcaggtctcccttcactttggcacaactcatatttgcggaggtacgctgattgatgcacaatgggtgcttactgctgcccactgcttttttgtgacccgcgaaaaggtgctggaagggtggaaagtgtatgcagggacatcaaaccttcatcagctgcctgaagcggcctccatcgccgaaatcatcatcaacagtaactatacggacgaagaagatgattatgacatagccctgatgagattatcaaagcctctcactttgagcggcgagggtatttgcacccctagaagtcccgcaccacaaccccagcaccccctgcagccctctcacttgtctgcctctgtgaacagctaccctggaccaaaggcctccgcaggacagaaatccaaaaccctgaaagacccatatatggagcacttttgtttcattatccgagagactgaagcccagggtctttag

SEQ ID NO: 82497 - DNA, 1476 bp, Artificial Sequence
  derived and/or modified sequence
atggagcgggacagtcatgggaacgcttcccccgcaagaacgcctagtgccggtgcctctccagcgcaggcttcccctgcagggacacctcctggaagggcatcacctgcccaggcctctcctgctcaggcatccccagctgggacaccccctggacgcgcttctccagctcaggcaagccccgctggcacaccccctgggagggccagcccgggacgggcttcccccgcacaagccagtccagcacaggcatctccagccagggcttcgcccgctctcgcttccctcagtaggagttcctctggtcggagttcgtccgccaggagtgcctctgtgacgacttcacccactcgggtctaccttgtgagagctacaccagttggagctgtgcctatccgctcttcccctgccaggtcagccccagccacccgagcaaccagagagagccctggtacaagtcttcctaagtttacctggagggagggccagaagcagcttcccctgataggctgcgtgcttcttctgatagccctcgttgtgtcccttatcatcttattccagttctggcagggccacactgggatccggtataaggaacaaagggaatcctgtccgaaacatgccgtccgctgtgacggtgtggtggactgcaagttgaagagcgacgaactcgggtgcgtgagattcgactgggacaaatctctgctcaagatttacagcggctcttcccaccagtggctgcccatctgcagcagtaactggaatgactcctacagcgaaaaaacttgtcagcaattaggatttgaatccgcgcaccggaccacagaagtagctcatagagacttcgccaattctttcagtatcttacgctacaacagcacaattcaggagagcctgcatcgctcggagtgcccctctcagaggtacatatcgcttcaatgcagccattgcggtctgagagccatgaccgggaggatcgtcggaggagccctggccagtgactctaagtggccttggcaagtgtccttgcactttgggaccactcacatctgtggaggcacactgattgacgcccagtgggtcctgactgccgctcattgttttttcgtgacccgcgaaaaggtgctggaagggtggaaagtctatgctggcacttctaatttgcatcagctgccagaggctgccagcatcgccgagattatcattaacagcaactataccgatgaggaggatgactacgacatcgctttaatgcggttgagcaagcctctgaccctttccggcgagggcatttgcacaccgagatcccctgcccctcagcctcagcatcctctccagccatctcacctttcagcttctgtgaatagctatccaggacccaaagctagcgcagggcagaagtccaagactctgaaagatccttatatggagcatttttgttttatcattagagaaacagaggcgcaagggctttag

SEQ ID NO: 82498 - DNA, 2592 bp, Artificial Sequence
  derived and/or modified sequence
cacacgtcccaaccggcttccccgccccatttggtgggggctggcccttggccctccaactcctttaccctacatgcctgagaagccagggaccaagatggatcttctcctcgacatcagctaagcctggaggactcttcccctcagagaccatggagagggacagccacgggaatgcatctccagcaagaacaccttcagctggagcatctccagcccaggcatctccagctgggacacctccaggccgggcatctccagcccaggcatctccagcccaggcatctccagctgggacacctccgggccgggcatctccagcccaggcatctccagctggtacacctccaggccgggcatctccaggccgggcatctccagcccaggcatctccagcccaggcatctccagcccgggcatctccggctctggcatcactttccaggtcctcatccggcaggtcatcatccgccaggtcagcctcggtgacaacctccccaaccagagtgtaccttgttagagcaacaccagtgggggctgtacccatccgatcatctcctgccaggtcagcaccagcaaccagggccaccagggagagcccaggtacgagcctgcccaagttcacctggcgggagggccagaagcagctaccgctcatcgggtgcgtgctcctcctcattgccctggtggtttcgctcatcatcctcttccagttctggcagggccacacagggatcaggtacaaggagcagagggagagctgtcccaagcacgctgttcgctgtgacggggtggtggactgcaagctgaagagtgacgagctgggctgcgtgaggtttgactgggacaagtctctgcttaaaatctactctgggtcctcccatcagtggcttcccatctgtagcagcaactggaatgactcctactcagagaagacctgccagcagctgggtttcgagagtgctcaccggacaaccgaggttgcccacagggattttgccaacagcttctcaatcttgagatacaactccaccatccaggaaagcctccacaggtctgaatgcccttcccagcggtatatctctctccagtgttcccactgcggactgagggccatgaccgggcggatcgtgggaggggcgctggcctcggatagcaagtggccttggcaagtgagtctgcacttcggcaccacccacatctgtggaggcacgctcattgacgcccagtgggtgctcactgccgcccactgcttcttcgtgacccgggagaaggtcctggagggctggaaggtgtacgcgggcaccagcaacctgcaccagttgcctgaggcagcctccattgccgagatcatcatcaacagcaattacaccgatgaggaggacgactatgacatcgccctcatgcggctgtccaagcccctgaccctgtccggtgagggaatctgcactccccgctctcctgccccccagccccagcaccctctgcagccctcgcacttgtcagcatctgtcaactcatatccgggccccaaagcttctgcagggcagaagtcaaagactcttaaagatccttacatggaacacttctgttttataattagggaaactgaagcccaagggttataaataagtttgctccaaatgacacatctcacattacaaattgatgacggagtcagggcttgggtactgatcttaatcaatagattgaattctttcactggtattaactgagcacctaggggccaaacgctatggtaggcatttcacacatatgatttcatttactcttcacaaccaaccctgtggagcaggcactattattaacttcatttgacatatgaggaaatggagctttacagagagataattacctgaggccacaagtaataggtggtagctctgggattggaaccaggtcgatctgattcccaagcagtgctctccccacctggctctagactggcaaattgcttaccctgcagtcgagaacttaagctgagtacacattcaaacaactaattgctacaacgttgttgctaaggaccaaaggaggctacacaaaggaaatgctgcagaggttctcagaagatcactgtggacaggggacgtcaaagaagacttcattcattcattcattcattcactcatcattcatccattcactcatttgttcacttatcaaatactatatggccagccctatagtacagttgcaaatagaaataaaatacaccaagacgaccagtagaggccaattatacgatgttttcggggagcagggagctatggtggcataggcgggagcaactaatcatcctggcaggctaggggaagctcagcagaggaaggatagccaaggtgggtcccgaaaagattggagaagacaggtaatgggggctcagggaggaccctgaagaatggagccagagccctctggcataagcatctgtaaaggtgggagagggaggaggagtaccgggatttctggaagcctcggaggactctctggttagtccagccattctcgtgctctgagcctgtgagctggtgtttcctcgcacattaattatggaggcggtgtctatca

SEQ ID NO: 82499 - DNA, 2674 bp, Artificial Sequence
  derived and/or modified sequence
cgccgcgcttcctcctgaaggtgactgcgcccgcggggacgcagggggcggggcccgggtcgcccggagccgggattgggcagagggcggggcggcggagggattgcggcggcccgcagcgggataaccttgaggctgaggcagtggctccttgcacagcagctgcacgcgccgtggctccggatctcttcgtctttgcagcgtagcccgagtcggtcagcgccggaggtgagcggtgcaggaggctacgccatcagtccccaccaagggccagtcgcccggctagtgcggaatcccggcgcgccggccggccccgggcacgcaggcagggcggcgcaggatccagggcgtctgggatgcagtggagctcagagagaggagaacggctcctcacgcctggggcctgctcttcagaagtccccagcgccgttccttccagatcaggacctcagcagccatgtcgaagccccatagtgaagccgggactgccttcattcagacccagcagctgcacgcagccatggctgacacattcctggagcacatgtgccgcctggacattgattcaccacccatcacagcccggaacactggcatcatctgtaccattggcccagcttcccgatcagtggagacgttgaaggagatgattaagtctggaatgaatgtggctcgtctgaacttctctcatggaactcatgagtaccatgcggagaccatcaagaatgtgcgcacagccacggaaagctttgcttctgaccccatcctctaccggcccgttgctgtggctctagacactaaaggacctgagatccgaactgggctcatcaagggcagcggcactgcagaggtggagctgaagaagggagccactctcaaaatcacgctggataacgcctacatggaaaagtgtgacgagaacatcctgtggctggactacaagaacatctgcaaggtggtggaagtgggcagcaagatctacgtggatgatgggcttatttctctccaggtgaagcagaaaggtgccgacttcctggtgacggaggtggaaaatggtggctccttgggcagcaagaagggtgtgaaccttcctggggctgctgtggacttgcctgctgtgtcggagaaggacatccaggatctgaagtttggggtcgagcaggatgttgatatggtgtttgcgtcattcatccgcaaggcatctgatgtccatgaagttaggaaggtcctgggagagaagggaaagaacatcaagattatcagcaaaatcgagaatcatgagggggttcggaggtttgatgaaatcctggaggccagtgatgggatcatggtggctcgtggtgatctaggcattgagattcctgcagagaaggtcttccttgctcagaagatgatgattggacggtgcaaccgagctgggaagcctgtcatctgtgctactcagatgctggagagcatgatcaagaagccccgccccactcgggctgaaggcagtgatgtggccaatgcagtcctggatggagccgactgcatcatgctgtctggagaaacagccaaaggggactatcctctggaggctgtgcgcatgcagcacctgatagctcgtgaggctgaggcagccatgttccaccgcaagctgtttgaagaacttgtgcgagcctcaagtcactccacagacctcatggaagccatggccatgggcagcgtggaggcttcttataagtgtttagcagcagctttgatagttctgacggagtctggcaggtctgctcaccaggtggccagataccgcccacgtgcccccatcattgctgtgacccggaatccccagacagctcgtcaggcccacctgtaccgtggcatcttccctgtgctgtgcaaggacccagtccaggaggcctgggctgaggacgtggacctccgggtgaactttgccatgaatgttggcaaggcccgaggcttcttcaagaagggagatgtggtcattgtgctgaccggatggcgccctggctccggcttcaccaacaccatgcgtgttgttcctgtgccgtgatggaccccagagcccctcctccagcccctgtcccacccccttcccccagcccatccattaggccagcaacgcttgtagaactcactctgggctgtaacgtggcactggtaggttgggacaccagggaagaagatcaacgcctcactgaaacatggctgtgtttgcagcctgctctagtgggacagcccagagcctggctgcccatcatgtggccccacccaatcaagggaagaaggaggaatgctggactggaggcccctggagccagatggcaagagggtgacagcttcctttcctgtgtgtactctgtccagttcctttagaaaaaatggatgcccagaggactcccaaccctggcttggggtcaagaaacagccagcaagagttaggggccttagggcactgggctgttgttccattgaagccgactctggccctggcccttacttgcttctctagctctctaggcctctccagtttgcacctgtccccaccctccactcagctgtcctgcagcaaacactccaccctccaccttccattttcccccactactgcagcacctccaggcctgttgctatagagcctacctgtatgtcaataaacaacagctgaagcacc

SEQ ID NO: 82500 - DNA, 2302 bp, Artificial Sequence
  derived and/or modified sequence
gcacagcagctgcacgcgccgtggctccggatctcttcgtctttgcagcgtagcccgagtcggtcagcgccggaggacctcagcagccatgtcgaagccccatagtgaagccgggactgccttcattcagacccagcagctgcacgcagccatggctgacacattcctggagcacatgtgccgcctggacattgattcaccacccatcacagcccggaacactggcatcatctgtaccattggcccagcttcccgatcagtggagacgttgaaggagatgattaagtctggaatgaatgtggctcgtctgaacttctctcatggaactcatgagtaccatgcggagaccatcaagaatgtgcgcacagccacggaaagctttgcttctgaccccatcctctaccggcccgttgctgtggctctagacactaaaggacctgagatccgaactgggctcatcaagggcagcggcactgcagaggtggagctgaagaagggagccactctcaaaatcacgctggataacgcctacatggaaaagtgtgacgagaacatcctgtggctggactacaagaacatctgcaaggtggtggaagtgggcagcaagatctacgtggatgatgggcttatttctctccaggtgaagcagaaaggtgccgacttcctggtgacggaggtggaaaatggtggctccttgggcagcaagaagggtgtgaaccttcctggggctgctgtggacttgcctgctgtgtcggagaaggacatccaggatctgaagtttggggtcgagcaggatgttgatatggtgtttgcgtcattcatccgcaaggcatctgatgtccatgaagttaggaaggtcctgggagagaagggaaagaacatcaagattatcagcaaaatcgagaatcatgagggggttcggaggtttgatgaaatcctggaggccagtgatgggatcatggtggctcgtggtgatctaggcattgagattcctgcagagaaggtcttccttgctcagaagatgatgattggacggtgcaaccgagctgggaagcctgtcatctgtgctactcagatgctggagagcatgatcaagaagccccgccccactcgggctgaaggcagtgatgtggccaatgcagtcctggatggagccgactgcatcatgctgtctggagaaacagccaaaggggactatcctctggaggctgtgcgcatgcagcacctgatagctcgtgaggctgaggcagccatgttccaccgcaagctgtttgaagaacttgtgcgagcctcaagtcactccacagacctcatggaagccatggccatgggcagcgtggaggcttcttataagtgtttagcagcagctttgatagttctgacggagtctggcaggtctgctcaccaggtggccagataccgcccacgtgcccccatcattgctgtgacccggaatccccagacagctcgtcaggcccacctgtaccgtggcatcttccctgtgctgtgcaaggacccagtccaggaggcctgggctgaggacgtggacctccgggtgaactttgccatgaatgttggcaaggcccgaggcttcttcaagaagggagatgtggtcattgtgctgaccggatggcgccctggctccggcttcaccaacaccatgcgtgttgttcctgtgccgtgatggaccccagagcccctcctccagcccctgtcccacccccttcccccagcccatccattaggccagcaacgcttgtagaactcactctgggctgtaacgtggcactggtaggttgggacaccagggaagaagatcaacgcctcactgaaacatggctgtgtttgcagcctgctctagtgggacagcccagagcctggctgcccatcatgtggccccacccaatcaagggaagaaggaggaatgctggactggaggcccctggagccagatggcaagagggtgacagcttcctttcctgtgtgtactctgtccagttcctttagaaaaaatggatgcccagaggactcccaaccctggcttggggtcaagaaacagccagcaagagttaggggccttagggcactgggctgttgttccattgaagccgactctggccctggcccttacttgcttctctagctctctaggcctctccagtttgcacctgtccccaccctccactcagctgtcctgcagcaaacactccaccctccaccttccattttcccccactactgcagcacctccaggcctgttgctatagagcctacctgtatgtcaataaacaacagctgaagc

SEQ ID NO: 82501 - protein, 458 aa, Artificial Sequence
  derived and/or modified sequence
MSKPHSEAGTAFIQTQQLHAAMADTFLEHMCRLDIDSPPITARNTGIICTIGPASRSEVELKKGATLKITLDNAYMEKCDENILWLDYKNICKVVEVGSKIYVDDGLISLQVKQKGADFLVTEVENGGSLGSKKGVNLPGAAVDLPAVSEKDIQDLKFGVEQDVDMVFASFIRKASDVHEVRKVLGEKGKNIKIISKIENHEGVRRFDEILEASDGIMVARGDLGIEIPAEKVFLAQKMMIGRCNRAGKPVICATQMLESMIKKPRPTRAEGSDVANAVLDGADCIMLSGETAKGDYPLEAVRMQHLIAREAEAAIYHLQLFEELRRLAPITSDPTEATAVGAVEASFKCCSGAIIVLTKSGRSAHQVARYRPRAPIIAVTRNPQTARQAHLYRGIFPVLCKDPVQEAWAEDVDLRVNFAMNVGKARGFFKKGDVVIVLTGWRPGSGFTNTMRVVPVP

SEQ ID NO: 82502 - DNA, 1377 bp, Artificial Sequence
  derived and/or modified sequence
atgagcaagccccacagcgaggctggcaccgccttcattcagacacagcaattgcatgccgccatggctgacacatttctggaacacatgtgtcgcctggatatcgacagccctccgatcactgcccggaatactgggataatctgtactatcgggcccgctagcagatcagaggttgaactgaagaagggagccacgctgaagatcactctcgacaacgcctatatggaaaagtgtgatgaaaacatcttatggcttgactataagaacatctgcaaagttgtcgaggtgggcagcaaaatttacgttgatgacggtctaatttctctccaggttaaacaaaaaggagctgacttcctggtgacagaagtggaaaacggcggaagtctcgggagcaagaagggagtgaatctccccggtgcggccgtggatctgcccgctgtgtctgaaaaagacatccaagatctgaaattcggagtcgaacaggacgtagacatggtcttcgctagttttatcaggaaggctagtgatgtgcatgaggtgcgaaaggtgctaggagagaaaggcaagaatattaaaatcattagtaagattgaaaaccacgagggcgttcggagattcgatgaaatcctcgaagcctccgatggtatcatggtggctagaggcgatttggggatcgagatcccagcagagaaggtcttcctcgcacagaagatgatgatcggccggtgcaaccgggccgggaaacctgtaatatgcgcaacccagatgttagagagcatgataaaaaaacccaggcccacccgcgccgaagggagcgacgttgccaatgctgtcttggacggcgctgattgtatcatgctcagcggcgagaccgcgaagggcgattacccgttagaagcagtcagaatgcagcacttgatagcacgcgaggccgaggccgctatttatcatctgcagttattcgaggaattgaggaggctcgccccaattacctcagatccaaccgaagccacggctgttggagcagtggaggcatcatttaagtgttgctccggcgctattattgtgttgacaaaatcgggccgctcagctcaccaggtcgcaaggtaccgcccccgagcaccaatcatcgcagtgacacgcaacccccagactgcacggcaggcccacctctacagagggattttccctgtcctttgtaaggaccctgtgcaggaggcctgggctgaagatgtcgatctgagggtcaacttcgctatgaatgtgggaaaggccagaggcttctttaaaaaaggggacgtcgtcatagtgcttaccggctggcggccaggaagcggattcactaataccatgcgggttgtcccagttccttag

SEQ ID NO: 82503 - DNA, 1377 bp, Artificial Sequence
  derived and/or modified sequence
atgagcaagccccacagcgaggccggcacagccttcatccagacccagcagctgcacgccgccatggctgacaccttcctggagcacatgtgccgcctggacatcgacagcccccccatcacagccaggaacacaggcatcatctgcaccatcggccctgccagccgctctgaggtggagctgaagaagggggccaccctgaagatcaccctggacaatgcctacatggagaagtgtgatgagaacatcctgtggctggactacaagaacatctgcaaggtggtggaggtgggcagcaagatctacgtggatgatggcctcatcagcctgcaggtgaagcagaagggagctgacttcctggtgacagaggtggagaatggaggcagcctgggcagcaagaagggcgtgaacctgcctggagctgctgtggacctgcctgctgtgtctgagaaggacatccaggacctgaagtttggagtggagcaggatgtggacatggtgtttgccagcttcatcaggaaggccagtgatgtgcatgaggtgaggaaggtgctgggggagaagggcaagaacatcaagatcatcagcaagattgaaaatcatgaaggagtgagaagatttgatgagatcctggaggccagtgatggcatcatggtggcccggggggacctgggcatcgagatcccagctgagaaggtgttcctggcccagaagatgatgattggccgctgcaacagagctgggaagcctgtgatctgtgccacccagatgctggagagcatgatcaagaagccccggcccaccagggctgagggcagtgatgtggccaatgctgtgctggatggagctgactgcatcatgctgtctggagaaacagccaagggggactaccccctggaggccgtgaggatgcagcacctgattgcccgggaggccgaggccgccatctaccacctgcagctgtttgaggagctgcggcggctggcccccatcaccagtgaccccacagaggccacagctgtgggcgctgtggaggccagcttcaagtgctgcagcggggccatcatcgtgctgaccaagagcggccgcagcgcccaccaggtggcccgctaccggccccgggcccccatcatcgctgtgaccaggaacccccagacagcccggcaggcccacctgtaccggggcatcttccctgtgctgtgcaaggaccctgtgcaggaggcctgggccgaggatgtggacctgcgggtgaactttgccatgaatgtgggcaaggcccggggcttcttcaagaagggagatgtggtgattgtgctgaccggctggaggcctggcagcggcttcaccaacaccatgagggtggtgcctgtgccctag

SEQ ID NO: 82504 - DNA, 1377 bp, Artificial Sequence
  derived and/or modified sequence
atgagcaagccccacagcgaggccggcaccgccttcatccagacccaacaacttcacgctgctatggccgatactttcctggagcatatgtgtcgcctcgatatagattccccacccattacagcgcgtaataccgggatcatctgcaccatcgggcctgctagccgaagcgaggtggagctgaaaaaaggagctactctgaagattacgctcgataatgcgtacatggagaagtgtgatgaaaacatcttgtggctcgattataaaaacatttgtaaagtggtagaggtgggctccaaaatctatgtagacgacggactcatttcactgcaggtcaagcagaaaggcgccgacttcctggtcacggaagtggaaaatgggggctcactcggtagtaagaagggcgtgaacctgccaggtgctgcagtggacctcccagccgtgagtgaaaaggacattcaggacttgaagtttggtgtagagcaagatgtcgacatggtgtttgcgtcttttatccggaaagccagcgacgtgcacgaggtgaggaaagtcctgggggagaaaggtaaaaacatcaagattatctcaaagattgaaaatcatgagggcgttaggcggttcgatgagattttagaagcaagtgatggaattatggttgcgcgaggcgatctgggtatcgagatacctgcggagaaagtgtttctggcccagaagatgatgattggccgatgcaatagagctggaaaacctgtgatatgcgccacccaaatgctggagagtatgataaaaaaaccgagacccactcgtgccgaaggcagtgacgtagcaaatgccgttctcgatggagctgattgcattatgctgtccggcgagacagccaaaggagattacccactggaggccgtgcgcatgcagcacttaattgcacgtgaagctgaggctgccatctaccacctccagttgttcgaggagttacggcgcctggctcctatcacctccgacccaacagaggccactgcagtgggcgccgtcgaagcaagctttaaatgctgcagcggcgccatcattgtgcttaccaaaagcggcagaagtgctcaccaggtggcccggtatcggcctagagccccgattatcgccgttactcggaaccctcagaccgcccgccaggcacacctctataggggtattttccccgtgctttgcaaagaccctgtacaagaggcatgggccgaggatgtggacctgcgggtcaacttcgccatgaacgttgggaaagcaagaggattctttaagaagggggacgtagtgatcgtgttgaccggctggcgtcccggaagtgggttcaccaataccatgcgcgtggtgccggttccgtag

SEQ ID NO: 82505 - DNA, 1377 bp, Artificial Sequence
  derived and/or modified sequence
atgtcaaagcctcattcagaagcaggaacagcctttattcaaacccaacaactccacgctgccatggctgacacatttctggagcacatgtgtcggctagacattgacagtccacccatcacagcccgaaataccgggatcatctgtaccatcgggcctgcaagtcgttccgaggtggagctcaagaaaggagccaccttaaagattactctggacaacgcttacatggagaaatgcgacgagaatatactctggctggattataaaaatatttgcaaagttgtcgaagtcgggagtaagatttatgtggatgacggactgatctccctgcaagtgaaacagaagggagccgactttctggtgacagaggtcgaaaatggtggatcgctcggaagcaaaaagggggtaaacctgcccggagccgctgtggatctgcccgcagtcagtgagaaagacattcaagatctgaagttcggagtggagcaggatgtagatatggtcttcgcatctttcatccgaaaggcgtccgatgttcatgaagtacgcaaagtcttaggagagaaggggaagaatattaaaatcattagcaaaattgaaaaccatgagggagtgaggcgatttgacgaaattctagaggcgtctgatggcataatggtggcaaggggtgatctaggcattgaaattccagctgagaaagtatttcttgctcagaagatgatgatcgggagatgcaatcgcgcaggtaaacctgtcatctgcgctacacagatgctcgagagtatgataaaaaagccccgtcctactcgcgctgaagggtctgacgtcgcaaacgctgtattggatggggcagattgtattatgctttcaggcgaaacagcaaagggcgattaccccctggaagctgtccgcatgcagcatctgattgcaagagaagccgaggcagcaatttatcatttgcagttattcgaagagttgagacgccttgcccctatcacctctgatccaaccgaggccaccgccgtaggggctgttgaagcaagctttaagtgttgctctggagctattatcgtcctgaccaaaagcggcagaagcgcccaccaggtggctagatacaggccaagagcaccgatcatcgccgtaacaagaaacccacagacggccaggcaggcacacttgtatcgaggcatctttcccgtattgtgcaaggaccccgtgcaggaagcctgggcggaagacgtggacctgagagtaaacttcgccatgaacgtgggaaaggctcggggtttctttaagaaaggtgacgttgtgatcgtattgacagggtggcgacctggctcgggatttaccaacactatgcgagtcgtgccagtgccatag

SEQ ID NO: 82506 - DNA, 2083 bp, Artificial Sequence
  derived and/or modified sequence
gcacagcagctgcacgcgccgtggctccggatctcttcgtctttgcagcgtagcccgagtcggtcagcgccggaggacctcagcagccatgtcgaagccccatagtgaagccgggactgccttcattcagacccagcagctgcacgcagccatggctgacacattcctggagcacatgtgccgcctggacattgattcaccacccatcacagcccggaacactggcatcatctgtaccattggcccagcttcccgatcagaggtggagctgaagaagggagccactctcaaaatcacgctggataacgcctacatggaaaagtgtgacgagaacatcctgtggctggactacaagaacatctgcaaggtggtggaagtgggcagcaagatctacgtggatgatgggcttatttctctccaggtgaagcagaaaggtgccgacttcctggtgacggaggtggaaaatggtggctccttgggcagcaagaagggtgtgaaccttcctggggctgctgtggacttgcctgctgtgtcggagaaggacatccaggatctgaagtttggggtcgagcaggatgttgatatggtgtttgcgtcattcatccgcaaggcatctgatgtccatgaagttaggaaggtcctgggagagaagggaaagaacatcaagattatcagcaaaatcgagaatcatgagggggttcggaggtttgatgaaatcctggaggccagtgatgggatcatggtggctcgtggtgatctaggcattgagattcctgcagagaaggtcttccttgctcagaagatgatgattggacggtgcaaccgagctgggaagcctgtcatctgtgctactcagatgctggagagcatgatcaagaagccccgccccactcgggctgaaggcagtgatgtggccaatgcagtcctggatggagccgactgcatcatgctgtctggagaaacagccaaaggggactatcctctggaggctgtgcgcatgcagcacctgattgcccgtgaggcagaggctgccatctaccacttgcaattatttgaggaactccgccgcctggcgcccattaccagcgaccccacagaagccaccgccgtgggtgccgtggaggcctccttcaagtgctgcagtggggccataatcgtcctcaccaagtctggcaggtctgctcaccaggtggccagataccgcccacgtgcccccatcattgctgtgacccggaatccccagacagctcgtcaggcccacctgtaccgtggcatcttccctgtgctgtgcaaggacccagtccaggaggcctgggctgaggacgtggacctccgggtgaactttgccatgaatgttggcaaggcccgaggcttcttcaagaagggagatgtggtcattgtgctgaccggatggcgccctggctccggcttcaccaacaccatgcgtgttgttcctgtgccgtgatggaccccagagcccctcctccagcccctgtcccacccccttcccccagcccatccattaggccagcaacgcttgtagaactcactctgggctgtaacgtggcactggtaggttgggacaccagggaagaagatcaacgcctcactgaaacatggctgtgtttgcagcctgctctagtgggacagcccagagcctggctgcccatcatgtggccccacccaatcaagggaagaaggaggaatgctggactggaggcccctggagccagatggcaagagggtgacagcttcctttcctgtgtgtactctgtccagttcctttagaaaaaatggatgcccagaggactcccaaccctggcttggggtcaagaaacagccagcaagagttaggggccttagggcactgggctgttgttccattgaagccgactctggccctggcccttacttgcttctctagctctctaggcctctccagtttgcacctgtccccaccctccactcagctgtcctgcagcaaacactccaccctccaccttccattttcccccactactgcagcacctccaggcctgttgctatagagcctacctgtatgtcaataaacaacagctgaagc

SEQ ID NO: 82507 - DNA, 1377 bp, Artificial Sequence
  derived and/or modified sequence
atgagcaagccccacagcgaggccggcaccgccttcatccagacccagcagctgcacgccgccatggccgacaccttcctggagcacatgtgcagactggacatcgacagcccccccatcaccgccagaaacaccggcatcatctgcaccatcggccccgccagcagaagcgaggtggagctgaagaagggcgccaccctgaagatcaccctggacaacgcctacatggagaagtgcgacgagaacatcctgtggctggactacaagaacatctgcaaggtggtggaggtgggcagcaagatctacgtggacgacggcctgatcagcctgcaggtgaagcagaagggcgccgacttcctggtgaccgaggtggagaacggcggcagcctgggcagcaagaagggcgtgaacctgcccggcgccgccgtggacctgcccgccgtgagcgagaaggacatccaggacctgaagttcggcgtggagcaggacgtggacatggtgttcgccagcttcatcagaaaggccagcgacgtgcacgaggtgagaaaggtgctgggcgagaagggcaagaacatcaagatcatcagcaagatcgagaaccacgagggcgtgagaagattcgacgagatcctggaggccagcgacggcatcatggtggccagaggcgacctgggcatcgagatccccgccgagaaggtgttcctggcccagaagatgatgatcggcagatgcaacagagccggcaagcccgtgatctgcgccacccagatgctggagagcatgatcaagaagcccagacccaccagagccgagggcagcgacgtggccaacgccgtgctggacggcgccgactgcatcatgctgagcggcgagaccgccaagggcgactaccccctggaggccgtgagaatgcagcacctgatcgccagagaggccgaggccgccatctaccacctgcagctgttcgaggagctgagaagactggcccccatcaccagcgaccccaccgaggccaccgccgtgggcgccgtggaggccagcttcaagtgctgcagcggcgccatcatcgtgctgaccaagagcggcagaagcgcccaccaggtggccagatacagacccagagcccccatcatcgccgtgaccagaaacccccagaccgccagacaggcccacctgtacagaggcatcttccccgtgctgtgcaaggaccccgtgcaggaggcctgggccgaggacgtggacctgagagtgaacttcgccatgaacgtgggcaaggccagaggcttcttcaagaagggcgacgtggtgatcgtgctgaccggctggagacccggcagcggcttcaccaacaccatgagagtggtgcccgtgccctag

SEQ ID NO: 82508 - protein, 516 aa, Artificial Sequence
  derived and/or modified sequence
MSPEAQPQRTKGPQQPCRSPIVKPGLPSFRPSSCTQPWLTHSWSTCAAWTLIHHPSQPGTLASSVPLYHAETIKNVRTATESFASDPILYRPVAVALDTKGPEIRTGLIKGSGTAEVELKKGATLKITLDNAYMEKCDENILWLDYKNICKVVEVGSKIYVDDGLISLQVKQKGADFLVTEVENGGSLGSKKGVNLPGAAVDLPAVSEKDIQDLKFGVEQDVDMVFASFIRKASDVHEVRKVLGEKGKNIKIISKIENHEGVRRFDEILEASDGIMVARGDLGIEIPAEKVFLAQKMMIGRCNRAGKPVICATQMLESMIKKPRPTRAEGSDVANAVLDGADCIMLSGETAKGDYPLEAVRMQHLIAREAEAAIYHLQLFEELRRLAPITSDPTEATAVGAVEASFKCCSGAIIVLTKSGRSAHQVARYRPRAPIIAVTRNPQTARQAHLYRGIFPVLCKDPVQEAWAEDVDLRVNFAMNVGKARGFFKKGDVVIVLTGWRPGSGFTNTMRVVPVP

SEQ ID NO: 82509 - DNA, 1551 bp, Artificial Sequence
  derived and/or modified sequence
atgagcccagaagcacaaccacaacgcacaaagggcccccagcagccgtgccggagcccaatcgtgaagcccggcctgccttcgtttagaccatcatcttgcacccagccctggctaacacacagctggtccacttgcgccgcctggacacttatccaccacccatcccagccaggcaccttggcctcttccgtgcctctgtatcatgctgagacaattaagaatgtccggactgctacggagagcttcgcatctgatccgattctatacagacctgttgctgtcgcactggatacgaagggtcccgagatcagaaccggtctgataaagggatctggcactgctgaggttgaactgaaaaagggtgcaacgcttaagatcacgcttgataatgcatacatggagaagtgtgatgagaatatactatggctggattataagaacatttgtaaggtcgtggaggtcggctccaaaatttatgtggacgatggacttatttcccttcaggtcaagcagaagggagccgattttttagtgaccgaggtggagaacggagggagtctaggcagcaaaaagggtgtgaacctacccggcgccgccgtcgatctgccagccgtcagcgagaaggacatccaggacctgaagttcggtgtagagcaggatgtggacatggtttttgcctccttcattcgtaaggcttcagatgtgcacgaagtgcgcaaggtactgggcgaaaagggcaagaatattaagatcatttccaaaattgaaaaccatgagggagtgcggagattcgatgagatcctggaggcctcagatgggattatggtggccaggggagatctaggcatcgagataccagcagaaaaggttttcttggctcaaaaaatgatgattggacggtgtaacagggcaggaaaacctgtgatatgcgcaacccagatgttggagtcgatgattaagaaacccaggccaaccagagctgaaggctctgatgttgccaatgccgtgttggacggggcggactgcattatgctgtccggcgaaaccgccaagggtgactaccccctggaagccgtgcgcatgcagcatttgatcgccagagaggccgaagcagctatctaccatctgcaactcttcgaggagctcaggcgtcttgcacctataacttccgatcctacagaagcaacagctgtgggcgcggtagaagcttcattcaagtgctgcagcggcgcaatcatcgtgctaacaaagtccggacggagcgcccatcaggttgcgaggtaccgtcctagggcgccgataattgcggttacccggaaccctcaaacggcccgccaggctcacctataccgaggcatctttccagtgctctgtaaggatcctgtgcaagaggcctgggccgaggatgtagacctgcgagtgaacttcgcgatgaacgtgggcaaagctcgaggattcttcaagaagggcgatgtggttatcgtactgaccggatggcgccccgggagtggattcaccaacacgatgcgggtggtcccagtaccttag

SEQ ID NO: 82510 - DNA, 1551 bp, Artificial Sequence
  derived and/or modified sequence
atgagccctgaggcccagccccagaggaccaagggcccccagcagccctgccgcagccccatcgtgaagccaggcctgcccagcttccggcccagcagctgcacccagccctggctgacccacagctggagcacctgtgccgcctggaccctcatccaccaccccagccagcccggcaccctggccagctctgtgcccctgtaccacgccgagaccatcaagaatgtgaggacagccacagagagctttgccagtgaccccatcctgtacagacctgtggccgtggccctggacaccaagggccctgagatcagaacaggcctcatcaagggcagcggcacagctgaggtggagctgaagaagggggccaccctgaagatcaccctggacaatgcctacatggagaagtgtgatgagaacatcctgtggctggactacaagaacatctgcaaggtggtggaggtgggcagcaagatctacgtggatgatggcctcatcagcctgcaggtgaagcagaagggagctgacttcctggtgacagaggtggagaatggaggcagcctgggcagcaagaagggcgtgaacctgcctggagctgctgtggacctgcctgctgtgtctgagaaggacatccaggacctgaagtttggagtggagcaggatgtggacatggtgtttgccagcttcatcaggaaggccagtgatgtgcatgaggtgaggaaggtgctgggggagaagggcaagaacatcaagatcatcagcaagattgaaaatcatgaaggagtgagaagatttgatgagatcctggaggccagtgatggcatcatggtggcccggggggacctgggcatcgagatcccagctgagaaggtgttcctggcccagaagatgatgattggccgctgcaacagagctgggaagcctgtgatctgtgccacccagatgctggagagcatgatcaagaagccccggcccaccagggctgagggcagtgatgtggccaatgctgtgctggatggagctgactgcatcatgctgtctggagaaacagccaagggggactaccccctggaggccgtgaggatgcagcacctgattgcccgggaggccgaggccgccatctaccacctgcagctgtttgaggagctgcggcggctggcccccatcaccagtgaccccacagaggccacagctgtgggcgctgtggaggccagcttcaagtgctgcagcggggccatcatcgtgctgaccaagagcggccgcagcgcccaccaggtggcccgctaccggccccgggcccccatcatcgctgtgaccaggaacccccagacagcccggcaggcccacctgtaccggggcatcttccctgtgctgtgcaaggaccctgtgcaggaggcctgggccgaggatgtggacctgcgggtgaactttgccatgaatgtgggcaaggcccggggcttcttcaagaagggagatgtggtgattgtgctgaccggctggaggcctggcagcggcttcaccaacaccatgagggtggtgcctgtgccctag

SEQ ID NO: 82511 - DNA, 1551 bp, Artificial Sequence
  derived and/or modified sequence
atgagccccgaggcccagccccagcggaccaagggcccccagcagccttgcagaagtcctattgttaagcctggcctcccatcatttaggcccagtagctgcacccagccttggttgactcactcctggtcgacatgtgccgcttggactctgatccatcatccttcacagcctggaacccttgcatcctccgtgccactgtaccacgcagagaccattaaaaacgtcaggacggccacagagagttttgccagtgaccccattctgtatcggccagtcgccgtggcactagacaccaaaggccctgagatcaggaccgggctcattaagggttcggggactgcggaggtagagttaaagaagggagccacgcttaagatcactctggacaatgcttatatggaaaaatgcgacgagaacatcctgtggctcgactacaagaatatttgcaaggtagtcgaggtggggtctaagatctatgttgatgacggcctgattagcttgcaggtgaaacagaagggcgcagatttccttgtcactgaagtggaaaatgggggctcgctgggaagcaagaaaggtgtcaaccttccaggggctgctgttgatttaccggcggtatctgagaaagacatccaggatctaaaattcggcgtggagcaggacgtggatatggttttcgcctcctttatccgcaaagcatccgatgtccacgaagtccgcaaggtgcttggagagaagggcaagaacatcaagattatttctaagatagagaatcacgaaggagtgcggcgcttcgatgaaatccttgaagcgagtgatggaatcatggtcgccaggggtgacctcgggattgaaattccggcagaaaaagtgtttcttgcccagaagatgatgatcgggagatgcaatcgcgccggtaaaccagtcatctgcgccacacaaatgctggaatccatgatcaagaagccacgaccaacacgtgccgagggctcggatgtcgctaatgccgtgttagatggagcagactgcattatgctgtcaggagagactgcaaaaggggattacccactggaagccgtgagaatgcagcacctgatcgctagggaagcagaagcagctatttaccacctgcaactgttcgaggagttacgccgcctggcccctatcacctctgatcctaccgaggctactgctgtcggtgcagtggaggcatcctttaagtgttgcagcggagctattatcgtgctgacaaagagtgggcggtccgctcaccaagtcgcacgataccgaccaagagcccctatcattgctgtgacccgcaatcctcaaaccgcaagacaggcccatctctacaggggtatctttcctgtactgtgtaaggatccagtccaggaagcatgggcggaggacgtggacctacgggtgaatttcgccatgaatgttggcaaagctcgtggcttttttaagaagggcgacgttgtgattgtactcactggatggagaccaggctctggttttactaacacgatgcgcgtggtgcccgtcccctag

SEQ ID NO: 82512 - DNA, 1551 bp, Artificial Sequence
  derived and/or modified sequence
atgagcccagaagcccagccacagcgtactaagggcccacagcagccttgccggagccccatcgtgaagcccggtctgcccagcttccgacctagcagttgtacccagccctggctgacgcattcttggtccacttgtgctgcatggaccctcatccaccacccatcccaacccggaacattggcttcgtccgtgccgctataccacgctgagaccatcaagaacgtgaggacagccaccgagagcttcgctagtgatccaattctgtatcgccctgtggccgtggcacttgacaccaaagggccagagattaggactgggctgattaaaggaagtgggaccgctgaggtggagctgaagaaaggggcaacactaaagatcaccttggataacgcatacatggaaaagtgcgacgaaaacattctctggctcgactataaaaacatctgcaaagtggtggaggtggggtccaaaatatacgtcgacgatgggcttattagtctgcaggtcaagcaaaagggcgcagacttcctggttactgaggtagagaacggtggttccctaggcagcaaaaaaggggtgaatcttccaggtgctgcggtggatctgcctgcggtcagcgagaaggacattcaagatttgaaatttggagtcgagcaggatgtggatatggtgttcgcctcattcattcggaaagccagcgatgtacacgaagtgcggaaagtccttggtgagaagggtaaaaacatcaagatcatatccaaaatagagaatcacgagggcgtgaggcgcttcgatgagatacttgaagcttctgacggaatcatggtggcacgtggcgacctggggatcgagataccggctgagaaggttttcctcgcacagaagatgatgatcggtcggtgtaaccgggctggaaagcccgtgatttgcgctacccagatgctcgagagtatgataaagaaaccccgacctacgagagctgaggggagcgacgtggccaatgcagtgctggacggcgcagattgcatcatgctctcaggggagaccgccaagggcgattacccattggaggcagtccgaatgcagcacctgatcgctagagaggcagaagctgccatttaccatcttcagctttttgaggagttgcgtcgcctcgctcccattacctctgatccgacagaagctaccgctgtgggtgccgtggaggcatcatttaaatgctgctccggggctatcatcgtgctgaccaaaagcgggaggtcagctcaccaggtcgccagatatcgccctagggcccctataatagcagtgacgcgcaacccacagacagccaggcaggctcatctgtaccggggaatcttccctgtcctctgcaaggatccagtgcaggaggcctgggctgaggacgtagatttgcgagtgaacttcgccatgaacgtgggcaaagccaggggtttcttcaagaagggcgatgtagtgattgtcctgacggggtggcggccagggtcggggttcactaatacaatgagggtagtccccgtcccttag

SEQ ID NO: 82513 - DNA, 2254 bp, Artificial Sequence
  derived and/or modified sequence
gcacagcagctgcacgcgccgtggctccggatctcttcgtctttgcagcgtagcccgagtcggtcagcgccggagctctccagggcacaccgtattcagctctgagcggtctttgctagtgaggccaaggagccaccctgagccaaaaggggagcattatgtcaccggaagcccaaccccagagaaccaaaggacctcagcagccatgtcgaagccccatagtgaagccgggactgccttcattcagacccagcagctgcacgcagccatggctgacacattcctggagcacatgtgccgcctggacattgattcaccacccatcacagcccggaacactggcatcatctgtaccattgtaccatgcggagaccatcaagaatgtgcgcacagccacggaaagctttgcttctgaccccatcctctaccggcccgttgctgtggctctagacactaaaggacctgagatccgaactgggctcatcaagggcagcggcactgcagaggtggagctgaagaagggagccactctcaaaatcacgctggataacgcctacatggaaaagtgtgacgagaacatcctgtggctggactacaagaacatctgcaaggtggtggaagtgggcagcaagatctacgtggatgatgggcttatttctctccaggtgaagcagaaaggtgccgacttcctggtgacggaggtggaaaatggtggctccttgggcagcaagaagggtgtgaaccttcctggggctgctgtggacttgcctgctgtgtcggagaaggacatccaggatctgaagtttggggtcgagcaggatgttgatatggtgtttgcgtcattcatccgcaaggcatctgatgtccatgaagttaggaaggtcctgggagagaagggaaagaacatcaagattatcagcaaaatcgagaatcatgagggggttcggaggtttgatgaaatcctggaggccagtgatgggatcatggtggctcgtggtgatctaggcattgagattcctgcagagaaggtcttccttgctcagaagatgatgattggacggtgcaaccgagctgggaagcctgtcatctgtgctactcagatgctggagagcatgatcaagaagccccgccccactcgggctgaaggcagtgatgtggccaatgcagtcctggatggagccgactgcatcatgctgtctggagaaacagccaaaggggactatcctctggaggctgtgcgcatgcagcacctgattgcccgtgaggcagaggctgccatctaccacttgcaattatttgaggaactccgccgcctggcgcccattaccagcgaccccacagaagccaccgccgtgggtgccgtggaggcctccttcaagtgctgcagtggggccataatcgtcctcaccaagtctggcaggtctgctcaccaggtggccagataccgcccacgtgcccccatcattgctgtgacccggaatccccagacagctcgtcaggcccacctgtaccgtggcatcttccctgtgctgtgcaaggacccagtccaggaggcctgggctgaggacgtggacctccgggtgaactttgccatgaatgttggcaaggcccgaggcttcttcaagaagggagatgtggtcattgtgctgaccggatggcgccctggctccggcttcaccaacaccatgcgtgttgttcctgtgccgtgatggaccccagagcccctcctccagcccctgtcccacccccttcccccagcccatccattaggccagcaacgcttgtagaactcactctgggctgtaacgtggcactggtaggttgggacaccagggaagaagatcaacgcctcactgaaacatggctgtgtttgcagcctgctctagtgggacagcccagagcctggctgcccatcatgtggccccacccaatcaagggaagaaggaggaatgctggactggaggcccctggagccagatggcaagagggtgacagcttcctttcctgtgtgtactctgtccagttcctttagaaaaaatggatgcccagaggactcccaaccctggcttggggtcaagaaacagccagcaagagttaggggccttagggcactgggctgttgttccattgaagccgactctggccctggcccttacttgcttctctagctctctaggcctctccagtttgcacctgtccccaccctccactcagctgtcctgcagcaaacactccaccctccaccttccatttt

SEQ ID NO: 82514 - DNA, 1551 bp, Artificial Sequence
  derived and/or modified sequence
atgagccccgaggcccagccccagagaaccaagggcccccagcagccctgcagaagccccatcgtgaagcccggcctgcccagcttcagacccagcagctgcacccagccctggctgacccacagctggagcacctgcgccgcctggaccctgatccaccaccccagccagcccggcaccctggccagcagcgtgcccctgtaccacgccgagaccatcaagaacgtgagaaccgccaccgagagcttcgccagcgaccccatcctgtacagacccgtggccgtggccctggacaccaagggccccgagatcagaaccggcctgatcaagggcagcggcaccgccgaggtggagctgaagaagggcgccaccctgaagatcaccctggacaacgcctacatggagaagtgcgacgagaacatcctgtggctggactacaagaacatctgcaaggtggtggaggtgggcagcaagatctacgtggacgacggcctgatcagcctgcaggtgaagcagaagggcgccgacttcctggtgaccgaggtggagaacggcggcagcctgggcagcaagaagggcgtgaacctgcccggcgccgccgtggacctgcccgccgtgagcgagaaggacatccaggacctgaagttcggcgtggagcaggacgtggacatggtgttcgccagcttcatcagaaaggccagcgacgtgcacgaggtgagaaaggtgctgggcgagaagggcaagaacatcaagatcatcagcaagatcgagaaccacgagggcgtgagaagattcgacgagatcctggaggccagcgacggcatcatggtggccagaggcgacctgggcatcgagatccccgccgagaaggtgttcctggcccagaagatgatgatcggcagatgcaacagagccggcaagcccgtgatctgcgccacccagatgctggagagcatgatcaagaagcccagacccaccagagccgagggcagcgacgtggccaacgccgtgctggacggcgccgactgcatcatgctgagcggcgagaccgccaagggcgactaccccctggaggccgtgagaatgcagcacctgatcgccagagaggccgaggccgccatctaccacctgcagctgttcgaggagctgagaagactggcccccatcaccagcgaccccaccgaggccaccgccgtgggcgccgtggaggccagcttcaagtgctgcagcggcgccatcatcgtgctgaccaagagcggcagaagcgcccaccaggtggccagatacagacccagagcccccatcatcgccgtgaccagaaacccccagaccgccagacaggcccacctgtacagaggcatcttccccgtgctgtgcaaggaccccgtgcaggaggcctgggccgaggacgtggacctgagagtgaacttcgccatgaacgtgggcaaggccagaggcttcttcaagaagggcgacgtggtgatcgtgctgaccggctggagacccggcagcggcttcaccaacaccatgagagtggtgcccgtgccctag

SEQ ID NO: 82515 - DNA, 1596 bp, Artificial Sequence
  derived and/or modified sequence
atgagtaagcctcacagcgaggcaggaaccgctttcatacagacacagcagctgcacgctgccatggccgatacattcttggagcatatgtgccgattggatatcgattcccctccgattactgcccgtaataccggcattatttgtaccatcgggcctgcatcccggagtgtagagaccctcaaagagatgatcaaaagcggcatgaatgttgcaagacttaacttcagtcacggaactcacgagtatcatgctgagacaattaagaatgttagaactgccacggaatcctttgcatcggacccaatactgtacagacccgtcgccgttgcactggacacgaagggacccgagataagaacaggactgattaagggctctggcacggcagaggtagagctcaaaaaaggcgccaccctcaaaataacacttgataacgcatacatggagaagtgcgatgaaaacatcttatggttagactacaagaacatttgcaaggtcgtggaagttgggtcaaaaatctatgttgatgacgggttgatatcactccaggtcaagcagaagggagccgacttcctcgtgacagaagtggagaacggcgggagcctcgggagcaagaaaggggtgaatctccccggagccgcagtagaccttcctgccgtgtccgagaaggacatacaagaccttaagttcggggtggaacaagacgtggatatggtgttcgcctccttcattcgcaaagctagcgacgttcacgaagtgaggaaagtgctgggagagaaaggtaaaaatataaaaattatatcaaaaatcgaaaatcatgagggcgtgcggagattcgacgaaatactggaggcctccgacgggattatggtagcacgcggcgatctcgggatcgagatcccagccgaaaaagtcttcctggctcaaaaaatgatgatcgggaggtgcaatcgcgctggaaagccagtgatctgcgctacgcagatgcttgagtccatgattaaaaagcctcgccccaccagagccgagggctccgatgtggctaatgccgtgctcgacggcgcagattgtattatgctgtccggggagaccgcaaagggcgattatcccctggaggccgtcaggatgcagcacttgattgcccgtgaagcagaagccgcaatgttccacagaaaactttttgaggagcttgtgcgggcaagctcccattccactgatcttatggaagccatggccatggggtcagtggaggcctcatacaagtgtctcgctgctgctctgattgttttaactgaaagtgggcgtagtgctcaccaagtcgcccggtatagaccccgggctccaatcatcgctgtgactaggaacccccagacggctcgccaggcccatctgtacagaggtatttttccagtgttatgtaaagaccccgtgcaggaagcgtgggcagaggacgtggaccttcgggtcaactttgcaatgaacgtgggaaaggctcgggggttttttaaaaaaggagatgttgtaattgtactgacagggtggcgcccaggctctggttttacaaacaccatgagagtagtgcccgtgccgtag

SEQ ID NO: 82516 - DNA, 1596 bp, Artificial Sequence
  derived and/or modified sequence
atgtcaaaaccccattccgaggccggcaccgccttcatacagactcaacaattgcacgcagccatggcggacaccttcctagagcacatgtgtcggctggatatcgactcaccaccaatcacagctcggaacaccggaattatttgcaccatcggtcccgctagcagaagcgtggaaactctgaaagagatgatcaaatcgggaatgaatgtcgctcggttgaatttcagccatggcactcatgagtatcacgcagaaaccatcaagaacgttcgtacagctaccgaaagcttcgcctccgaccccatcttatatcgaccggtggccgtggcacttgacacaaaggggccagagatcaggaccgggctgatcaagggatcaggcaccgccgaagtcgaacttaaaaagggtgcgacactcaaaataaccctcgacaacgcatacatggaaaagtgcgacgagaacatcctgtggctggactacaaaaatatctgtaaagtggtggaagtgggctccaagatctacgtggacgatgggctgatcagtctgcaggtgaaacagaagggagctgattttctggttaccgaggtggaaaatggcggctcactgggctccaaaaaaggtgtgaatcttccaggagccgctgtcgatctccctgcggtaagtgagaaggacattcaggaccttaagttcggggtagagcaggatgttgacatggtgtttgcatcttttattcgtaaggcaagtgacgtacacgaggtgaggaaagtgttgggcgaaaaggggaagaacatcaagattattagtaaaattgaaaatcatgagggtgttaggcgctttgacgaaattctggaagcatctgacggaattatggtggctcgaggagacctgggcatcgagatccctgcagaaaaggtattcctggcgcaaaagatgatgattggacgatgcaacagggcaggcaagcctgtgatttgcgctacacagatgctcgaaagcatgatcaaaaaacccagacctacgagagcagaaggttccgacgtggcaaatgccgtgcttgatggagccgactgcattatgttgtcaggagagaccgctaaaggggactatcctttggaagccgtaagaatgcaacacctcattgctagggaagctgaggcagcaatgtttcacaggaagcttttcgaagagttagtgagggcttctagtcatagcacggacctcatggaggctatggccatgggcagtgttgaggcttcatacaagtgcctcgccgctgctctgattgtgctaactgagtccggccggagcgcccaccaagtcgctcgataccggccgagggcccccattattgccgtcacccgcaaccctcaaaccgcccgccaggcacacctgtataggggcatcttccccgtcctctgtaaagatcccgtgcaggaagcatgggcagaggacgtggacctgcgtgtcaacttcgcgatgaacgtgggcaaggccagaggctttttcaaaaaaggggacgtcgtgatcgtcctgaccggctggagaccgggatctgggttcacaaatactatgagagtagtcccagtgccttag

SEQ ID NO: 82517 - DNA, 1596 bp, Artificial Sequence
  derived and/or modified sequence
atgagcaagccccacagcgaggccggcacagccttcatccagacccagcagctgcacgccgccatggctgacaccttcctggagcacatgtgccgcctggacatcgacagcccccccatcacagccaggaacacaggcatcatctgcaccatcggccctgccagccgctctgtggagaccctgaaggagatgatcaagagcggcatgaatgtggcccggctgaacttcagccacggcacccatgagtaccacgccgagaccatcaagaatgtgaggacagccacagagagctttgccagtgaccccatcctgtacagacctgtggccgtggccctggacaccaagggccctgagatcagaacaggcctcatcaagggcagcggcacagctgaggtggagctgaagaagggggccaccctgaagatcaccctggacaatgcctacatggagaagtgtgatgagaacatcctgtggctggactacaagaacatctgcaaggtggtggaggtgggcagcaagatctacgtggatgatggcctcatcagcctgcaggtgaagcagaagggagctgacttcctggtgacagaggtggagaatggaggcagcctgggcagcaagaagggcgtgaacctgcccggggctgctgtggacctgcctgctgtgtctgagaaggacatccaggacctgaagtttggagtggagcaggatgtggacatggtgtttgccagcttcatcaggaaggccagtgatgtgcatgaggtgaggaaggtgctgggggagaagggcaagaacatcaagatcatcagcaagattgagaaccacgagggcgtgagaagatttgatgagatcctggaggccagtgatggcatcatggtggcccggggggacctgggcatcgagatcccagctgagaaggtgttcctggcccagaagatgatgattggccgctgcaacagagctgggaagcctgtgatctgtgccacccagatgctggagagcatgatcaagaagccccggcccaccagggctgagggcagtgatgtggccaatgctgtgctggatggagctgactgcatcatgctgagcggggagacagccaagggggactaccccctggaggccgtgaggatgcagcacctgattgcccgggaggccgaggccgccatgttccacaggaagctgtttgaggagctggtgcgggccagcagccacagcacagacctgatggaggccatggccatgggctctgtggaggccagctacaagtgcctggccgccgccctgattgtgctgacagagagcggccgcagcgcccaccaggtggcccgctaccggccccgggcccccatcatcgctgtgaccaggaacccccagacagcccggcaggcccacctgtaccggggcatcttccctgtgctgtgcaaggaccctgtgcaggaggcctgggccgaggatgtggacctgcgggtgaactttgccatgaatgtgggcaaggcccggggcttcttcaagaagggagatgtggtgattgtgctgaccggctggaggcctggcagcggcttcaccaacaccatgagggtggtgcctgtgccctag

SEQ ID NO: 82518 - DNA, 1596 bp, Artificial Sequence
  derived and/or modified sequence
atgagcaagccccacagcgaggccggcaccgccttcatccagacccagcagctccacgcggccatggctgacacatttctcgagcatatgtgtcgacttgatatcgactctcccccaatcactgcccgcaacacgggtattatttgcaccattggccccgcctctagaagtgtggaaacattgaaagagatgatcaaatcggggatgaacgttgctcgcctgaacttctcgcacggcactcatgaatatcatgctgaaactatcaagaatgttaggacggccacagaatctttcgcgtcagaccctatcctttatcgccccgtcgccgtggcactcgacaccaaggggccggagattcgcactgggctgataaaaggtagtggcacggcagaggtggagctcaaaaagggcgcgacacttaagataacgttggataacgcctatatggagaagtgcgacgagaacatactgtggctggattacaaaaacatttgtaaagtcgtggaagtgggaagcaaaatctacgtcgacgatggtctgattagtttacaggtgaaacagaagggcgccgacttcctggtgaccgaggtggagaatggcggaagtctgggaagcaagaagggcgtgaatctccctggagcagccgtggatctgcctgccgtgagtgaaaaggacatacaagatctcaagtttggagtggagcaggacgtggatatggtatttgccagctttatccgcaaagctagtgacgtgcatgaagttcgaaaggtactcggagagaaggggaaaaacatcaaaatcatctcgaaaattgagaatcacgaaggtgtgcggcggttcgatgagatcctggaggccagcgacggtattatggtggcccgcggcgatctggggatcgagatccccgcggagaaagtgttcctggctcagaagatgatgatcggaaggtgcaatcgagctgggaagcctgtcatttgcgccactcagatgctggaaagcatgattaaaaagccaagacccacgcgagccgagggctcggacgttgcaaatgctgtgcttgacggcgcagattgcatcatgctctcaggcgaaacagcaaaaggtgactaccctcttgaagccgtcagaatgcagcatctcatagcacgggaggccgaggcagcgatgttccacagaaagctgttcgaggaactcgtgcgagcctctagccacagtaccgatttaatggaagctatggccatggggtcagtggaggcttcctataaatgcctggccgccgcgctgatcgtgcttaccgaaagcgggagatctgcacaccaagtagccaggtatcggccaagagcaccaatcatcgccgttactaggaatcctcagaccgcgcggcaggcacacctgtaccggggcatctttccagtcttgtgcaaggaccctgttcaggaggcctgggccgaggatgtcgatctgcgcgttaattttgcgatgaatgttggcaaagctcgcgggttttttaaaaagggagatgtggtgatcgtgttgaccggatggcgccctgggtctggtttcacaaacactatgcgagttgtgccagtcccctag

SEQ ID NO: 82519 - DNA, 1596 bp, Artificial Sequence
  derived and/or modified sequence
atgagcaagccccacagcgaggccggcaccgccttcatccagacccaacagctgcatgccgctatggcggatacatttctggagcatatgtgtagactagacatagacagtcctcccatcaccgctcggaatacgggaatcatctgtaccatcggccctgcaagccgaagcgtggagacattgaaagaaatgatcaaatctggcatgaacgtggcaaggcttaatttttcacatggcacccacgagtatcacgccgaaactataaagaatgtacgcacagctacagaaagtttcgccagcgacccgatcctttacagaccagtggccgtcgcactggacactaagggcccagagatccgcactggccttatcaagggctcagggacagcggaggtagagctgaagaaaggcgcaaccctgaaaattacattggacaatgcttacatggagaagtgtgatgaaaacatactgtggctggactataagaacatctgcaaggttgtggaggtgggaagcaagatttacgtggatgacggacttatttccttgcaggtcaaacagaaaggagccgacttcctggttactgaagttgagaatggtggctccttggggtcgaaaaagggtgtcaatcttccaggtgctgctgtggatctgcccgctgtctctgagaaagacatccaggacctcaagtttggcgttgaacaggatgttgacatggtctttgccagcttcatccggaaggccagcgacgttcacgaggtccgtaaggtccttggtgagaaaggaaaaaatatcaagattatttccaaaattgaaaaccacgagggagtgcgacgctttgatgagattctggaggcgtccgacggcatcatggtcgcacgcggtgacctaggtatcgagatacctgccgaaaaggtctttctggcacagaaaatgatgatcggcaggtgcaaccgcgccggtaagcccgtgatttgcgctactcagatgctcgagagcatgataaaaaagccgcgacctacgcgtgctgagggatcagacgttgccaacgcagtgctagatggagctgactgcattatgctttctggcgaaaccgctaagggtgattatccactggaggccgttagaatgcagcatctgatcgccagggaagccgaggccgccatgttccaccgtaagttgtttgaagagctcgtccgagcctccagccactcaactgatcttatggaagccatggctatgggaagcgtggaggcatcctataagtgtcttgctgccgcgcttatcgtgctgaccgagtccggcaggtctgcccatcaggtggctaggtataggcctcgcgccccaataatcgccgtgaccagaaacccgcagacggccaggcaggctcatctgtacaggggaattttccccgtcctgtgtaaggatcccgtgcaggaagcttgggcagaggatgtcgacctaagagttaattttgcaatgaatgttggcaaggcgcgcgggtttttcaaaaagggcgacgtcgttatcgtattgacaggatggcggcccggaagcggatttaccaacacaatgcgggttgttcccgtcccctag

SEQ ID NO: 82520 - DNA, 1596 bp, Artificial Sequence
  derived and/or modified sequence
atgagcaaaccgcactctgaggcaggaaccgcttttatacagacccagcagctccacgcagcaatggctgataccttcttagagcacatgtgtaggctggacattgatagtccccctatcactgccagaaacactggcatcatttgcaccatcgggcctgcctccagatcagtcgaaactctcaaggagatgataaaatctggcatgaacgtcgcccgactgaactttagccacgggactcacgaatatcatgcggagacaataaagaacgtgaggacggctaccgagtcctttgccagcgatccaatactctatcgcccagtcgctgtggcacttgacacgaagggacctgagataagaacaggcctgattaaaggatcgggtacggcggaagtggagctgaaaaagggagctaccctgaagattaccctcgataatgcttacatggaaaagtgtgacgaaaacatcctctggctcgattataagaatatttgcaaagtggtcgaagttggctcaaagatatatgtcgatgacggcctgatttctctgcaggtgaaacagaagggagccgatttcctggtgaccgaggtcgaaaatggcggtagtttgggatcaaaaaaaggagtgaatctcccgggagccgctgtggatctaccagccgtgtccgagaaggatatccaggacctgaagttcggcgtggaacaggacgtggacatggtgtttgcctcctttattcgaaaggccagcgatgtgcacgaggtgagaaaggtactgggtgagaaaggcaagaacatcaaaatcatctcgaagatcgagaatcatgagggagtccgtcggttcgatgaaatactggaggcctctgacggaataatggtagcacgaggggacctggggatcgagataccagcagaaaaggttttcttggcccaaaaaatgatgatcgggcgttgcaatcgggcaggcaaacctgtgatttgcgccacccagatgttggagtcaatgataaaaaaaccccgtcctacgcgggctgagggcagcgacgttgcgaatgcggtgctggatggagcagattgtatcatgctcagcggagagactgcaaagggagactatcctctggaggcagtgagaatgcagcacctgatagcccgagaggccgaagcagccatgtttcaccgaaaactttttgaagaactggtcagagcttcaagccacagtactgaccttatggaggccatggccatgggcagcgtcgaagcgtcctacaagtgtcttgccgctgctttgatcgtcctcacggaaagtgggcgttcagcacaccaagtcgccagatataggcccagggcgccaataatcgccgtcacccggaatccacagactgcaagacaggcccacctttatcggggaatattccctgtgctctgtaaagatcccgtgcaagaggcatgggctgaggacgtcgacttacgcgtcaacttcgcaatgaatgttggcaaagccagaggcttttttaaaaaaggtgacgtggttatagttctcacaggctggcgccctggctcgggattcacaaacaccatgcgtgtcgtcccagtgccttag

SEQ ID NO: 82521 - DNA, 1596 bp, Artificial Sequence
  derived and/or modified sequence
atgagcaaaccccattctgaggctgggacagcatttatccagacacagcagctccacgccgctatggccgacacatttctcgagcatatgtgtagattggacatcgatagtcctccaataactgctagaaacactggtattatctgcaccatcggaccggcaagtaggagtgtggaaaccctcaaggaaatgatcaagagcggtatgaatgtcgcacgacttaatttctcccatggaacacacgagtaccatgcggagactatcaaaaacgtgcggactgccaccgaatcattcgcaagtgaccccatcctgtatcggccagttgcggttgccctggatactaaaggacccgagatccgcacaggcctgattaaagggagcggcacagctgaggttgaattgaagaagggcgcaacactcaagatcacactcgataatgcttacatggagaagtgcgatgaaaatatcttgtggctggactacaaaaatatctgcaaggtcgtagaagtgggtagtaagatttacgttgatgacggcctgattagcttgcaggtgaaacagaaaggcgctgacttcctggtaaccgaagttgagaatggtgggtcattgggttccaagaagggagttaatttgcctggagctgccgtcgacctaccagcagtgtctgaaaaggacatccaggacctgaagttcggggtggagcaggatgtcgacatggttttcgcctctttcatcaggaaagcctctgacgtccatgaggtgagaaaagtgctcggcgagaagggcaagaatatcaagatcatcagcaagatcgaaaatcatgaaggggtgcgacgcttcgacgaaatattagaagcatctgacggaattatggtcgccaggggcgacctgggcatcgaaatccccgcagaaaaggtgttcctcgcccagaagatgatgattggtagatgtaatcgagccggaaaacccgtgatctgtgcaactcaaatgctcgagagcatgattaaaaaacctcggcctacgcgggcagagggatccgacgtcgctaatgctgtgctggacggagcagactgtattatgttatcgggcgagactgcgaagggtgattacccccttgaggccgttcgaatgcagcatctaatagcacgggaggccgaggcggcaatgttccatcggaaactcttcgaggaactcgtccgagctagttcacatagcaccgacctcatggaagccatggccatgggtagcgtcgaagcatcttacaagtgccttgctgcagcactaattgtccttactgaaagtggacgtagtgcccaccaggttgccaggtaccggcctagggctcccattattgcggtcaccagaaatccccagacagcacggcaggctcacttatatcggggtatcttcccagtgctgtgcaaagacccagtgcaggaggcgtgggcagaggacgtggacctgcgcgtgaacttcgctatgaacgtgggaaaggcaaggggatttttcaagaagggtgacgtggtcatcgtactgacgggctggagaccgggaagtggcttcaccaataccatgcgagtggtccctgttccatag

SEQ ID NO: 82522 - DNA, 1596 bp, Artificial Sequence
  derived and/or modified sequence
atgagcaagccccacagcgaggccggcaccgccttcatccagacccagcagctgcacgccgccatggccgacaccttcctggagcacatgtgcagactggacatcgacagcccccccatcaccgccagaaacaccggcatcatctgcaccatcggccccgccagcagaagcgtggagaccctgaaggagatgatcaagagcggcatgaacgtggccagactgaacttcagccacggcacccacgagtaccacgccgagaccatcaagaacgtgagaaccgccaccgagagcttcgccagcgaccccatcctgtacagacccgtggccgtggccctggacaccaagggccccgagatcagaaccggcctgatcaagggcagcggcaccgccgaggtggagctgaagaagggcgccaccctgaagatcaccctggacaacgcctacatggagaagtgcgacgagaacatcctgtggctggactacaagaacatctgcaaggtggtggaggtgggcagcaagatctacgtggacgacggcctgatcagcctgcaggtgaagcagaagggcgccgacttcctggtgaccgaggtggagaacggcggcagcctgggcagcaagaagggcgtgaacctgcccggcgccgccgtggacctgcccgccgtgagcgagaaggacatccaggacctgaagttcggcgtggagcaggacgtggacatggtgttcgccagcttcatcagaaaggccagcgacgtgcacgaggtgagaaaggtgctgggcgagaagggcaagaacatcaagatcatcagcaagatcgagaaccacgagggcgtgagaagattcgacgagatcctggaggccagcgacggcatcatggtggccagaggcgacctgggcatcgagatccccgccgagaaggtgttcctggcccagaagatgatgatcggcagatgcaacagagccggcaagcccgtgatctgcgccacccagatgctggagagcatgatcaagaagcccagacccaccagagccgagggcagcgacgtggccaacgccgtgctggacggcgccgactgcatcatgctgagcggcgagaccgccaagggcgactaccccctggaggccgtgagaatgcagcacctgatcgccagagaggccgaggccgccatgttccacagaaagctgttcgaggagctggtgagagccagcagccacagcaccgacctgatggaggccatggccatgggcagcgtggaggccagctacaagtgcctggccgccgccctgatcgtgctgaccgagagcggcagaagcgcccaccaggtggccagatacagacccagagcccccatcatcgccgtgaccagaaacccccagaccgccagacaggcccacctgtacagaggcatcttccccgtgctgtgcaaggaccccgtgcaggaggcctgggccgaggacgtggacctgagagtgaacttcgccatgaacgtgggcaaggccagaggcttcttcaagaagggcgacgtggtgatcgtgctgaccggctggagacccggcagcggcttcaccaacaccatgagagtggtgcccgtgccctag

SEQ ID NO: 82523 - protein, 248 aa, Artificial Sequence
  derived and/or modified sequence
MLAVHFDKPGGPENLYVKEVAKPSPGEGEVLLKVAASALNRADLMQRQGQYDPPPGASNILGLEASGHVAELGPGCQGHWKIGDTAMALLPGGGQAQYVTVPEGLLMPIPEGLTLTQAAAIPEAWLTAFQLLHLVGNVQAGDYVLIHAGLSGVGTAAIQLTRMAGAIPLVTAGSQKKLQMAEKLGAAAGFNYKKEDFSEATLKFTKVQANAGECFHGANSASLLHGGPPTSAAGSGQNLPSDRNPGGP

SEQ ID NO: 82524 - DNA, 747 bp, Artificial Sequence
  derived and/or modified sequence
atgctggccgtgcacttcgacaagcccggcggccccgagaacctgtacgtgaaggaggtggccaagcccagccccggcgagggcgaggtgctgctgaaggtggccgccagcgccctgaacagagccgacctgatgcagagacagggccagtacgaccccccccccggcgccagcaacatcctgggcctggaggccagcggccacgtggccgagctgggccccggctgccagggccactggaagatcggcgacaccgccatggccctgctgcccggcggcggccaggcccagtacgtgaccgtgcccgagggcctgctgatgcccatccccgagggcctgaccctgacccaggccgccgccatccccgaggcctggctgaccgccttccagctgctgcacctggtgggcaacgtgcaggccggcgactacgtgctgatccacgccggcctgagcggcgtgggcaccgccgccatccagctgaccagaatggccggcgccatccccctggtgaccgccggcagccagaagaagctgcagatggccgagaagctgggcgccgccgccggcttcaactacaagaaggaggacttcagcgaggccaccctgaagttcaccaaggtgcaggccaacgccggcgagtgcttccacggcgccaacagcgccagcctgctgcacggcggcccccccaccagcgccgccggcagcggccagaacctgcccagcgacagaaaccccggcggcccctag

SEQ ID NO: 82525 - DNA, 651 bp, Artificial Sequence
  derived and/or modified sequence
ttcgacaagcccggcggccccgagaacctgtacgtgaaggaggtggccaagcccagccccggcgagggcgaggtgctgctgaaggtggccgccagcgccctgaacagagccgacctgatgcagagacagggccagtacgaccccccccccggcgccagcaacatcctgggcctggaggccagcggccacgtggccgagctgggccccggctgccagggccactggaagatcggcgacaccgccatggccctgctgcccggcggcggccaggcccagtacgtgaccgtgcccgagggcctgctgatgcccatccccgagggcctgaccctgacccaggccgccgccatccccgaggcctggctgaccgccttccagctgctgcacctggtgggcaacgtgcaggccggcgactacgtgctgatccacgccggcctgagcggcgtgggcaccgccgccatccagctgaccagaatggccggcgccatccccctggtgaccgccggcagccagaagaagctgcagatggccgagaagctgggcgccgccgccggcttcaactacaagaaggaggacttcagcgaggccaccctgaagttcaccaagggcaagcagctgctgctgcagttcagcagaaacctgagagacgactag

SEQ ID NO: 82526 - DNA, 747 bp, Artificial Sequence
  derived and/or modified sequence
atgctggcagtccactttgataagccgggcggccctgagaacctctacgtcaaagaagtggcaaagccttccccaggtgagggcgaagtgctcctgaaagtcgcggccagcgctctcaatagagctgatctcatgcagcgccagggacaatatgaccctcctccgggagctagtaacatcctaggcctggaggcctccggacacgtggccgaacttggacctggatgccagggccactggaaaatcggcgacaccgccatggccctgttacccggggggggtcaagctcaatatgtgactgtgcctgaaggactgctaatgcccattcccgagggattgaccctgactcaggctgccgccataccagaggcgtggctcacagcattccaactgctgcatctggtcgggaatgttcaagccggtgattacgttctaattcacgccgggctgtccggcgttggtacggctgccattcagctcacacggatggctggggctatccctcttgtcactgccggttcccagaagaagctgcaaatggccgaaaagcttggcgccgcggcaggcttcaattacaagaaggaagacttctctgaggccacccttaagttcacgaaagtgcaggctaatgcaggcgagtgcttccatggcgcaaatagcgcttcacttctgcatgggggcccgccaactagcgccgcgggaagtgggcagaacctgccatccgacagaaacccaggcgggccatag

SEQ ID NO: 82527 - DNA, 651 bp, Artificial Sequence
  derived and/or modified sequence
ttcgataagccgggtgggcctgagaatctgtatgtcaaggaagtggccaaaccaagcccaggtgaaggggaggtactcctgaaggtggctgcctcagccctgaaccgcgccgaccttatgcagcgtcagggtcagtacgacccacctcctggcgcctccaatatcctgggcctcgaggcatctggccacgtggctgaactggggcccggctgtcagggtcactggaaaataggagacaccgctatggctttgctcccaggaggaggccaggcccagtacgtgaccgttcccgagggcctgctgatgccaattcccgagggactgacgctaacgcaagctgccgcaattcccgaagcatggcttaccgccttccagctacttcatttggtgggcaacgtgcaagcgggagattacgtactgattcatgctgggctgtccggcgtggggactgcggcaattcagctgaccaggatggctggcgcaataccgctcgtcaccgctgggagccagaagaaactacagatggccgaaaaactgggtgccgccgctggttttaattacaagaaggaagacttctcagaggcaactctcaaattcaccaaggggaaacagctgttgctgcaatttagccgtaatttacgagatgactag

SEQ ID NO: 82528 - DNA, 747 bp, Artificial Sequence
  derived and/or modified sequence
atgctggccgtgcactttgacaagccaggcggccctgagaacctgtatgtgaaggaggtggccaagcccagccctggagagggggaggtgctgctgaaggtggccgccagcgccctgaacagagctgacctgatgcagaggcagggccagtatgaccccccacctggggccagcaacatcctgggcctggaggccagcggccacgtggccgagctgggccctggctgccagggccactggaagatcggggacacagccatggccctgctgcccggcggcggccaggcccagtatgtgacagtgcctgagggcctgctgatgcccatccctgagggcctgaccctgacccaggccgccgccatccctgaggcctggctgacagccttccagctgctgcacctggtgggcaatgtgcaggccggggactatgtgctgattcatgctggcctgtctggagtgggcacagctgccatccagctgaccaggatggccggggccatccccctggtgacagctggcagccagaagaagctgcagatggccgagaagctgggcgctgctgctggcttcaactacaagaaggaggacttcagcgaggccaccctgaagttcaccaaggtgcaggccaatgctggggagtgcttccacggggccaacagcgccagcctgctgcatggaggcccccccaccagcgctgctggcagcggccagaacctgcccagcgacagaaatcctgggggcccctag

SEQ ID NO: 82529 - DNA, 651 bp, Artificial Sequence
  derived and/or modified sequence
tttgacaagccaggcggccctgagaacctgtatgtgaaggaggtggccaagcccagccctggagagggggaggtgctgctgaaggtggccgccagcgccctgaacagagctgacctgatgcagaggcagggccagtatgaccccccacctggggccagcaacatcctgggcctggaggccagcggccacgtggccgagctgggccctggctgccagggccactggaagattggagacacagccatggccctgctgcccggcggcggccaggcccagtatgtgacagtgcctgagggcctgctgatgcccatccctgagggcctgaccctgacccaggccgccgccatccctgaggcctggctgacagccttccagctgctgcacctggtgggcaatgtgcaggccggggactatgtgctgattcatgctggcctgagcggcgtgggcacagctgccatccagctgaccaggatggccggggccatccccctggtgacagctggcagccagaagaagctgcagatggccgagaagctgggcgctgctgctggcttcaactacaagaaggaggacttcagcgaggccaccctgaagttcaccaagggcaagcagctgctgctgcagttcagcaggaacctgagagatgactag

SEQ ID NO: 82530 - DNA, 747 bp, Artificial Sequence
  derived and/or modified sequence
atgctggccgtgcacttcgacaagcccggcggccccgagaacctgtacgtgaaagaggttgcaaaacctagtcctggtgagggtgaggtcctgctgaaggtcgctgcttctgcactgaaccgggcagatctgatgcagaggcagggtcagtacgaccctcctccgggcgccagtaacatcctgggcctggaggcatccgggcacgtcgctgaactaggccccggttgtcagggccattggaaaattggcgatacggcgatggccctcctgccgggcggtggtcaggcccagtacgttaccgttcccgaggggctgctgatgcctattccagagggactgaccctcacccaagctgccgcaatccctgaagcgtggctcacagccttccagttactccatcttgtcggcaacgtacaggctggggactatgtgttgatacatgccggactgagtggcgttggtaccgcagcaatacagttgacaaggatggccggcgccattcctcttgtaactgcaggcagtcaaaagaagcttcaaatggccgagaaactgggcgccgccgctggattcaactataagaaggaagatttttctgaggctacgctgaaattcacaaaggtgcaggccaatgccggtgaatgttttcatggcgcgaattcggcttccctgttgcatgggggcccaccgaccagcgcggcaggaagtggccagaatctgccctccgataggaaccctgggggcccttag

SEQ ID NO: 82531 - DNA, 651 bp, Artificial Sequence
  derived and/or modified sequence
ttcgacaagcccggcggccccgagaacctgtacgtgaaggaggtggccaagccatcaccaggtgaaggcgaggtgctactaaaggtcgccgcatctgccttgaatagagccgatcttatgcagcgtcagggacagtatgaccctccacccggcgcgtcaaacatcctcggcctggaggcttctgggcatgttgccgagctgggtcctggctgccaaggtcattggaagattggcgacaccgccatggcactccttcccgggggaggtcaggcccaatacgtgactgtgccagaagggctccttatgccgatccccgagggcttgacgctgacccaggccgctgccatccctgaggcctggctcactgcgtttcagctgctgcacctggtgggcaacgttcaggccggggactacgtgctgatccatgcgggtctgtctggcgtggggacagccgccatccaattaaccaggatggctggcgctattccgctcgtcactgcaggaagccagaaaaagctgcagatggccgagaagcttggcgccgcggcggggtttaattacaagaaagaagacttttcggaggccacgttgaaatttacaaaaggcaaacaactgctgctgcagttctcccgtaacctgcgcgacgactag

SEQ ID NO: 82532 - DNA, 747 bp, Artificial Sequence
  derived and/or modified sequence
atgctggctgtgcatttcgacaagccaggaggccctgagaatctgtacgtcaaggaagtggcaaagccctcgcccggagagggcgaagtactcctcaaggtggccgcttctgccttaaatcgcgcagacctgatgcagagacaggggcagtatgatcctccgcctggggcatctaatatcctcggtctggaagcctccgggcatgttgcagaactgggtcccggatgccaggggcactggaagatcggtgacacagcaatggctttgctgcccggaggcggtcaagctcagtacgtcacggtccctgaaggcctcctgatgcccattccggagggactgaccctgacccaggctgccgcaatcccagaggcatggcttactgccttccagctgctgcatctagtgggtaatgtgcaagcgggagattacgtgctgatccatgcaggactgtccggcgtgggaaccgccgcaatacagctgacacggatggccggtgcaattccactcgttaccgctggctcccagaaaaaattgcagatggcagaaaaactaggtgcagctgctgggttcaattacaagaaggaggatttctctgaggccaccctgaagtttacgaaagtgcaggcaaatgctggggagtgtttccacggggcaaacagcgcaagccttctccacggaggaccccctacgtctgcagctggctcaggccagaatctcccctctgatagaaatccagggggtccttag

SEQ ID NO: 82533 - DNA, 651 bp, Artificial Sequence
  derived and/or modified sequence
ttcgacaagcctggaggacccgaaaacctgtatgttaaggaagtcgcgaagccgtcacccggtgagggcgaggtgctgctgaaggtcgcggcatctgccctgaatcgagcagacctgatgcagcgccaggggcagtacgaccctcctccaggggcaagcaatatcttgggactcgaggcctctggccacgtcgcagagctaggtcccggttgtcagggacactggaagatcggggacacagccatggccctcctccctggcggaggccaagcacagtacgtcactgtgcccgaaggactgctgatgcccatccccgaaggcctgaccctcacacaggctgccgctatacctgaagcctggctaacggcattccagctcctacacctcgtgggtaacgtgcaggccggtgattatgtgctcatccacgccggactctccggggtgggaacagcggctatccagctgactcgaatggccggtgccatccctctcgtgaccgcaggatcacaaaagaaactgcagatggccgagaagctgggggctgcggcagggtttaattacaagaaagaagacttcagtgaagcaacgctcaagttcaccaaggggaaacagctgctgctgcagttctcacgcaatctaagggacgattag

SEQ ID NO: 82534 - DNA, 1005 bp, Artificial Sequence
  derived and/or modified sequence
aggagccagaaccactcggcgccgcctggtgcatgggaggggagccgggccaggaacaatatgttagccgtgcactttgacaagccgggaggaccggaaaacctctacgtgaaggaggtggccaagccgagcccgggggagggtgaagtcctcctgaaggtggcggccagcgccctgaaccgggcggacttaatgcagagacaaggccagtatgacccacctccaggagccagcaacattttgggacttgaggcatctggacatgtggcagagctggggcctggctgccagggacactggaagatcggggacacagccatggctctgctccccggtgggggccaggctcagtacgtcactgtccccgaagggctcctcatgcctatcccagagggattgaccctgacccaggctgcagccatcccagaggcctggctcaccgccttccagctgttacatcttgtgggaaatgttcaggctggagactatgtgctaatccatgcaggactgagtggtgtgggcacagctgctatccaactcacccggatggctggagctattcctctggtcacagctggctcccagaagaagcttcaaatggcagaaaagcttggagcagctgctggattcaattacaaaaaagaggatttctctgaagcaacgctgaaattcaccaaagtacaagcaaatgctggtgaatgctttcacggagcaaattctgcctcacttctccacggagggcccccaacgtctgctgccggttctggacagaatctacccagtgaccgaaatccaggaggcccataagtacatggaggccaacaagaacataggcaagatcgtcctggaactgccccagtgaaggaggatggggcaggacaggacgcggccaccccaggcctttccagagcaaacctggagaagattcacaatagacaggccaagaaacccggtgcttcctccagagccgtttaaagctgatatgaggaaataaagagtgaactg

SEQ ID NO: 82535 - DNA, 677 bp, Artificial Sequence
  derived and/or modified sequence
tttgacaagccgggaggaccggaaaacctctacgtgaaggaggtggccaagccgagcccgggggagggtgaagtcctcctgaaggtggcggccagcgccctgaaccgggcggacttaatgcagagacaaggccagtatgacccacctccaggagccagcaacattttgggacttgaggcatctggacatgtggcagagctggggcctggctgccagggacactggaagatcggggacacagccatggctctgctccccggtgggggccaggctcagtacgtcactgtccccgaagggctcctcatgcctatcccagagggattgaccctgacccaggctgcagccatcccagaggcctggctcaccgccttccagctgttacatcttgtgggaaatgttcaggctggagactatgtgctaatccatgcaggactgagtggtgtgggcacagctgctatccaactcacccggatggctggagctattcctctggtcacagctggctcccagaagaagcttcaaatggcagaaaagcttggagcagctgctggattcaattacaaaaaagaggatttctctgaagcaacgctgaaattcaccaaaggtaaacaactgcttctacagttcagcaggaatttaagagatgattaaataaaagccccaccagtctcaaagtt

SEQ ID NO: 82536 - protein, 412 aa, Artificial Sequence
  derived and/or modified sequence
MMEGHFPQSDVIGQVLPEATTTAFEYEDEDGDRITVRSDEEMKAMLSYYYSTVMEQQVNGQLIEPLQIFPRACKPPGERNIHGLKVNTRAGPSQHSSPAVSDSLPSNSLKKSSAELKKILANGQMNEQDIRYRDTLGHGNGGTVYKAYHVPSGKILAVKVILLDITLELQKQIMSELEILYKCDSSYIIGFYGAFFVENRISICTEFMDGGSLDVYRKMPEHVLGRIAVAVVKGLTYLWSLKILHRDVKPSNMLVNTRGQVKLCDFGVSTQLVNSIAKTYVGTNAYMAPERISGEQYGIHSDVWSLGISFMELALGRFPYPQIQKNQGSLMPLQLLQCIVDEDSPVLPVGEFSEPFVHFITQCMRKQPKERPAPEELMGHPFIVQFNDGNAAVVSMWVCRALEERRSQQGPP

SEQ ID NO: 82537 - DNA, 1239 bp, Artificial Sequence
  derived and/or modified sequence
atgatggagggccatttcccccagtcagacgtgattggacaagttctcccagaagccactactacggcttttgagtacgaggatgaggatggcgaccgcattacagtgaggtcagatgaagagatgaaggctatgctcagttattattactctactgtgatggaacagcaggttaatggacaattgatcgagccgttgcagatcttcccacgggcctgcaaaccacctggtgaacgtaatattcacggcctcaaggttaatactcgggccggcccatcccagcattcctctcctgccgttagcgattctctccccagtaacagcctgaagaaaagcagcgccgagctgaagaaaattttggccaacggacagatgaatgagcaggatatcagatacagagacactctcggacatggaaacggaggcacagtgtataaggcttatcacgtgcctagcggaaagatcctggccgtgaaggtcatcctcctggacatcactctggagctccagaagcagatcatgtccgaacttgagatcttgtataagtgcgatagctcctacattattgggttctacggagccttctttgttgaaaacaggatctccatttgtacagagttcatggacggcggctctttggacgtttataggaagatgcctgaacacgtcttaggcaggatagccgtcgccgtggtgaaggggcttacctatctatggagcctgaaaatactgcatcgggacgtgaaaccttcaaacatgttagtaaacacacgaggacaggtgaagttatgtgactttggggtatcaacccagttggtgaactccatcgctaagacgtatgtgggcacaaacgcttacatggcgcccgagaggattagtggcgagcagtacggcatccattccgacgtgtggtctctcggcatctcatttatggagttagccttggggaggttcccctatcctcagatccagaagaaccaaggcagcctgatgcccctgcaattgctgcagtgcatcgtcgacgaagatagcccggtgttgccagtgggagaattctcagagccctttgtgcattttataacacaatgcatgagaaagcagccaaaggaaagacccgcccccgaagagcttatgggccacccttttatcgtccagtttaatgatggtaacgctgctgtggtgagtatgtgggtctgccgggctctggaggaaagacgctcccaacagggtcctccctag

SEQ ID NO: 82538 - DNA, 1239 bp, Artificial Sequence
  derived and/or modified sequence
atgatggagggccacttcccccagagtgatgtgattggccaggtgctgcctgaggccaccaccacagcctttgaatatgaagatgaagatggagaccgcatcaccgtgcggagtgatgaggagatgaaggccatgctgagctactactacagcacagtgatggagcagcaggtgaatggccagctgattgagcccctgcagatcttcccccgggcctgcaagcccccaggagagaggaacatccacggcctgaaggtgaacacccgggccggccccagccagcacagcagccctgctgtgtctgacagcctgcccagcaacagcctgaagaagagcagcgctgagctgaagaagatcctggccaacggccagatgaatgagcaggacatccgctacagagacaccctgggccacggcaatggaggcaccgtgtacaaggcctaccacgtgcccagcggcaagatcctggccgtgaaggtgatcctgctggacatcaccctggagctgcagaagcagatcatgtctgagctggagatcctgtacaagtgtgacagcagctacatcatcggcttctacggggccttctttgtggagaaccgcatcagcatctgcacagagttcatggatggcggcagcctggatgtgtacaggaagatgcctgagcacgtgctgggcagaattgctgtggccgtggtgaagggcctgacctacctgtggagcctgaagatcctgcacagagatgtgaagcccagcaacatgctggtgaacacccggggccaggtgaagctgtgtgactttggagtgtccacccagctggtgaacagcatcgccaagacctacgtgggcaccaatgcctacatggcccctgagcgcatctctggagagcagtatggcatccacagtgatgtgtggagcctgggcatctccttcatggagctggccctgggccgcttcccctacccccagatccagaagaaccagggcagcctgatgcccctgcagctgctgcagtgcatcgtggatgaggacagccctgtgctgcctgtgggggagttcagcgagccctttgtgcacttcatcacccagtgcatgaggaagcagcccaaggagaggcctgcccctgaggagctgatgggccaccccttcatcgtgcagttcaatgatggaaatgctgctgtggtgtccatgtgggtgtgccgggccctggaggagaggaggagccagcagggccccccatag

SEQ ID NO: 82539 - DNA, 1783 bp, Artificial Sequence
  derived and/or modified sequence
gaagttgcagccactctgctaagtgccctgcttggaaaggctgtgggctccctgctgagaaatactgcgagcggctttgtcagccggctgcctggtgccagttctgctgcagcctgggagggacactgtggcagagctcctggagagaaatgaggtttgcaggccattggagttggactggacatgatggagggtcactttccccagagcgatgtgataggccaggttctgcctgaagcaacaactacagcatttgaatatgaagatgaagatggtgatcgaattacagtgagaagtgatgaggaaatgaaggcaatgctgtcatattattattccacagtaatggaacagcaagtaaatggacagttaatagagcctctgcagatatttccaagagcctgcaagcctcctggggaacggaacatacatggcctgaaggtgaatactcgggccggaccctctcaacacagcagcccagcagtctcagattcacttccaagcaatagcttaaagaagtcttctgctgaactgaaaaaaatactagccaatggccagatgaatgaacaagacatacgatatcgggacactcttggtcatggcaacggaggcacagtctacaaagcatatcatgtcccgagtgggaaaatattagctgtaaaggtcatactactagatattacactggaacttcagaagcaaattatgtctgaattggaaattctttataagtgcgattcatcatatatcattggattttatggagcattttttgtagaaaacaggatttcaatatgtacagaattcatggatgggggatctttggatgtatataggaaaatgccagaacatgtccttggaagaattgcagtagcagttgttaaaggccttacttatttgtggagtttaaagattttacatagagacgtgaagccctccaatatgctagtaaacacaagaggacaggttaagctgtgtgattttggagttagcactcagctggtgaattctatagccaagacgtatgttggaacaaatgcttatatggcgcctgaaaggatttcaggggagcagtatggaattcattctgatgtctggagcttaggaatctcttttatggagcttgctcttgggaggtttccatatcctcagattcagaaaaaccagggatctttaatgcctctccagcttctgcagtgcattgttgatgaggattcgcccgtccttccagttggagagttctcggagccatttgtacatttcatcactcagtgtatgcgaaaacagccaaaagaaaggccagcacctgaagaattgatgggccacccgttcatcgtgcagttcaatgatggaaatgccgccgtggtgtccatgtgggtgtgccgggcgctggaggagaggcggagccagcaggggcccccgtgaggctgccgcagggcactgaaagcccaggaccagtaaccaaggagaacaacccacccgtcgcccttctccgtatgctgcctgcgccagaagagctttgctgggccctggcttccctgccctcgccttcacctctgtcagcaggtggccttgcctggggagccccatgtgtggcccaccccaccaggccatccccataccttctggtttgaaggcgctgacactggcagagaggtaaagggtggggcattgagaatggaggctcccagggtccctgcccacttctgttttcctaatgtttttctctataaagggtcaggcccgtcagcatcactgatgggaataaaagtattaatgctttgtg

SEQ ID NO: 82540 - DNA, 1239 bp, Artificial Sequence
  derived and/or modified sequence
atgatggagggccacttcccccagagcgacgtgatcggccaggtgttgccagaggccactactaccgcgtttgagtatgaggacgaggacggcgacaggatcaccgtaagatctgacgaagagatgaaggccatgctgtcctactattatagtaccgtgatggaacagcaagtcaacggccagctgatcgaaccccttcaaatattcccgcgggcttgtaagcctccgggagagcggaacattcatggccttaaggtaaatacacgggccggaccaagccaacacagctcaccagccgtatccgactcattgccaagcaatagtttgaagaagtcgtccgccgaacttaagaagatcctggctaatggacaaatgaatgagcaggacatccgatatagagatacactgggccacggcaacgggggaaccgtgtataaagcttaccatgtgccttccggcaaaatactggcggtcaaggtcatactcctcgatattaccctggaactccaaaagcagataatgagcgaactggaaatcttatataagtgcgactcatcatatatcattgggttttacggtgcttttttcgtggaaaaccggataagcatttgtacagaattcatggatggcggctcacttgacgtttacaggaaaatgcctgaacacgtcctcggacgtatcgcagtggcagtggtcaaaggtctaacctatttgtggtccctcaagatcctgcaccgggacgtgaaaccatctaacatgcttgttaacacacggggccaagttaagctgtgtgacttcggagtctcaacccagctggttaattccattgccaagacttacgtaggaactaacgcatatatggccccagaacggatttccggcgagcagtacggaattcattccgacgtatggtccctgggtattagcttcatggagctcgccctcggacgttttccttaccctcaaattcagaagaatcaagggagcctgatgcctctgcaactgcttcagtgcatcgtggatgaggattctccagtgctgccagtcggagaattttccgagccattcgtacactttatcacccagtgcatgcgcaaacaacccaaggaacggccagcacctgaagaactgatgggccacccgttcatagtccagtttaacgatggaaatgctgcggtggtgtcaatgtgggtttgccgcgcgcttgaggagcgccggagccagcaaggccctccttag

SEQ ID NO: 82541 - DNA, 1239 bp, Artificial Sequence
  derived and/or modified sequence
atgatggaaggccattttcctcagtccgacgtaatcggacaggttttgcctgaagccacaactactgctttcgaatatgaggacgaggacggggacaggatcactgtgcgcagtgatgaggagatgaaggccatgttatcctactactacagcacagtcatggagcagcaggtaaacggacagttgatcgaaccactacagatcttcccaagagcttgtaagcctcctggggaaagaaacattcatggactgaaagtcaatacccgcgctggccctagccagcatagttctcccgcagtaagtgactccctcccctctaacagcctgaagaaatcctccgcagaacttaagaagattctagccaacggccagatgaatgagcaggacatccgatacagggacactcttggtcacggtaacgggggtactgtgtacaaggcctaccacgtcccaagtgggaagatcctggcagtgaaagtgattctgttggatatcaccctggagctccagaagcagatcatgagtgagctcgagattttgtataaatgcgactcatcatacattattggattctatggcgctttttttgtcgagaatagaatctcaatatgcaccgaatttatggacgggggtagcctggatgtgtaccgcaagatgcctgaacatgtgctgggtagaattgcagtagccgttgtgaaaggcctgacatacctatggagcctgaaaatcttacaccgggacgtgaaaccaagtaatatgctcgtgaatacccgcggacaagtgaagttatgcgacttcggagtcagtacccagctagtcaatagcatcgctaagacctacgtcggaacaaacgcctatatggcgcctgagaggatcagcggcgaacaatatggcattcactccgatgtttggtccctgggaatctcttttatggaactggccttgggcagatttccatatccccagatccagaaaaaccagggaagtttgatgcctctccagctcctacaatgcatcgtggatgaggactccccagtacttcccgtgggagagttctcagagccattcgtgcactttattactcagtgcatgcgaaagcagcccaaggagcgacctgcccctgaggagctgatgggtcaccctttcatcgttcagttcaacgacgggaatgccgctgtggtctctatgtgggtgtgccgggctttggaagaacgcagatctcagcagggtccaccatag

SEQ ID NO: 82542 - DNA, 1239 bp, Artificial Sequence
  derived and/or modified sequence
atgatggagggccacttcccccagagcgacgtgatcggccaggtgctgcccgaggccaccaccaccgccttcgagtacgaggacgaggacggcgacagaatcaccgtgagaagcgacgaggagatgaaggccatgctgagctactactacagcaccgtgatggagcagcaggtgaacggccagctgatcgagcccctgcagatcttccccagagcctgcaagccccccggcgagagaaacatccacggcctgaaggtgaacaccagagccggccccagccagcacagcagccccgccgtgagcgacagcctgcccagcaacagcctgaagaagagcagcgccgagctgaagaagatcctggccaacggccagatgaacgagcaggacatcagatacagagacaccctgggccacggcaacggcggcaccgtgtacaaggcctaccacgtgcccagcggcaagatcctggccgtgaaggtgatcctgctggacatcaccctggagctgcagaagcagatcatgagcgagctggagatcctgtacaagtgcgacagcagctacatcatcggcttctacggcgccttcttcgtggagaacagaatcagcatctgcaccgagttcatggacggcggcagcctggacgtgtacagaaagatgcccgagcacgtgctgggcagaatcgccgtggccgtggtgaagggcctgacctacctgtggagcctgaagatcctgcacagagacgtgaagcccagcaacatgctggtgaacaccagaggccaggtgaagctgtgcgacttcggcgtgagcacccagctggtgaacagcatcgccaagacctacgtgggcaccaacgcctacatggcccccgagagaatcagcggcgagcagtacggcatccacagcgacgtgtggagcctgggcatcagcttcatggagctggccctgggcagattcccctacccccagatccagaagaaccagggcagcctgatgcccctgcagctgctgcagtgcatcgtggacgaggacagccccgtgctgcccgtgggcgagttcagcgagcccttcgtgcacttcatcacccagtgcatgagaaagcagcccaaggagagacccgcccccgaggagctgatgggccaccccttcatcgtgcagttcaacgacggcaacgccgccgtggtgagcatgtgggtgtgcagagccctggaggagagaagaagccagcagggccccccctag

SEQ ID NO: 82543 - protein, 494 aa, Artificial Sequence
  derived and/or modified sequence
MAEVVSPVPGAGRREPGEVGRARGPPVADPGVALSPQGEIIEGCRLPVLRRNQDNEDEWPLAEILSVKDISGRKLFYVHYIDFNKRLDEWVTHERLDLKKIQFPKKEAKTPTKNGLPGSRPGSPEREVKRKVEVVSPATPVPSETAPASVFPQNGAARRAVAAQPGRKRKSNCLGTDEDSQDSSDGIPSAPRMTGSLVSDRSHDDIVTRMKNIECIELGRHRLKPWYFSPYPQELTTLPVLYLCEFCLKYGRSLKCLQRHLTKCDLRHPPGNEIYRKGTISFFEIDGRKNKSYSQNLCLLAKCFLDHKTLYYDTDPFLFYVMTEYDCKGFHIVGYFSKEKESTEDYNVACILTLPPYQRRGYGKLLIEFSYELSKVEGKTGTPEKPLSDLGLLSYRSYWSQTILEILMGLKSESGERPQITINEISEITSIKKEDVISTLQYLNLINYYKGQYILTLSEDIVDGHERAMLKRLLRIDSKCLHFTPKDWSKRGKW

SEQ ID NO: 82544 - DNA, 1485 bp, Artificial Sequence
  derived and/or modified sequence
atggcggaagtggttagccccgtgccaggcgctggccggagggagcctggagaggtgggccgggcccgtggccccccagtcgcagaccccggagtggctctcagtccacagggcgagatcatcgagggctgcaggctgcccgttcttcggagaaatcaggacaatgaggacgaatggcctctggcagaaatcttgtctgtgaaggatatctcggggcgcaagttattctacgtgcattatattgactttaataagcggctggacgagtgggtaacccacgagcgactagacctaaagaagattcagtttcccaaaaaggaggctaagacaccaacgaagaacgggcttccaggttctcggccaggctccccagaacgggaagtgaaaagaaaagtcgaggtggtgagccctgcaacaccagtgccatcagaaaccgcgcctgctagtgtattcccccagaatggtgccgctagacgagccgtagccgcacagcctgggcggaagcgcaagtccaattgcctgggaacagacgaggactcccaggacagttcagacggcattccaagcgcaccaaggatgaccgggagcttggtaagtgacaggtctcatgacgatattgtgacgcgaatgaaaaatatcgagtgcattgagttgggaagacaccgcctgaagccttggtatttcagtccctacccccaggagctgactacgcttcccgtcttatatctgtgtgagttctgtttaaagtacggccgaagccttaagtgtctccagagacacctgaccaagtgtgatctgaggcatcctccgggaaatgaaatctatcgtaagggcacaattagcttctttgagatcgatggacggaaaaataagtcatatagtcaaaatctctgtctgctggccaaatgctttcttgatcacaagaccttgtattacgatacagacccatttttgttttacgtgatgacagagtatgattgcaaggggttccacatcgttggctactttagtaaggagaaggaaagtaccgaggactacaacgtggcttgcattctgacattacccccttaccagcggagaggatatggaaagctcctaatagagttttcctatgagctatctaaagtcgagggcaaaacaggtactcctgagaaacctctgagtgacctcggcctgttgtcataccggtcctactggagccaaaccatccttgagatcctcatgggtctcaaaagtgagtccggcgagcggccgcaaattactatcaatgagatcagtgaaattacgtcgatcaaaaaagaggacgtgatttcaaccttacagtatctcaatttgatcaactattacaagggccaatacattttgaccttgtccgaggacatcgtcgatggccatgagcgcgccatgctcaagcggctcttacgcatcgattcgaaatgcctccattttacccccaaagactggagcaaacggggtaagtggtag

SEQ ID NO: 82545 - DNA, 2059 bp, Artificial Sequence
  derived and/or modified sequence
acgtgacggactcagtagaccgccactggctgtgcacgttatggggtttccacctagggctcggcctgaggcttgtaacactccgttttcccccgagtcacaggggcagtcttgcccctcgcagctgggtcgcggtgtctctcaaaggtccccctctacaggggcttcgtgaggcccgggcccacagggcgctcggtcccggaagtgacgtctcccagaggggccggaagtggcagtggagggagggaagatggcggaggtgggggagataatcgagggctgccgcctacccgtgctgcggcggaaccaggacaacgaagatgagtggcccctggccgagatcctgagcgtgaaggacatcagtggccggaagcttttctacgtccattacattgacttcaacaaacgtctggatgaatgggtgacgcatgagcggctggacctaaagaagatccagttccccaagaaagaggccaagacccccactaagaacggacttcctgggtcccgtcctggctctccagagagagaggtgaaacggaaggtggaggtggtttcaccagcaactccagtgcccagcgagacagccccggcctcggtttttccccagaatggagccgcccgtagggcagtggcagcccagccaggacggaagcgaaaatcgaattgtttgggcactgatgaggactcccaggacagctctgatggaataccgtcagcaccacgcatgactggcagcctggtgtctgatcgaagccacgacgacatcgtcacccggatgaagaacattgagtgcattgagctgggccggcaccgcctcaagccgtggtacttctccccgtacccacaggaactcaccacattgcctgtcctctacctgtgcgagttctgcctcaagtacggccgtagtctcaagtgtcttcagcgtcatttgaccaagtgtgacctacgacatcctccaggcaatgagatttaccgcaagggcaccatctccttctttgagattgatggacgtaagaacaagagttattcccagaacctgtgtcttttggccaagtgtttccttgaccataagacactgtactatgacacagaccctttcctcttctacgtcatgacagagtatgactgtaagggcttccacatcgtgggctacttctccaaggagaaagaatcaacggaagactacaatgtggcctgcatcctaaccctgcctccctaccagcgccggggctacggcaagctgctgatcgagttcagctatgaactctccaaagtggaagggaaaacagggacccctgagaagcccctctcagaccttggcctcctatcctatcgaagctactggtcccagaccatcctggagatcctgatggggctgaagtcggagagcggggagaggccacagatcaccatcaatgagattagtgaaatcaccagcatcaagaaggaggatgtcatctccactctgcagtacctcaatctcatcaactactacaagggccagtacatcctcacactgtcagaggacatcgtggatggccatgagcgggccatgctcaagcggctcctgcggatcgactccaagtgtctgcacttcactcccaaggactggagcaagagggggaagtggtgaccagacactgcccactgcagtgccaagacggcagcaggactggggctgatagcccaccccgcccccactgcagctcccacaaagcactctaagggagatggggctgaggacagctcaaaaaggagaggacaggcctggcaggggcccactggtgcccagcaccaaggcgagctccgggctcagaccaactccaaggtcagctggccacaggcccaggcctcctctgaagcagggaccagagggagccaggcagctgtgtacagtgagaagggatccggatgggggagctctgtacagagggctggtgattgtaaaaatttcttttgtaaagtagaagttgggggtggggtgggtgctggctgcaaaaatttctggcttctcttacccctattgcccccggcaataaattgtttctatatgcca

SEQ ID NO: 82546 - DNA, 1697 bp, Artificial Sequence
  derived and/or modified sequence
ggccggaagtggcagtggagggagggaagatggcggaggtggtgagtccggtgcccggggcggggcggagggagccaggggaggtgggtagagcccgaggccccccagtagccgaccctggcgtcgcgctgtctccccagggggagataatcgagggctgccgcctacccgtgctgcggcggaaccaggacaacgaagatgagtggcccctggccgagatcctgagcgtgaaggacatcagtggccggaagcttttctacgtccattacattgacttcaacaaacgtctggatgaatgggtgacgcatgagcggctggacctaaagaagatccagttccccaagaaagaggccaagacccccactaagaacggacttcctgggtcccgtcctggctctccagagagagaggtgaaacggaaggtggaggtggtttcaccagcaactccagtgcccagcgagacagccccggcctcggtttttccccagaatggagccgcccgtagggcagtggcagcccagccaggacggaagcgaaaatcgaattgtttgggcactgatgaggactcccaggacagctctgatggaataccgtcagcaccacgcatgactggcagcctggtgtctgatcgaagccacgacgacatcgtcacccggatgaagaacattgagtgcattgagctgggccggcaccgcctcaagccgtggtacttctccccgtacccacaggaactcaccacattgcctgtcctctacctgtgcgagttctgcctcaagtacggccgtagtctcaagtgtcttcagcgtcatttgaccaagtgtgacctacgacatcctccaggcaatgagatttaccgcaagggcaccatctccttctttgagattgatggacgtaagaacaagagttattcccagaacctgtgtcttttggccaagtgtttccttgaccataagacactgtactatgacacagaccctttcctcttctacgtcatgacagagtatgactgtaagggcttccacatcgtgggctacttctccaaggagaaagaatcaacggaagactacaatgtggcctgcatcctaaccctgcctccctaccagcgccggggctacggcaagctgctgatcgagttcagctatgaactctccaaagtggaagggaaaacagggacccctgagaagcccctctcagaccttggcctcctatcctatcgaagctactggtcccagaccatcctggagatcctgatggggctgaagtcggagagcggggagaggccacagatcaccatcaatgagattagtgaaatcaccagcatcaagaaggaggatgtcatctccactctgcagtacctcaatctcatcaactactacaagggccagtacatcctcacactgtcagaggacatcgtggatggccatgagcgggccatgctcaagcggctcctgcggatcgactccaagtgtctgcacttcactcccaaggactggagcaagagggggaagtggtgaccagacactgcccactgcagtgccaagacggcagcaggactggggctgatagcccaccccgcccccactgcagctcccacaaagcactctaagggagatggggctgaggacagctcaaaaaggagaggacaggcctggcaggggcccactggtgcccagcaccaaggcgagctccgggctcag

SEQ ID NO: 82547 - DNA, 1485 bp, Artificial Sequence
  derived and/or modified sequence
atggccgaggtggtgtcccctgtgcctggagctggaagaagagagcccggggaggtgggccgggcccggggcccccctgtggccgaccccggggtggccctgagcccccagggcgagatcatcgagggctgccgcctgcctgtgctgcggaggaaccaggacaatgaagatgagtggcccctggccgagatcctgtctgtgaaggacatcagcggcaggaagctgttctacgtgcactacatcgacttcaacaagaggctggatgagtgggtgacccatgagcggctggacctgaagaagatccagttccccaagaaggaggccaagacccccaccaagaatggcctgcccggcagcaggcctggcagccctgagcgggaggtgaagaggaaggtggaggtggtgtccccagccacccctgtgcccagcgagacagccccagcctctgtgttcccccagaatggagctgcccggcgggctgtggccgcccagcccggcaggaagaggaagagcaactgcctgggcacagatgaggacagccaggacagcagtgatggcatccccagcgcccccaggatgacaggcagcctggtgtctgacaggagccatgatgacatcgtgaccaggatgaagaacatcgagtgcatcgagctgggccgccaccggctgaagccctggtacttcagcccctacccccaggagctgaccaccctgcctgtgctgtacctgtgtgagttctgcctgaagtatggccgcagcctgaagtgcctgcagaggcacctgaccaagtgtgacctgcggcaccccccaggaaatgagatctacaggaagggcaccatctccttctttgaaattgatggcaggaagaacaagagctacagccagaacctgtgcctgctggccaagtgcttcctggaccacaagaccctgtactatgacacagaccccttcctgttctacgtgatgacagaatatgactgcaagggcttccacatcgtgggctacttcagcaaggagaaggagagcacagaggactacaacgtggcctgcatcctgaccctgcccccctaccagaggcggggctacggcaagctgctgattgagttctcctatgagctgagcaaggtggagggcaagacaggcaccccagagaagcccctgagtgacctgggcctgctgagctaccgcagctactggagccagaccatcctggagatcctgatgggcctgaagtctgagagcggggagcggccccagatcaccatcaatgagatcagcgagatcaccagcatcaagaaggaggatgtgatcagcaccctgcagtacctgaacctgatcaactactacaagggccagtacatcctgaccctgtctgaagatattgtggatggccacgagcgggccatgctgaagaggctgctgagaattgacagcaagtgcctgcacttcacccccaaggactggagcaagaggggcaagtggtag

SEQ ID NO: 82548 - DNA, 1485 bp, Artificial Sequence
  derived and/or modified sequence
atggccgaggtggtgagccccgtgcccggcgccggccggcgggagccaggggaagtgggtcgagcacgtgggccaccggttgcagatcctggggtcgcacttagtccgcaaggggaaattattgaagggtgtcggctgcccgtgctacggcgcaaccaggacaatgaggacgagtggcctctcgccgagattctgtcagtgaaagacatttccggaagaaaactcttctacgtccactacatagactttaacaaacgattagacgagtgggttactcacgagcgcctggatttgaagaagatccagtttcccaagaaagaggcgaagactccaactaaaaacgggctgcccggtagccgacccggctcgcctgagcgtgaagttaaaagaaaggtggaagtcgtgagccctgcgacccccgttcctagcgagaccgcccccgcttccgtctttcctcagaacggcgcagcccgacgtgccgttgccgcgcagcccggcagaaagagaaagtccaactgtctgggaactgacgaggactctcaggatagctccgatggcatcccatctgcacctcgcatgacagggtcactagtgagcgacagaagccatgatgatatcgtgacgcggatgaagaatatcgagtgcatcgaactgggcaggcaccgtctcaagccatggtacttcagtccctacccccaagagctcacgacgcttcccgtattgtacctttgcgagttctgtctgaagtatgggcgcagtctcaagtgcctgcagcgacatctgacgaaatgtgatctgaggcatccccccgggaacgagatttaccggaagggcaccatcagtttctttgagatcgacggacgcaaaaacaaatcttacagccagaatctttgtctgttggcgaaatgctttcttgatcataagaccctctactacgatactgacccgtttctgttttacgtgatgacggagtatgattgcaaaggttttcacatcgtggggtattttagcaaagaaaaggaatcaacggaggactacaacgtggcgtgtattttgaccctgccaccctaccagcgtcgaggatacgggaagctcctcatcgaattcagctacgaactctctaaagtggaaggaaaaactggcactccagaaaagccactgtcagatcttgggttactctcataccgctcgtattggtcccagaccattctggagattctgatgggcctgaagagcgaaagcggggaacggcctcaaatcaccatcaatgagatctccgagattactagtatcaagaaggaggacgttatatcaacactgcagtatctgaacttaataaattactataaaggccagtatattcttaccttatctgaggacattgtggacggccatgagcgagcaatgctgaagcggctgctccgaatcgactcaaagtgcctccattttacgcctaaagactggtccaagcggggtaagtggtag

SEQ ID NO: 82549 - DNA, 1485 bp, Artificial Sequence
  derived and/or modified sequence
atggccgaggtggtatcgccggtgcctggagccggacgacgggaacccggtgaagtcggcagagcaagggggccaccggtagcagatcccggagtggctctcagtcctcagggagagatcattgaaggctgtcgcctcccggtgcttagaagaaaccaggataacgaggacgagtggcctctcgccgagattctttccgtgaaggatatctccggcaggaagctgttctacgttcactacatcgatttcaataagcgtttagatgaatgggtcactcacgaacgattggacttaaagaaaatacagtttccaaagaaggaagccaagacccctactaagaacggactccctggctcccggccagggagccctgagcgggaggtgaaaaggaaggtagaggtggtgtcccctgccacacccgtgccatcagaaaccgcacccgcatccgtttttccccaaaacggcgctgcacgacgtgccgtggccgcacagccaggcaggaaaaggaagtcgaactgtctgggcacagatgaagactctcaagattcgagcgacgggattccttcagctccaagaatgactggctctctggtgagcgacagaagtcacgacgacatcgtaacccgaatgaaaaacatcgagtgcatcgagttgggaagacataggctgaagccatggtacttttcaccctacccacaggagctgactacattgcctgtgctctatctatgcgaattctgcctcaagtacgggcgtagcctgaagtgcctccagcgccatctgacgaagtgcgacctgaggcacccccctggaaatgaaatctatagaaaggggacgatttctttctttgagatcgacggtagaaaaaacaagtcatactcccagaatttgtgtcttctggccaagtgttttctcgatcacaagacactgtactatgacaccgatcctttcctgttttacgtgatgactgagtacgactgcaaggggttccatatcgtgggctacttctctaaagagaaggagtccaccgaggattacaacgtcgcgtgtatacttacattaccaccctaccagcgtaggggatacggcaagctcttgatcgagttcagctacgagttgagcaaggtcgagggcaagaccggtactccagaaaaacccctgagcgacctgggcttattgtcctatagaagctactggagccaaacgattctcgaaatcctgatgggcctcaagtctgaatcaggcgagagacctcagattaccatcaacgagatcagcgaaatcacatcaattaagaaagaagacgttatatccacactccaatacctgaacctcataaattattataagggccagtacattttaactctcagtgaggacatcgtggatggacatgagcgggcaatgctgaagagattgctgagaattgattccaaatgcttgcactttacacctaaggactggagcaaacgcggaaaatggtag

SEQ ID NO: 82550 - DNA, 1485 bp, Artificial Sequence
  derived and/or modified sequence
atggccgaggtggtgagccccgtgcccggcgccggcagaagagagcccggcgaggtgggcagagccagaggcccccccgtggccgaccccggcgtggccctgagcccccagggcgagatcatcgagggctgcagactgcccgtgctgagaagaaaccaggacaacgaggacgagtggcccctggccgagatcctgagcgtgaaggacatcagcggcagaaagctgttctacgtgcactacatcgacttcaacaagagactggacgagtgggtgacccacgagagactggacctgaagaagatccagttccccaagaaggaggccaagacccccaccaagaacggcctgcccggcagcagacccggcagccccgagagagaggtgaagagaaaggtggaggtggtgagccccgccacccccgtgcccagcgagaccgcccccgccagcgtgttcccccagaacggcgccgccagaagagccgtggccgcccagcccggcagaaagagaaagagcaactgcctgggcaccgacgaggacagccaggacagcagcgacggcatccccagcgcccccagaatgaccggcagcctggtgagcgacagaagccacgacgacatcgtgaccagaatgaagaacatcgagtgcatcgagctgggcagacacagactgaagccctggtacttcagcccctacccccaggagctgaccaccctgcccgtgctgtacctgtgcgagttctgcctgaagtacggcagaagcctgaagtgcctgcagagacacctgaccaagtgcgacctgagacacccccccggcaacgagatctacagaaagggcaccatcagcttcttcgagatcgacggcagaaagaacaagagctacagccagaacctgtgcctgctggccaagtgcttcctggaccacaagaccctgtactacgacaccgaccccttcctgttctacgtgatgaccgagtacgactgcaagggcttccacatcgtgggctacttcagcaaggagaaggagagcaccgaggactacaacgtggcctgcatcctgaccctgcccccctaccagagaagaggctacggcaagctgctgatcgagttcagctacgagctgagcaaggtggagggcaagaccggcacccccgagaagcccctgagcgacctgggcctgctgagctacagaagctactggagccagaccatcctggagatcctgatgggcctgaagagcgagagcggcgagagaccccagatcaccatcaacgagatcagcgagatcaccagcatcaagaaggaggacgtgatcagcaccctgcagtacctgaacctgatcaactactacaagggccagtacatcctgaccctgagcgaggacatcgtggacggccacgagagagccatgctgaagagactgctgagaatcgacagcaagtgcctgcacttcacccccaaggactggagcaagagaggcaagtggtag

SEQ ID NO: 82551 - protein, 155 aa, Artificial Sequence
  derived and/or modified sequence
MGTRDDEYDYLFKVVLIGDSGVGKSNLLSRFTRNEFNLESKSTIGVEFATRSIQVDGKTIKAQIWDTAGQERYRAITSAYYRGAVGALLVYDIAKHLTYENVERWLKELRDHADSNIVIMLVGNKSDLRHLRAVPTDEARAFAGYNKANVRQTRK

SEQ ID NO: 82552 - DNA, 468 bp, Artificial Sequence
  derived and/or modified sequence
atggggactcgtgacgacgagtatgactacctgtttaaggtagtgctgattggtgactcgggagtggggaagtccaatctgctgagtcggtttaccagaaacgaatttaatcttgagtcaaagtcgactatcggcgtcgagttcgccaccagatccatccaggtagatggcaagactatcaaagcacaaatttgggatactgcgggccaggagagatatagggctattactagtgcctattatcggggggccgtgggagcactgttggtttatgatattgccaagcacttgacctatgaaaatgtggaacgttggcttaaagaactgcgtgaccatgctgattctaatatagtgattatgctcgtgggcaataaaagtgacctgcgccatctgcgcgcagttccaaccgatgaggcccgggcgtttgctggatataacaaggcgaatgtccgacaaacaaggaaatag

SEQ ID NO: 82553 - DNA, 468 bp, Artificial Sequence
  derived and/or modified sequence
atgggcaccagagatgatgaatatgactacctgttcaaggtggtgctgattggagacagcggcgtgggcaagagcaacctgctgagccgcttcaccagaaatgagttcaacctggagagcaagagcaccatcggcgtggagtttgccaccaggagcatccaggtggatggcaagaccatcaaggcccagatctgggacacagctggccaggagcgctaccgggccatcaccagcgcctactacagaggagctgtgggcgccctgctggtgtatgacatcgccaagcacctgacctatgaaaatgtggagcgctggctgaaggagctgcgggaccatgctgacagcaacatcgtcatcatgctggtgggcaacaagagtgacctgcggcacctgcgggctgtgcccacagatgaggcccgggcctttgctggctacaacaaggccaacgtgcggcagaccaggaagtag

SEQ ID NO: 82554 - DNA, 468 bp, Artificial Sequence
  derived and/or modified sequence
atgggcacccgggacgacgagtacgactacctgttcaaggtggtgctcattggggacagcggtgtgggcaagtccaatctgctctctcggttcactcgcaacgaattcaaccttgagagcaagtctaccattggagtagagttcgccaccagatccatccaggtagacgggaaaacaataaaggctcagatttgggatacagcgggtcaggagcggtatcgcgccatcacatccgcctattataggggcgcagtgggtgccttgcttgtgtacgacatagccaagcacctcacgtacgagaatgttgagaggtggctgaaggagctgagggatcatgctgactccaatatcgtgataatgctggtcggcaacaaaagtgacctcaggcacctgagggccgtaccaacagacgaggcccgagcgtttgcaggttacaacaaggctaacgtgcggcagacacggaagtag

SEQ ID NO: 82555 - DNA, 468 bp, Artificial Sequence
  derived and/or modified sequence
atgggaacgagggacgacgagtacgattatctgttcaaggtcgtgttgattggcgacagcggcgtgggaaaatccaacctcctatcccgatttactcgaaatgaattcaatctcgaaagcaaatcaactattggagtcgaatttgcgacccgcagtatccaggtagacgggaagacgattaaagcacaaatttgggataccgcaggccaggagcgatatcgggcaatcacaagtgcgtactacagaggcgcagtgggggcattgttggtttacgacattgcaaagcacctcacatacgagaatgttgaacggtggttgaaggaactcagggaccacgcagattcaaacattgtgatcatgctcgtaggtaacaagagtgaccttagacacctccgagctgtaccaaccgacgaagccagggccttcgcaggttataataaagcaaatgtgagacagacccgcaaatag

SEQ ID NO: 82556 - DNA, 562 bp, Artificial Sequence
  derived and/or modified sequence
gttgaagctcggcgctcgggttacccctgcagcgacgccccctggtcccacagataccactgctgctcccgccctttcgctcctcggccgcgcaatgggcacccgcgacgacgagtacgactacctctttaaagttgtccttattggagattctggtgttggaaagagtaatctcctgtctcgatttactcgaaatgagtttaatctggaaagcaagagcaccattggagtagagtttgcaacaagaagcatccaggttgatggaaaaacaataaaggcacagatatgggacacagcagggcaagagcgatatcgagctataacatcagcatattatcgtggagctgtaggtgccttattggtttatgacattgctaaacatctcacatatgaaaatgtagagcgatggctgaaagaactgagagatcatgctgatagtaacattgttatcatgcttgtgggcaataagagtgatctacgtcatctcagggcagttcctacagatgaagcaagagcttttgcaggttataataaagcaaatgtcagacagacgcgaaaatga

SEQ ID NO: 82557 - DNA, 468 bp, Artificial Sequence
  derived and/or modified sequence
atgggcaccagagacgacgagtacgactacctgttcaaggtggtgctgatcggcgacagcggcgtgggcaagagcaacctgctgagcagattcaccagaaacgagttcaacctggagagcaagagcaccatcggcgtggagttcgccaccagaagcatccaggtggacggcaagaccatcaaggcccagatctgggacaccgccggccaggagagatacagagccatcaccagcgcctactacagaggcgccgtgggcgccctgctggtgtacgacatcgccaagcacctgacctacgagaacgtggagagatggctgaaggagctgagagaccacgccgacagcaacatcgtgatcatgctggtgggcaacaagagcgacctgagacacctgagagccgtgcccaccgacgaggccagagccttcgccggctacaacaaggccaacgtgagacagaccagaaagtag

SEQ ID NO: 82558 - protein, 1448 aa, Artificial Sequence
  derived and/or modified sequence
MRILKRFLACIQLLCVCRLDWANGYYRQQRKLVEEIGWSYTGALNQKNWGKKYPTCNSPKQSPINIDEDLTQVNVNLKKLKFQGWDKTSLENTFIHNTGKTVEINLTNDYRVSGGVSEMVFKASKITFHWGKCNMSSDGSEHSLEGQKFPLEMQIYCFDADRFSSFEEAVKGKGKLRALSILFEVGTEENLDFKAIIDGVESVSRFGKQAALDPFILLNLLPNSTDKYYIYNGSLTSPPCTDTVDWIVFKDTVSISESQLAVFCEVLTMQQSGYVMLMDYLQNNFREQQYKFSRQVFSSYTGKEEIHEAVCSSEPENVQADPENYTSLLVTWERPRVVYDTMIEKFAVLYQQLDGEDQTKHEFLTDGYQDLGAILNNLLPNMSYVLQIVAICTNGLYGKYSDQLIVDMPTDNPELDLFPELIGTEEIIKEEEEGKDIEEGAIVNPGRDSATNQIRKKEPQISTTTHYNRIGTKYNEAKTNRSPTRGSEFSGKGDVPNTSLNSTSQPVTKLATEKDISLTSQTVTELPPHTVEGTSASLNDGSKTVLRSPHMNLSGTAESLNTVSITEYEEESLLTSFKLDTGAEDSSGSSPATSAIPFISENISQGYIFSSENPETITYDVLIPESARNASEDSTSSGSEESLKDPSMEGNVWFPSSTDITAQPDVGSGRESFLQTNYTEIRVDESEKTTKSFSAGPVMSQGPSVTDLEMPHYSTFAYFPTEVTPHAFTPSSRQQDLVSTVNVVYSQTTQPVYNEASNSSHESRIGLAEGLESEKKAVIPLVIVSALTFICLVVLVGILIYWRKCFQTAHFYLEDSTSPRVISTPPTPIFPISDDVGAIPIKHFPKHVADLHASSGFTEEFEEVQSCTVDLGITADSSNHPDNKHKNRYINIVAYDHSRVKLAQLAEKDGKLTDYINANYVDGYNRPKAYIAAQGPLKSTAEDFWRMIWEHNVEVIVMITNLVEKGRRKCDQYWPADGSEEYGNFLVTQKSVQVLAYYTVRNFTLRNTKIKKGSQKGRPSGRVVTQYHYTQWPDMGVPEYSLPVLTFVRKAAYAKRHAVGPVVVHCSAGVGRTGTYIVLDSMLQQIQHEGTVNIFGFLKHIRSQRNYLVQTEEQYVFIHDTLVEAILSKETEVLDSHIHAYVNALLIPGPAGKTKLEKQFQLLSQSNIQQSDYSAALKQCNREKNRTSSIIPVERSRVGISSLSGEGTDYINASYIMGYYQSNEFIITQHPLLHTIKDFWRMIWDHNAQLVVMIPDGQNMAEDEFVYWPNKDEPINCESFKVTLMAEEHKCLSNEEKLIIQDFILEATQDDYVLEVRHFQCPKWPNPDSPISKTFELISVIKEEAANRDGPMIVHDEHGGVTAGTFCALTTLMHQLEKENSVDVYQVAKMINLMRPGVFADIEQYQFLYKVILSLVSTRQEENPSTSLDSNGAALPDGNIAESLESLV

SEQ ID NO: 82559 - DNA, 4347 bp, Artificial Sequence
  derived and/or modified sequence
atgcgaatcctgaaacgctttttagcttgtatccagctgctgtgtgtttgcaggctcgattgggcgaatggctactacagacaacagcggaaactcgttgaggaaatcggatggagctataccggtgccctgaaccaaaagaattggggaaagaaatacccaacctgcaattcaccaaagcagtctcccataaatattgacgaagacctgacgcaggtgaacgtcaacctcaagaaattgaaatttcagggctgggacaagacctctctggagaatactttcatccacaatactggaaaaacagtcgagatcaatctcacaaatgattatagagtaagtggaggcgtgtcagaaatggtgtttaaggcaagtaaaataacttttcactggggaaagtgcaatatgtcatcggacggctctgagcatagtctagaggggcaaaagttccccttggagatgcaaatctactgcttcgatgctgatagattcagcagctttgaagaagcggtgaaggggaaggggaaactgagagccttgagtatcttgtttgaagtcggaaccgaggagaaccttgacttcaaggccatcattgatggcgtagaatccgtgagcagattcgggaagcaagccgccctggaccccttcattctgctgaatctcctgccaaactccaccgataaatactatatttataatggaagcctcacatcaccgccctgtaccgacaccgttgactggattgtgttcaaagacacagtgtccatctccgagtctcagctggcagtattctgcgaggtcctcacaatgcagcagtctggatacgtgatgctaatggattatttacaaaataactttagggaacagcagtataagttttcaaggcaagtctttagcagctataccggaaaggaagagatccacgaagccgtgtgctccagtgagccagaaaatgtacaggccgatccggagaactacacttctttgctcgtgacatgggagcgccctcgcgtggtctatgatactatgattgaaaagtttgctgtgctataccaacagctggacggcgaggaccagacaaagcatgaattcctgaccgacgggtatcaggatctaggggctattcttaataacctcctgcccaacatgtcctacgtattgcaaatcgttgctatctgtaccaatggcctgtacggaaaatacagtgaccagctaatagtggacatgcctactgacaacccagaacttgatctgtttcccgaattgatcggaacggaggagatcatcaaagaagaagaggagggcaaggatattgaggagggtgctatagtcaatcctggccgtgactcagccactaaccaaattaggaagaaggaaccccaaattagtaccacaacacactacaaccgaattgggactaaatataacgaggccaagacaaacagatcaccaacaagaggaagcgaattcagtgggaaaggggacgtgccgaatacttccctgaactcaacctcacagcccgttacaaaactcgcaaccgagaaagacatcagtctcacttctcaaaccgtcactgagctgcctccgcatacagtagagggcacctccgctagtctgaacgacggcagcaaaactgtacttagaagtccccatatgaacttgagtgggactgccgagagcctcaacacagtgtcaatcactgagtatgaagaagaatctcttctcacttcgtttaagcttgacacgggggcagaagattcatcaggcagtagtcccgcgacttccgccattcccttcatctccgagaacatctcacaggggtacattttctcctctgaaaatccggaaaccatcacatatgatgtactcatccccgagtctgcgcgcaacgctagtgaggatagcacatcttcagggtccgaggagtccctgaaggatccttctatggagggtaacgtatggttcccaagctctacagatatcactgctcaacccgatgtgggaagcggtcgggaatctttcctccagaccaactacacagagatcagagtcgatgagtcagagaaaacaaccaagagcttcagcgcgggtcccgtgatgagccaagggccaagtgttaccgatctcgagatgccgcactatagtactttcgcctacttccctacagaggtgacaccccacgctttcactcccagctcacgacagcaggacctcgtgtcgaccgtaaatgtggtctatagtcaaactacacagcctgtgtataacgaagcctctaattcttctcacgagtcaaggattggcctggctgagggcctggaatccgaaaagaaggccgtgattccactcgtaatagtctccgctcttactttcatatgtctggtagtcctggtcggaattctgatctactggagaaagtgctttcaaaccgctcatttctatcttgaggacagcaccagcccgcgcgtcatctccaccccaccaaccccaattttccccatctcagatgatgtaggtgccatacccataaaacatttcccgaaacacgtggctgacttacacgcaagttccgggtttactgaagaattcgaagaggtccagtcatgtactgtcgacttaggcatcactgcagactcatccaatcatcccgataataaacacaaaaaccgttatatcaatatcgtcgcttacgaccacagtagggtcaagctagcccagctagccgagaaggatggtaaattaacagattacatcaatgcaaactacgtggatggatacaataggcccaaagcctacatcgctgcccagggacctctcaagtccaccgctgaggatttctggagaatgatctgggaacataacgtagaagtcattgtgatgatcacgaatttagtggaaaaaggcagacgcaagtgtgaccagtattggcccgctgatggcagcgaggagtatggcaacttcctggtcacacaaaaaagtgtccaggtgcttgcctattatacggtccggaattttaccctgcgtaatacaaagattaagaagggttcacaaaaagggcgcccatctggccgggtggtaacacagtatcactatacacagtggccagatatgggggttcccgaatatagcttgccggtgttaacttttgttcgcaaagcagcgtatgcaaagagacatgcagtgggccctgtggtggtccactgttccgcgggggttggcagaaccgggacgtatatagtgttggactctatgttgcaacagattcagcacgaggggactgttaacatctttgggttcctcaagcacattcggagccagagaaattacctggtccagaccgaggaacaatacgtatttatacatgacaccctagttgaggctatcctgtcaaaagaaaccgaggttttggacagtcatatacacgcttatgtgaatgcgttgctgataccagggcccgcaggtaaaacaaaacttgagaaacagttccaactgttgtcacagagcaatatccaacaatctgactactctgccgccctgaagcaatgtaaccgggaaaaaaacaggaccagtagcatcatcccagtcgagaggagtcgagtcggcatttcgtcactatccggggaaggcactgattacatcaatgcctcatacatcatggggtattaccaaagtaatgaattcatcatcactcaacaccctctgttacacactattaaggatttttggaggatgatctgggaccataatgcccaactggtcgtgatgatccccgacgggcagaacatggctgaggatgaattcgtctactggccaaataaggatgaacccatcaactgcgagtcattcaaggtaactcttatggccgaggagcataagtgtctgtctaacgaagaaaaactgattatccaggactttatactggaggccacacaggatgattatgtgctggaagtgcggcactttcagtgcccgaagtggcccaatcccgactccccaatctccaagacattcgagcttatctctgtaattaaagaggaggctgccaatcgggacggccctatgattgtgcatgacgagcatggcggtgttaccgcagggaccttttgtgcactcaccacactcatgcaccagctggagaaggagaatagtgtggatgtttatcaggtcgcaaaaatgattaacctgatgcggcccggcgtctttgcagatattgagcaatatcagttcttatacaaagtcatcctgtctctcgtcagtacgcggcaggaagagaacccttctacaagcctggactccaatggcgccgcattgcctgacggtaacatcgccgaatctctggaatccttagtgtag

SEQ ID NO: 82560 - DNA, 4347 bp, Artificial Sequence
  derived and/or modified sequence
atgaggatcctgaagcgcttcctggcctgcatccagctgctgtgtgtgtgccgcctggactgggccaacggctactaccggcagcagaggaagctggtggaggagatcggctggagctacacaggagccctgaaccagaagaactggggcaagaagtaccccacctgcaacagccccaagcagagccccatcaacattgatgaggacctgacccaggtgaatgtgaacctgaagaagctgaagttccagggctgggacaagaccagcctggagaacaccttcatccacaacacaggcaagacagtggagatcaacctgaccaatgactacagagtgtctggaggagtgtctgagatggtgttcaaggccagcaagatcaccttccactggggcaagtgcaacatgagcagtgatggcagcgagcacagcctggagggccagaagttccccctggagatgcagatctactgctttgatgctgaccgcttcagcagctttgaggaggccgtgaagggcaagggcaagctgcgggccctgagcatcctgtttgaggtgggcacagaggagaacctggacttcaaggccatcattgatggagtggagagcgtgtccagatttgggaagcaggccgccctggaccccttcatcctgctgaacctgctgcccaacagcacagacaagtactacatctacaacggcagcctgaccagccccccctgcacagacacagtggactggatcgtgttcaaggacacagtgtccatcagcgagagccagctggccgtgttctgtgaggtgctgaccatgcagcagagcggctacgtgatgctgatggactacctgcagaacaacttccgggagcagcagtacaagttcagccggcaggtgttcagcagctacacaggcaaggaggagatccatgaagctgtgtgcagcagcgagccagaaaatgtgcaggccgaccctgagaactacaccagcctgctggtgacctgggagcggccccgggtggtgtatgacaccatgattgagaagtttgctgtgctgtaccagcagctggatggagaggaccagaccaagcatgagttcctgacagatggctaccaggacctgggcgccatcctgaacaacctgctgcccaacatgtcctatgtgctgcagatcgtggccatctgcaccaacggcctgtatggcaagtacagcgaccagctgattgtggacatgcccacagacaaccctgagctggacctcttccctgagctgattggaacagaggagatcatcaaggaggaggaggagggcaaggacatcgaggagggcgccatcgtgaaccctggccgggacagcgccaccaaccagatcaggaagaaggagccccagatcagcaccaccacccactacaaccgcatcggcaccaagtacaatgaggccaagaccaacagaagccccacccggggcagcgagttcagcgggaaaggagatgtgcccaacaccagcctgaacagcaccagccagcctgtgaccaagctggccacagagaaggacatcagcctgaccagccagacagtgacagagctgcccccccacacagtggagggcaccagcgccagcctgaatgatggcagcaagacagtgctgcggagcccccacatgaacctgagcggcacagctgagagcctgaacacagtgtccatcacagaatatgaggaggagagcctgctgaccagcttcaagctggacacaggagctgaggacagcagcggcagcagccctgccaccagcgccatccccttcatcagcgagaacatcagccagggctacatcttcagcagcgagaaccctgagaccatcacctatgatgtgctgatccctgagagcgccagaaatgccagcgaggacagcaccagcagcggcagcgaggagagcctgaaggaccccagcatggagggcaatgtgtggttccccagcagcacagacatcacagcccagccagatgtgggcagcggccgggagagcttcctgcagaccaactacacagagatccgggtggatgagagcgagaagaccaccaagagcttctctgctggccctgtgatgagccagggccccagcgtgacagacctggagatgccccactacagcacctttgcctacttccccacagaggtgaccccccacgccttcacccccagcagccggcagcaggacctggtgtccacagtgaatgtggtgtacagccagaccacccagcctgtgtacaatgaggccagcaacagcagccatgagagcagaattggcctggccgagggcctggagagcgagaagaaggctgtgatccccctggtgattgtgtctgccctgaccttcatctgcctggtggtgctggtgggcatcctgatctactggaggaagtgcttccagacagcccacttctacctggaggacagcaccagccccagggtcatcagcaccccacccacccccatcttccccatcagtgatgatgtgggcgccatccccatcaagcacttccccaagcacgtggccgacctgcacgccagcagcggcttcacagaggagtttgaggaggtgcagagctgcaccgtggacctgggcatcacagctgacagcagcaaccacccagacaacaagcacaagaaccgctacatcaacatcgtggcctatgaccacagccgggtgaagctggcccagctggccgagaaggatggcaagctgacagactacatcaatgccaactacgtggatggctacaaccggcccaaggcctacatcgccgcccagggccccctgaagagcacagctgaggacttctggaggatgatctgggagcacaacgtggaggtgattgtgatgatcaccaacctggtggagaagggcagaagaaaatgtgaccagtactggccagcagatggcagcgaggagtatggcaacttcctggtgacccagaagtctgtgcaggtgctggcctactacacagtgaggaacttcaccctgaggaacaccaagatcaagaagggcagccagaagggccggcccagcggccgggtggtgacccagtaccactacacccagtggccagacatgggcgtgcctgagtacagcctgcctgtgctgacctttgtgaggaaggccgcctatgccaagagacatgctgtgggccctgtggtggtgcactgcagcgctggggtgggccgcacaggcacctacatcgtgctggacagcatgctgcagcagatccagcacgagggcaccgtgaacatcttcggcttcctgaagcacatccgcagccagaggaactacctggtgcagacagaggagcagtatgtgttcatccatgacaccctggtggaggccatcctgagcaaggagacagaggtgctggacagccacatccacgcctacgtgaatgccctgctgatccctggccctgctgggaagaccaagctggagaagcagttccagctgctgagccagagcaacatccagcagagcgactacagcgctgccctgaagcagtgcaaccgggagaagaacagaaccagcagcatcatccctgtggagaggagccgggtgggcatcagcagcctgagcggggagggcacagactacatcaatgccagctacatcatgggctactaccagagcaatgagttcatcatcacccagcaccccctgctgcacaccatcaaggacttctggaggatgatctgggaccacaatgcccagctggtggtgatgatcccagatggccagaacatggccgaggatgaatttgtgtactggcccaacaaggatgagcccatcaactgtgagagcttcaaggtgaccctgatggccgaggagcacaagtgcctgagcaatgaggagaagctgatcatccaggacttcatcctggaggccacccaggatgattatgtgctggaggtgcgccacttccagtgccccaagtggcccaacccagacagccccatcagcaagacctttgagctgatcagcgtcatcaaggaggaggccgccaacagagatggccccatgattgtgcatgatgagcacggcggcgtgacagctggcaccttctgtgccctgaccaccctgatgcaccagctggagaaggaaaattctgtggatgtgtaccaggtggccaagatgatcaacctgatgaggcctggggtgtttgctgacatcgagcagtaccagttcctgtacaaggtgatcctgagcctggtgtccacccggcaggaggagaaccccagcaccagcctggacagcaatggagctgccctgcctgatggcaacattgctgagagcctggagagcctggtgtag

SEQ ID NO: 82561 - DNA, 4347 bp, Artificial Sequence
  derived and/or modified sequence
atgcggatcctgaagcggttcctggcctgcatccagctgctgtgcgtttgccgtctggactgggccaatggctattaccggcagcagcgaaaactcgtggaagagattggctggagctataccggcgccctaaaccagaaaaattggggtaaaaagtaccccacctgcaacagcccgaaacagtcccctatcaatattgacgaggatttgacccaggttaacgtcaacctcaaaaagctgaagttccagggatgggataagacgtcactggaaaacacgttcattcacaatactggaaagacagtggaaatcaacctcacaaacgattaccgcgtgtccggcggagtttcggaaatggttttcaaggcctctaaaatcaccttccactgggggaagtgcaatatgtcgtcagacggctccgagcactcccttgaggggcagaagtttccactcgagatgcagatctactgcttcgatgcagaccgattcagttcctttgaggaagctgtgaagggcaaggggaaacttcgggcactgtccatcctatttgaagtgggcacggaggaaaaccttgacttcaaggccatcatcgacggagtagagtccgtgtcacggttcggcaaacaggcagcacttgacccctttatcctactcaatctgttgcccaactccactgacaaatactacatctacaatggttctctgactagtcctccttgcacagatacagtcgactggatcgtttttaaagacacagtgagcatttcggaatcccagctagcggttttttgtgaagttcttactatgcaacagtctgggtacgtaatgttaatggattacctccagaataattttagagagcagcagtacaagttctctaggcaggtgttcagctcctacaccggtaaggaggaaattcacgaagccgtttgttcaagcgagcccgagaatgtgcaggcagatccagaaaactatactagtctgttggttacttgggagcggccccgggtcgtatacgatactatgatcgaaaagttcgccgtgctctatcagcagctggatggggaagatcaaactaaacacgagtttcttacagatgggtaccaagatttaggcgccatcctcaacaacctacttccaaacatgagctatgtgctccaaatagttgcaatatgtaccaatggcctctacggaaagtatagcgaccagttgatagtcgatatgccgaccgacaatccggagctggatctatttcccgagctcataggtacagaggagatcatcaaggaagaggaagaaggcaaagacattgaggaaggggccattgtgaacccagggcgggacagtgcaaccaaccagattcggaaaaaggagccgcaaatctccaccacaacccattataacagaataggtactaaatataacgaggccaagacaaaccgaagccctacccggggcagtgaattttccgggaaaggggatgtcccaaacacttctttaaatagcacttcacaacctgtaactaagttagctacagagaaggacattagcctgacatcacagaccgtcacagagctccccccacacaccgtggaggggacctccgccagcctcaatgatggatcaaagactgttcttagaagcccccatatgaatctgagtgggaccgcagaaagcctcaataccgtgtccattaccgaatacgaggaagagtccttactgacatcgtttaagttggatacaggcgccgaggactcctcaggctcaagccctgcaacctccgccatcccgttcatctctgaaaacattagtcaggggtatatcttctcatcagagaaccctgagacgatcacatatgacgttctgatcccggaatcagctcgaaacgctagcgaagactctacctcttctggttcagaagaaagtttaaaggatccctccatggaaggaaatgtgtggttcccgtcatcaaccgatatcacagcgcaacctgacgtcggatccggtcgcgagagcttcctccagacaaactacacagagattcgggtagacgaatccgagaagactacaaagagcttcagcgcagggccggttatgtcccaaggcccctccgtgactgacttggagatgccacattattctaccttcgcttactttccaaccgaagttacaccccatgcatttactcccagctccagacagcaggatctggtgagcacagtaaatgtcgtgtatagccaaaccacacagcctgtgtacaatgaagccagcaattcatcgcacgaaagtcggatcggactggccgagggcttagagtctgagaaaaaagcggttatcccactggtgattgtcagcgccctgaccttcatctgtctggtggtcctggtcggaatcctgatttactggaggaagtgtttccaaactgcacatttctatttagaggactccacctcaccaagggtaatcagcacccctcccactcccatctttccaatcagtgatgacgtgggagcgattcccatcaaacactttcccaaacatgtcgcagatttgcacgcatcatccggctttaccgaggagttcgaagaagtgcagtcttgcaccgtcgacctgggcattaccgccgatagcagcaatcatccggacaacaagcacaaaaatagatacattaacatcgtcgcctacgatcattcccgcgtgaagcttgctcagctggcagaaaaagatggcaagcttaccgactatatcaatgccaactacgtggatggctataacaggccgaaagcctatatcgcagcccaggggccactgaaaagcactgcagaggatttttggcgtatgatttgggagcataacgtggaggtgatcgtgatgatcactaatttggttgagaaggggaggcgcaagtgcgaccagtactggcctgctgatggcagcgaagaatatggcaatttcctcgtgacccaaaagtctgtgcaggtgctggcgtactatacagtgagaaactttaccttgcgtaatactaaaatcaagaaaggatctcagaaagggcgccccagcggtcgagtcgtcacccagtaccactacacacaatggcctgacatgggcgtcccggagtatagcctgccagtgctgacgttcgtcagaaaggccgcttacgctaagagacatgctgtagggccagtggttgtgcactgttcagctggtgttgggcggacgggtacctacattgttctggattccatgctgcagcaaatccagcacgaaggcaccgtcaacatctttggctttcttaaacacatccgatcccagcggaattacctggtacagacggaagaacagtatgtgttcatccacgacactctggtagaagctattctgtccaaagagaccgaagtcttggacagccacatccatgcatacgtcaacgctttactgattcctggtccagccggcaaaacgaagcttgaaaaacagtttcaactgctctctcagtcaaatattcagcaatctgactactcggccgcattgaagcagtgtaaccgcgaaaagaataggaccagtagtattatccctgtggaaagatcacgcgtgggtatcagtagtttgagtggagagggtactgactacatcaatgcaagttacatcatggggtattaccagtctaatgaattcatcatcacacagcacccccttctccacacgatcaaagacttttggagaatgatttgggaccacaacgctcagctggtggtgatgattcctgatggccagaacatggccgaggatgagttcgtctattggcctaacaaagacgagcctatcaactgtgaatcttttaaggtaacattgatggcggaggagcacaagtgcctctcgaacgaggaaaagctgatcatccaagacttcatactcgaggcgactcaggacgactacgtgttggaggttcgccatttccagtgcccaaaatggcctaaccctgacagcccaatctctaagacatttgaactgattagtgtgatcaaagaggaagccgcaaacagggacgggccaatgatcgttcacgatgaacacggaggagtgactgccggaacgttctgcgcgctaacaacgctgatgcaccagctcgagaaggagaatagcgtcgatgtttatcaggtggcaaagatgattaaccttatgcgacccggtgtgttcgccgacatcgaacagtatcagttcctgtacaaagtgattctgtcgcttgtctcgaccagacaggaagagaatccgtcaactagccttgattcgaatggcgctgcgctcccagacggcaacattgccgagtccttagaaagtctggtttag

SEQ ID NO: 82562 - DNA, 4347 bp, Artificial Sequence
  derived and/or modified sequence
atgagaatcctgaagcggttcctggcatgtatccagctgttgtgcgtctgtcggctggactgggccaacgggtactacagacagcaaaggaagctggtcgaggagatcggctggtcttacacaggagcccttaaccagaagaattgggggaagaagtatccaacatgtaattctccaaaacagtcacctattaacatcgacgaggatttgacacaggttaacgtaaacctgaagaaactgaaatttcagggatgggataaaacatccctggagaatacttttatacataataccggaaaaactgtggagatcaacctgaccaatgattatagagtcagtggcggagttagcgaaatggtcttcaaagcctccaaaatcaccttccactggggaaagtgcaacatgtccagcgatggctcagaacactccctggaagggcagaagtttccactggagatgcaaatttattgtttcgatgccgatagattttctagcttcgaagaagcggtgaaaggcaaaggcaaattgcgcgcactgagcatcctgttcgaggtagggaccgaagaaaatctggattttaaggcaatcattgacggcgtagaatcagtctcacggttcggcaagcaggccgcacttgaccccttcattttactcaatttgctcccaaacagcactgacaagtactacatttacaacggcagtctgacctctcccccatgtacggatacggtcgattggatcgtcttcaaagataccgtgagtatctccgaaagccaactggccgttttctgtgaagttcttaccatgcaacagagcgggtatgtgatgcttatggattatctgcaaaacaatttccgtgaacagcagtataagttcagccgccaagttttctcgagttacacagggaaggaggaaattcacgaagccgtgtgtagttctgagcctgaaaacgtgcaagccgatcctgagaattatacttcactgctggtgacatgggagcggcctagggtggtgtatgacacgatgatcgagaagttcgcggtgttgtaccagcagttggatggagaggatcaaactaaacacgagttcttaaccgacggataccaggacctgggcgcaattctgaataatttactgcctaatatgagttacgtgctgcagatcgtcgctatctgtacgaatggcctgtacgggaagtattccgaccagttgatcgtcgatatgcctacagataatcctgaactcgacctctttcccgaactcattggaaccgaagagatcattaaggaggaagaagaaggcaaggacatcgaagagggggcaatcgtcaacccagggcgtgattctgctactaaccagatcagaaaaaaagagccccagatatctacaactactcattacaacaggatcgggaccaaatataatgaagccaagacgaatcgctctcctacccgcggatctgagttttctggtaagggcgacgtgcctaatactagtttaaactcaacttcacagcctgtgacgaagctcgccaccgaaaaagacatctccctcacctcccaaaccgtcactgagctcccccctcatacagttgaggggaccagtgccagtcttaacgatggttcaaaaaccgtgttacggagcccacatatgaacctatccggaactgctgagagcctcaacacggtgtctattacagaatatgaagaggagtcccttctgacgtcctttaaactggatacaggggcagaggactcaagtggaagttctcccgctactagcgccataccattcattagcgaaaatattagccaggggtacatcttcagcagcgagaatccagaaactattacctacgatgtcctgatcccggagagcgctagaaacgctagtgaagattccacaagctccgggtctgaggaatctcttaaagatccatccatggagggaaacgtctggtttcccagttctaccgacataacagcccagccggatgtgggtagcgggagggaatccttcttgcaaaccaactatactgagatcagggtggacgaaagtgagaagactacaaagtcattctcggcgggtcccgtaatgagtcagggaccatctgtcacagatttggagatgcctcattactcaacctttgcctattttccaactgaagttaccccccatgctttcactccttctagtcgccagcaggatctggtcagcaccgtcaacgtcgtgtattcccaaactactcagcctgtgtacaacgaggcgtcaaactcttcccatgagagtagaataggcctggccgagggactggagtccgagaaaaaggctgtgatccccctagtgattgtctctgcactgacctttatctgtctggtcgtgctggtgggtatcctgatctattggagaaagtgtttccagactgcgcacttttacttagaagattccacgagcccaagggtgatttcaacacctccaactcccatctttcccataagtgatgatgtgggagccattccaattaagcacttccctaaacatgttgctgacctgcatgcgtcttcagggtttaccgaggaattcgaggaggtccagtcctgcacagttgaccttggtatcacggctgacagctctaatcacccagataacaagcacaaaaaccgttacattaatatcgtcgcctatgaccattcgcgcgtgaaactggcccagttagcagagaaggacggcaaactgaccgactacattaatgctaattacgtcgatggctacaaccgccctaaagcatatattgccgctcaaggcccacttaagtcaactgcagaggacttctggcgaatgatttgggagcacaacgtagaagtgatagtgatgattaccaacctcgtcgagaaaggaaggagaaaatgcgatcaatactggccggcagacggcagtgaagagtacggcaatttcctcgtcacccagaagtctgtacaagtgctcgcgtattataccgtacgtaatttcactctgcgcaacaccaagatcaagaagggtagtcagaaaggaagaccctccggacgggttgttacccaatatcactatacccagtggcccgacatgggcgtgcccgagtattcactccccgtcctgacatttgtccgcaaagcagcatatgccaaacggcatgccgtcggtccggtggtggtgcattgtagcgcaggcgtgggcagaaccggtacatacatagtcttggacagcatgctgcaacaaattcagcacgaggggaccgtgaatatcttcggctttttaaaacacatccggagccagaggaactatcttgtgcagactgaggagcagtacgtgtttatacatgacactctagtggaggccatccttagtaaggagacagaggtgctcgactcccatattcatgcctatgtgaatgcactactcatccctggcccagctggcaagactaagcttgaaaagcagttccaattgttgtcacaatctaacatccagcaaagcgattacagtgctgccctgaaacagtgcaaccgggagaagaatcgcacgtcatccatcattccagttgagcgatcccgggtcggcatcagctccctaagcggagaggggaccgattacataaatgcctcctacatcatggggtattaccagagtaacgagttcattattacccagcatccccttctgcatactataaaagatttctggaggatgatttgggatcataacgcgcagctcgtagtaatgatcccagatgggcaaaacatggcggaagatgagttcgtgtattggccaaacaaggatgagccaattaactgcgagtcctttaaggtgaccttgatggcagaagagcacaagtgcttaagtaacgaagagaaactgattattcaggattttatcttagaggcaacccaagacgactacgtgctggaggttcggcatttccaatgccccaaatggcctaacccagactcccctatcagcaagacatttgaactgataagcgttataaaagaagaggccgctaaccgagatggacctatgatagttcatgacgagcacgggggagtgaccgctggcacattctgtgcactgaccacactgatgcatcaacttgaaaaggagaacagtgtggatgtgtaccaagtggctaaaatgatcaatttaatgcgaccaggagtgttcgcggatattgaacagtatcaatttctctacaaggtgatcttaagccttgtttctacccggcaggaagagaatccctcaacatcgctcgactcaaatggagcggcactgccggatgggaacatcgccgaatccctcgaatccttggtgtag

SEQ ID NO: 82563 - DNA, 4627 bp, Artificial Sequence
  derived and/or modified sequence
cgcacgcacgatctcacttcgatctatacactggaggattaaaacaaacaaacaaaaaaaacatttccttcgctccccctccctctccactctgagaagcagaggagccgcacggcgaggggccgcagaccgtctggaaatgcgaatcctaaagcgtttcctcgcttgcattcagctcctctgtgtttgccgcctggattgggctaatggatactacagacaacagagaaaacttgttgaagagattggctggtcctatacaggagcactgaatcaaaaaaattggggaaagaaatatccaacatgtaatagcccaaaacaatctcctatcaatattgatgaagatcttacacaagtaaatgtgaatcttaagaaacttaaatttcagggttgggataaaacatcattggaaaacacattcattcataacactgggaaaacagtggaaattaatctcactaatgactaccgtgtcagcggaggagtttcagaaatggtgtttaaagcaagcaagataacttttcactggggaaaatgcaatatgtcatctgatggatcagagcatagtttagaaggacaaaaatttccacttgagatgcaaatctactgctttgatgcggaccgattttcaagttttgaggaagcagtcaaaggaaaagggaagttaagagctttatccattttgtttgaggttgggacagaagaaaatttggatttcaaagcgattattgatggagtcgaaagtgttagtcgttttgggaagcaggctgctttagatccattcatactgttgaaccttctgccaaactcaactgacaagtattacatttacaatggctcattgacatctcctccctgcacagacacagttgactggattgtttttaaagatacagttagcatctctgaaagccagttggctgttttttgtgaagttcttacaatgcaacaatctggttatgtcatgctgatggactacttacaaaacaattttcgagagcaacagtacaagttctctagacaggtgttttcctcatacactggaaaggaagagattcatgaagcagtttgtagttcagaaccagaaaatgttcaggctgacccagagaattataccagccttcttgttacatgggaaagacctcgagtcgtttatgataccatgattgagaagtttgcagttttgtaccagcagttggatggagaggaccaaaccaagcatgaatttttgacagatggctatcaagacttgggtgctattctcaataatttgctacccaatatgagttatgttcttcagatagtagccatatgcactaatggcttatatggaaaatacagcgaccaactgattgtcgacatgcctactgataatcctgaacttgatcttttccctgaattaattggaactgaagaaataatcaaggaggaggaagagggaaaagacattgaagaaggcgctattgtgaatcctggtagagacagtgctacaaaccaaatcaggaaaaaggaaccccagatttctaccacaacacactacaatcgcatagggacgaaatacaatgaagccaagactaaccgatccccaacaagaggaagtgaattctctggaaagggtgatgttcccaatacatctttaaattccacttcccaaccagtcactaaattagccacagaaaaagatatttccttgacttctcagactgtgactgaactgccacctcacactgtggaaggtacttcagcctctttaaatgatggctctaaaactgttcttagatctccacatatgaacttgtcggggactgcagaatccttaaatacagtttctataacagaatatgaggaggagagtttattgaccagtttcaagcttgatactggagctgaagattcttcaggctccagtcccgcaacttctgctatcccattcatctctgagaacatatcccaagggtatatattttcctccgaaaacccagagacaataacatatgatgtccttataccagaatctgctagaaatgcttccgaagattcaacttcatcaggttcagaagaatcactaaaggatccttctatggagggaaatgtgtggtttcctagctctacagacataacagcacagcccgatgttggatcaggcagagagagctttctccagactaattacactgagatacgtgttgatgaatctgagaagacaaccaagtccttttctgcaggcccagtgatgtcacagggtccctcagttacagatctggaaatgccacattattctacctttgcctacttcccaactgaggtaacacctcatgcttttaccccatcctccagacaacaggatttggtctccacggtcaacgtggtatactcgcagacaacccaaccggtatacaatgaggccagtaatagtagccatgagtctcgtattggtctagctgaggggttggaatccgagaagaaggcagttataccccttgtgatcgtgtcagccctgacttttatctgtctagtggttcttgtgggtattctcatctactggaggaaatgcttccagactgcacacttttacttagaggacagtacatcccctagagttatatccacacctccaacacctatctttccaatttcagatgatgtcggagcaattccaataaagcactttccaaagcatgttgcagatttacatgcaagtagtgggtttactgaagaatttgaggaagtgcagagctgtactgttgacttaggtattacagcagacagctccaaccacccagacaacaagcacaagaatcgatacataaatatcgttgcctatgatcatagcagggttaagctagcacagcttgctgaaaaggatggcaaactgactgattatatcaatgccaattatgttgatggctacaacagaccaaaagcttatattgctgcccaaggcccactgaaatccacagctgaagatttctggagaatgatatgggaacataatgtggaagttattgtcatgataacaaacctcgtggagaaaggaaggagaaaatgtgatcagtactggcctgccgatgggagtgaggagtacgggaactttctggtcactcagaagagtgtgcaagtgcttgcctattatactgtgaggaattttactctaagaaacacaaaaataaaaaagggctcccagaaaggaagacccagtggacgtgtggtcacacagtatcactacacgcagtggcctgacatgggagtaccagagtactccctgccagtgctgacctttgtgagaaaggcagcctatgccaagcgccatgcagtggggcctgttgtcgtccactgcagtgctggagttggaagaacaggcacatatattgtgctagacagtatgttgcagcagattcaacacgaaggaactgtcaacatatttggcttcttaaaacacatccgttcacaaagaaattatttggtacaaactgaggagcaatatgtcttcattcatgatacactggttgaggccatacttagtaaagaaactgaggtgctggacagtcatattcatgcctatgttaatgcactcctcattcctggaccagcaggcaaaacaaagctagagaaacaattccagctcctgagccagtcaaatatacagcagagtgactattctgcagccctaaagcaatgcaacagggaaaagaatcgaacttcttctatcatccctgtggaaagatcaagggttggcatttcatccctgagtggagaaggcacagactacatcaatgcctcctatatcatgggctattaccagagcaatgaattcatcattacccagcaccctctccttcataccatcaaggatttctggaggatgatatgggaccataatgcccaactggtggttatgattcctgatggccaaaacatggcagaagatgaatttgtttactggccaaataaagatgagcctataaattgtgagagctttaaggtcactcttatggctgaagaacacaaatgtctatctaatgaggaaaaacttataattcaggactttatcttagaagctacacaggatgattatgtacttgaagtgaggcactttcagtgtcctaaatggccaaatccagatagccccattagtaaaacttttgaacttataagtgttataaaagaagaagctgccaatagggatgggcctatgattgttcatgatgagcatggaggagtgacggcaggaactttctgtgctctgacaacccttatgcaccaactagaaaaagaaaattccgtggatgtttaccaggtagccaagatgatcaatctgatgaggccaggagtctttgctgacattgagcagtatcagtttctctacaaagtgatcctcagccttgtgagcacaaggcaggaagagaatccatccacctctctggacagtaatggtgcagcattgcctgatggaaatatagctgagagcttagagtctttagtttaacacagaaaggggtgggggaactcacatctgagcattgttttcctcttcctaaaattaggcaggaaaatcagtctagttctgttatctgttgatttcccatcacctgacagtaactttcatgacataggattctgccgccaa

SEQ ID NO: 82564 - DNA, 4347 bp, Artificial Sequence
  derived and/or modified sequence
atgagaatcctgaagagattcctggcctgcatccagctgctgtgcgtgtgcagactggactgggccaacggctactacagacagcagagaaagctggtggaggagatcggctggagctacaccggcgccctgaaccagaagaactggggcaagaagtaccccacctgcaacagccccaagcagagccccatcaacatcgacgaggacctgacccaggtgaacgtgaacctgaagaagctgaagttccagggctgggacaagaccagcctggagaacaccttcatccacaacaccggcaagaccgtggagatcaacctgaccaacgactacagagtgagcggcggcgtgagcgagatggtgttcaaggccagcaagatcaccttccactggggcaagtgcaacatgagcagcgacggcagcgagcacagcctggagggccagaagttccccctggagatgcagatctactgcttcgacgccgacagattcagcagcttcgaggaggccgtgaagggcaagggcaagctgagagccctgagcatcctgttcgaggtgggcaccgaggagaacctggacttcaaggccatcatcgacggcgtggagagcgtgagcagattcggcaagcaggccgccctggaccccttcatcctgctgaacctgctgcccaacagcaccgacaagtactacatctacaacggcagcctgaccagccccccctgcaccgacaccgtggactggatcgtgttcaaggacaccgtgagcatcagcgagagccagctggccgtgttctgcgaggtgctgaccatgcagcagagcggctacgtgatgctgatggactacctgcagaacaacttcagagagcagcagtacaagttcagcagacaggtgttcagcagctacaccggcaaggaggagatccacgaggccgtgtgcagcagcgagcccgagaacgtgcaggccgaccccgagaactacaccagcctgctggtgacctgggagagacccagagtggtgtacgacaccatgatcgagaagttcgccgtgctgtaccagcagctggacggcgaggaccagaccaagcacgagttcctgaccgacggctaccaggacctgggcgccatcctgaacaacctgctgcccaacatgagctacgtgctgcagatcgtggccatctgcaccaacggcctgtacggcaagtacagcgaccagctgatcgtggacatgcccaccgacaaccccgagctggacctgttccccgagctgatcggcaccgaggagatcatcaaggaggaggaggagggcaaggacatcgaggagggcgccatcgtgaaccccggcagagacagcgccaccaaccagatcagaaagaaggagccccagatcagcaccaccacccactacaacagaatcggcaccaagtacaacgaggccaagaccaacagaagccccaccagaggcagcgagttcagcggcaagggcgacgtgcccaacaccagcctgaacagcaccagccagcccgtgaccaagctggccaccgagaaggacatcagcctgaccagccagaccgtgaccgagctgcccccccacaccgtggagggcaccagcgccagcctgaacgacggcagcaagaccgtgctgagaagcccccacatgaacctgagcggcaccgccgagagcctgaacaccgtgagcatcaccgagtacgaggaggagagcctgctgaccagcttcaagctggacaccggcgccgaggacagcagcggcagcagccccgccaccagcgccatccccttcatcagcgagaacatcagccagggctacatcttcagcagcgagaaccccgagaccatcacctacgacgtgctgatccccgagagcgccagaaacgccagcgaggacagcaccagcagcggcagcgaggagagcctgaaggaccccagcatggagggcaacgtgtggttccccagcagcaccgacatcaccgcccagcccgacgtgggcagcggcagagagagcttcctgcagaccaactacaccgagatcagagtggacgagagcgagaagaccaccaagagcttcagcgccggccccgtgatgagccagggccccagcgtgaccgacctggagatgccccactacagcaccttcgcctacttccccaccgaggtgaccccccacgccttcacccccagcagcagacagcaggacctggtgagcaccgtgaacgtggtgtacagccagaccacccagcccgtgtacaacgaggccagcaacagcagccacgagagcagaatcggcctggccgagggcctggagagcgagaagaaggccgtgatccccctggtgatcgtgagcgccctgaccttcatctgcctggtggtgctggtgggcatcctgatctactggagaaagtgcttccagaccgcccacttctacctggaggacagcaccagccccagagtgatcagcaccccccccacccccatcttccccatcagcgacgacgtgggcgccatccccatcaagcacttccccaagcacgtggccgacctgcacgccagcagcggcttcaccgaggagttcgaggaggtgcagagctgcaccgtggacctgggcatcaccgccgacagcagcaaccaccccgacaacaagcacaagaacagatacatcaacatcgtggcctacgaccacagcagagtgaagctggcccagctggccgagaaggacggcaagctgaccgactacatcaacgccaactacgtggacggctacaacagacccaaggcctacatcgccgcccagggccccctgaagagcaccgccgaggacttctggagaatgatctgggagcacaacgtggaggtgatcgtgatgatcaccaacctggtggagaagggcagaagaaagtgcgaccagtactggcccgccgacggcagcgaggagtacggcaacttcctggtgacccagaagagcgtgcaggtgctggcctactacaccgtgagaaacttcaccctgagaaacaccaagatcaagaagggcagccagaagggcagacccagcggcagagtggtgacccagtaccactacacccagtggcccgacatgggcgtgcccgagtacagcctgcccgtgctgaccttcgtgagaaaggccgcctacgccaagagacacgccgtgggccccgtggtggtgcactgcagcgccggcgtgggcagaaccggcacctacatcgtgctggacagcatgctgcagcagatccagcacgagggcaccgtgaacatcttcggcttcctgaagcacatcagaagccagagaaactacctggtgcagaccgaggagcagtacgtgttcatccacgacaccctggtggaggccatcctgagcaaggagaccgaggtgctggacagccacatccacgcctacgtgaacgccctgctgatccccggccccgccggcaagaccaagctggagaagcagttccagctgctgagccagagcaacatccagcagagcgactacagcgccgccctgaagcagtgcaacagagagaagaacagaaccagcagcatcatccccgtggagagaagcagagtgggcatcagcagcctgagcggcgagggcaccgactacatcaacgccagctacatcatgggctactaccagagcaacgagttcatcatcacccagcaccccctgctgcacaccatcaaggacttctggagaatgatctgggaccacaacgcccagctggtggtgatgatccccgacggccagaacatggccgaggacgagttcgtgtactggcccaacaaggacgagcccatcaactgcgagagcttcaaggtgaccctgatggccgaggagcacaagtgcctgagcaacgaggagaagctgatcatccaggacttcatcctggaggccacccaggacgactacgtgctggaggtgagacacttccagtgccccaagtggcccaaccccgacagccccatcagcaagaccttcgagctgatcagcgtgatcaaggaggaggccgccaacagagacggccccatgatcgtgcacgacgagcacggcggcgtgaccgccggcaccttctgcgccctgaccaccctgatgcaccagctggagaaggagaacagcgtggacgtgtaccaggtggccaagatgatcaacctgatgagacccggcgtgttcgccgacatcgagcagtaccagttcctgtacaaggtgatcctgagcctggtgagcaccagacaggaggagaaccccagcaccagcctggacagcaacggcgccgccctgcccgacggcaacatcgccgagagcctggagagcctggtgtag

SEQ ID NO: 82565 - protein, 453 aa, Artificial Sequence
  derived and/or modified sequence
MRFVVALVLLNVAAAGAVPLLATESVKQEEAGVRPSAGNVSTHPSLSQRPGGSTKSHPEPQTPKDSPSKSSAEAQTPEDTPNKSGAEAKTQKDSSNKSGAEAKTQKGSTSKSGSEAQTTKDSTSKSHPELQTPKDSTGKSGAEAQTPEDSPNRSGAEAKTQKDSPSKSGSEAQTTKDVPNKSGADGQTPKDGSSKSGAEDQTPKDVPNKSGAEKQTPKDGSNKSGAEEQGPIDGPSKSGAEEQTSKDSPNKVVPEQPSRKDHSKPISNPSDNKELPKADTNQLADKGKLSPHAFKTESGEETDLISPPQEEVKSSEPTEDVEPKEAEDDDTGPEEGSPPKEEKEKMSGSASSENREGTLSDSTGSEKDDLYPNGSGNGSAESSHFFAYLVTAAILVAVLYIAHHNKRKIIAFVLEGKRSKVTRRPKASDYQRLDQKIFFPLSPNRMVYSSGKR

SEQ ID NO: 82566 - DNA, 1362 bp, Artificial Sequence
  derived and/or modified sequence
atgagattcgtggtggccctggtgctgctgaacgtggccgccgccggcgccgtgcccctgctggccaccgagagcgtgaagcaggaggaggccggcgtgagacccagcgccggcaacgtgagcacccaccccagcctgagccagagacccggcggcagcaccaagagccaccccgagccccagacccccaaggacagccccagcaagagcagcgccgaggcccagacccccgaggacacccccaacaagagcggcgccgaggccaagacccagaaggacagcagcaacaagagcggcgccgaggccaagacccagaagggcagcaccagcaagagcggcagcgaggcccagaccaccaaggacagcaccagcaagagccaccccgagctgcagacccccaaggacagcaccggcaagagcggcgccgaggcccagacccccgaggacagccccaacagaagcggcgccgaggccaagacccagaaggacagccccagcaagagcggcagcgaggcccagaccaccaaggacgtgcccaacaagagcggcgccgacggccagacccccaaggacggcagcagcaagagcggcgccgaggaccagacccccaaggacgtgcccaacaagagcggcgccgagaagcagacccccaaggacggcagcaacaagagcggcgccgaggagcagggccccatcgacggccccagcaagagcggcgccgaggagcagaccagcaaggacagccccaacaaggtggtgcccgagcagcccagcagaaaggaccacagcaagcccatcagcaaccccagcgacaacaaggagctgcccaaggccgacaccaaccagctggccgacaagggcaagctgagcccccacgccttcaagaccgagagcggcgaggagaccgacctgatcagccccccccaggaggaggtgaagagcagcgagcccaccgaggacgtggagcccaaggaggccgaggacgacgacaccggccccgaggagggcagcccccccaaggaggagaaggagaagatgagcggcagcgccagcagcgagaacagagagggcaccctgagcgacagcaccggcagcgagaaggacgacctgtaccccaacggcagcggcaacggcagcgccgagagcagccacttcttcgcctacctggtgaccgccgccatcctggtggccgtgctgtacatcgcccaccacaacaagagaaagatcatcgccttcgtgctggagggcaagagaagcaaggtgaccagaagacccaaggccagcgactaccagagactggaccagaagatcttcttccccctgagccccaacagaatggtgtacagcagcggcaagagatag

SEQ ID NO: 82567 - DNA, 1362 bp, Artificial Sequence
  derived and/or modified sequence
atgcgtttcgtggtggcattggtcttgctgaacgtggccgctgcaggcgcagtgcccttattggctacggaatctgtaaaacaggaggaggccggggtgagaccttctgccggtaacgtaagtacacacccatccttgtcacaacgccccggggggtcaacaaagtcgcaccctgaaccccagacaccgaaggacagcccatctaagtcatcagctgaggcacagacaccagaagacactcctaataaaagcggggcagaggccaagactcagaaagactcttctaataaatccggagctgaggctaagacccaaaaggggtctacttcaaagtcaggctccgaagcccagacaaccaaggattctacgtccaagtctcaccctgaactccagacgcctaaagacagcaccggtaagtccggtgctgaagcccagacgccagaggattcgccaaaccgcagcggtgccgaagccaagacacaaaaagattcacccagcaagagtgggagcgaggcccaaaccacaaaagacgtgcccaacaagtctggagcggacggacagacgccgaaggacggctctagcaagagcggcgccgaggaccagactcccaaggatgtccccaacaagtctggtgcagagaagcagacccccaaagacggttcaaataagtcgggggcggaggagcagggacctatcgacggaccaagtaaaagcggtgccgaggaacagacgtccaaggacagtcccaataaggtggtgcccgagcagcctagtagaaaggaccactcaaaaccgattagcaatcccagcgataacaaggaactgcctaaagccgatacgaaccagctggctgataaaggaaagctgagtcctcacgcttttaaaacagaaagtggcgaagagacagacctgatctcaccaccacaggaagaggttaagagcagcgaacccacagaagacgtggagccgaaggaagctgaggacgacgacacaggaccagaggagggaagcccaccaaaagaggaaaaggagaagatgtcagggtccgcgtcatcagaaaatcgtgaaggaaccctgtcggattccactggctctgagaaggacgacctgtatcctaatgggtcggggaacggatccgccgaaagttcacattttttcgcctatctcgtgaccgccgcaatcctcgtcgccgttctctacattgcccatcacaacaagagaaaaatcatcgcattcgtgctcgaggggaagcggagcaaagtgacccgacgtccaaaggccagcgactaccaaagactagatcagaagattttttttcctctgagccccaatagaatggtctattcatcaggaaagagatag

SEQ ID NO: 82568 - DNA, 1362 bp, Artificial Sequence
  derived and/or modified sequence
atgagatttgtggtggccctggtgctgctgaatgtggccgctgctggagctgtgcccctgctggccacagaatctgtgaagcaggaggaggccggcgtgcggcccagcgctggaaatgtgtccacccaccccagcctgagccagaggcctgggggcagcaccaagagccaccctgagccccagacccccaaggacagccccagcaagagcagcgctgaggcccagaccccagaggacacccccaacaagagcggggctgaggccaagacccagaaggacagcagcaacaagagcggggctgaggccaagacccagaagggcagcaccagcaagagcggcagcgaggcccagaccaccaaggacagcaccagcaagagccaccctgagctgcagacccccaaggacagcacaggcaagagcggggctgaggcccagaccccagaggacagccccaacagaagtggagctgaggccaagacccagaaggacagccccagcaagagcggcagcgaggcccagaccaccaaggatgtgcccaacaagagcggggctgatggccagacccccaaggatggcagcagcaagagcggggctgaggaccagacccccaaggatgtgcccaacaagagcggggctgagaagcagacccccaaggatggcagcaacaagagcggggctgaggagcagggccccattgatggccccagcaagagcggggctgaggagcagaccagcaaggacagccccaacaaggtggtgcctgagcagcccagcaggaaggaccacagcaagcccatcagcaaccccagcgacaacaaggagctgcccaaggctgacaccaaccagctggccgacaagggcaagctgagcccccacgccttcaagacagagagcggggaggagacagacctgatcagccccccccaggaggaggtgaagagcagcgagcccacagaagatgtggagcccaaggaggctgaagatgatgacaccggccctgaggagggcagcccccccaaggaggagaaggagaagatgagcggcagcgccagcagtgaaaatcgggagggcaccctgagtgacagcactggaagtgagaaggatgacctgtacccaaatggaagtggaaatggatctgctgagagcagccacttctttgcctacctggtgacagctgccatcctggtggccgtgctgtacatcgcccaccacaacaagaggaagatcatcgcctttgtgctggagggcaagaggagcaaggtgacccggcggcccaaggccagtgactaccagaggctggaccagaagatcttcttccccctgagccccaacaggatggtgtacagcagcggcaagaggtag

SEQ ID NO: 82569 - DNA, 1362 bp, Artificial Sequence
  derived and/or modified sequence
atgcggttcgtggtggccctggtgctgctgaacgtggccgccgccggagccgtgcccttgctggcaaccgagagcgtaaaacaggaggaggcgggtgtccgaccttctgcgggaaacgtttctactcatccatctctgtcccagcggcctggcggctccaccaaatcccaccctgagcctcagactcccaaagattccccttctaaatcctccgccgaagcccagacgccagaggataccccgaacaagtcaggggccgaggcaaaaacgcagaaggactcaagtaacaaatctggcgctgaagctaagacgcagaagggcagcacatccaagagcggcagtgaggcgcagacaactaaggactccacatctaaatcccatccagaactgcagacaccgaaagattccacggggaagagcggagccgaggcgcaaactccagaagattcgccaaatagaagcggcgcagaggccaaaacacagaaggactctccctctaagtctggctccgaggctcaaaccaccaaagacgtgccgaataagagcggagcagacggacagacgccaaaagatgggagctctaagtcaggagcggaagaccagacccctaaagacgtacctaacaagtctggagccgaaaagcagactcctaaggatggtagcaacaaatcaggcgccgaagagcaaggacctatcgacgggccttcaaagagcggcgctgaggaacagacctccaaagattcgccaaataaggtcgtgcctgagcagccatcccggaaggaccactccaaacccatcagcaacccgtccgataacaaagaactgcccaaagccgataccaaccagctggccgataaaggaaagcttagcccacatgctttcaagaccgaatctggtgaggagaccgatttgatttcgcccccgcaggaggaggtaaagtccagcgagcctaccgaagacgtggagcccaaggaggccgaagatgatgatactggtccagaagagggatcaccccccaaagaagagaaagaaaaaatgtccggctctgcttcctctgaaaatcgggagggaacactgagcgactctacaggaagcgaaaaggacgacctgtaccctaatgggtccggcaatggcagcgccgagagctctcatttcttcgcttatctggtgaccgccgccatcctggtagcagtgctgtacatcgcccatcacaataaacggaagattatcgcgttcgtattggaaggcaaacggagcaaggtaacccgcagacccaaggcctctgactaccaacgtctcgaccagaagatcttcttcccactgagtcccaaccggatggtgtattcaagcggaaagcggtag

SEQ ID NO: 82570 - DNA, 1362 bp, Artificial Sequence
  derived and/or modified sequence
atgaggtttgtcgtggccctcgtgctgctcaatgttgccgctgcgggagctgtcccactcttggccaccgaatctgtgaaacaggaagaggccggagttcgcccatcagctggaaacgtctctacacaccctagtctgagccagcggccaggcggatccaccaagtcacaccccgagccacagactcctaaggacagcccctccaagagctctgctgaggctcagactcctgaggacacacctaacaagagtggggctgaagccaagacgcagaaagacagctccaacaagagtggcgcagaggccaaaacacaaaaagggtcaacctctaagagcggtagtgaagcccaaacaaccaaagacagcacctccaaatcccatcccgaacttcagactcccaaggatagtaccggtaaaagtggggctgaggcccaaaccccagaggactccccaaatcggagtggcgctgaggccaagacccagaaggactctccttcaaagagcggctcagaggcccagactaccaaagacgttcccaacaaaagtggagccgacggtcaaactcctaaggatggttcctccaaaagcggcgctgaggaccagaccccaaaagacgtgcccaataagagtggtgctgagaagcagacgccgaaagacgggtcaaacaagtctggggctgaagagcagggacctattgacggtccctcaaaaagtggcgcagaagagcaaacatcgaaggattccccgaacaaagtggtgccggaacagccatcccgtaaagaccatagcaaaccaataagtaacccaagtgacaataaggagctccctaaagccgacaccaaccagctggctgacaagggcaaactgagtccacatgcttttaaaacggagtcgggtgaggagactgatcttatttctccccctcaggaggaagtcaaaagctcggaaccaaccgaggatgtcgagcctaaggaagcagaggacgatgatacaggacccgaggagggaagtccccctaaggaggagaaggagaagatgagcggcagtgcttccagtgaaaacagagaagggaccctttctgatagcactggatcagaaaaagatgacttatatcccaacggatcagggaacggcagtgccgagtcatcccatttcttcgcttacctcgtgaccgccgcaattctggtcgccgtgttatacatcgctcaccacaacaagcgtaagattatcgctttcgtcttggagggcaagaggagtaaagtgactcgtcgccctaaggcaagtgattaccaaagactcgatcagaagatcttcttcccgctttcccctaatcgaatggtctattcgtctggaaaacgatag

SEQ ID NO: 82571 - DNA, 2235 bp, Artificial Sequence
  derived and/or modified sequence
agaggggccccgcgcgcggatctcgcgagagcattagagggcggaagcgctatccgagcaggatgcggttcgtggttgccttggtcctcctgaacgtcgcagcggcgggagccgtgccgctcttggccaccgaaagcgtcaagcaagaagaagctggagtacggccttctgcaggaaacgtctccacccaccccagcttgagccaacggcctggaggctctaccaagtcgcatccggagccgcagactccaaaagacagccctagcaagtcgagtgcggaggcgcagaccccagaagacacccccaacaagtcgggtgcggaggcaaagacccaaaaagacagctccaacaagtcgggtgcggaggcaaagacccaaaaaggcagcactagcaagtcgggttcggaggcgcagaccacaaaagacagcactagtaagtcgcatccggagctgcagactccaaaagacagcactggcaaatcgggtgcggaggcgcagaccccagaagacagccccaacaggtcgggtgcggaggcaaagacccaaaaagacagccctagcaagtcaggttcggaggcgcagaccacaaaagatgtccctaataagtcgggtgcggacggccagaccccaaaagacggctccagcaagtcgggtgcggaggatcagaccccaaaagacgtccctaacaagtcgggtgcggagaagcagactccaaaagacggctctaacaagtccggtgcagaggagcagggcccaatagacgggcccagcaagtcgggtgcggaggagcagacctcaaaagacagccctaacaaggtggttccagagcagccttcccggaaagaccattccaagcccatctccaacccttctgataacaaggagctccccaaggctgacacaaaccagcttgctgacaaagggaagctttctcctcatgctttcaaaaccgaatctggggaggaaactgacctcatttctcccccgcaggaggaagttaagtcttcagagcctactgaggatgtggagcccaaagaggctgaagatgatgatacaggacccgaggagggctcaccgcccaaagaagagaaagaaaagatgtccggttctgcctccagtgagaaccgtgaagggacactttcggattccacgggtagcgagaaggatgacctttatccgaacggttctggaaatggcagcgcggagagcagccacttctttgcatatctggtgactgcagccattcttgtggctgtcctctatatcgctcatcacaacaagcggaagatcattgcttttgtcctggaaggaaaaagatctaaagtcacccggcggccaaaggccagtgactaccaacgtttggaccagaagatcttttttcccctaagtcctaacagaatggtatattcctctggaaaaagatgaacgtcaccaatggattgtgctgctctcgtttcagctttgatttttttgtccttgagaaccttgtcctccctgctgatttgtttctaaatcaaaagaaatgaagaaaaaagtactgtgacctgagagacaccctcctctagaatttagtggcgggtctgggctggcagaggtagggggctgctttgggctttgcacctgcactttggtgacattgttcttctgtgttccctttatttatgctggtggcttccatccgttcctcctctgagggtgagtggaggggtatatggaaacacggctatgaccaaagggagatcccagcctgggcaggctgcgctgctgaccaccctccctggggcccgggctctgtaggaaagttggtccttgactgtggcattgcactctgcactgtttctctctgcagacctaggggaaaactgcaggtggaagtgcttttctactaaggcctcttactttgggggggatgtgccctacagaagacatagaagatggggaaatgccaatgggcaaagagctactttgaatacataattctcttcaaagacttcagcagcaaaccaaaacagcaggttaaaaaaaaagatgcttttttgggtgcaagtctaacctgtctagcatgagatcttcttgattttctgattattttatgtagcttgagacaaagtgaatcaacttccacttagttgtaccgagcataaaacagaacttgggcttcctggcagtgaggccactgtcccatcacagatttttaaaataaatatgatttgaagtagtgtgatctttcacacaa

SEQ ID NO: 82572 - protein, 281 aa, Artificial Sequence
  derived and/or modified sequence
MRFVVALVLLNVAAAGAVPLLATESVKQEEAGVRPSAGNVSTHPSLSQRPGGSTKSHPEPQTPKDSPSKSSSEAQTTKDVPNKSGADGQTPKDGSSKSGAEDQTPKDVPNKSGAEKQTPKDGSNKSGAEEQGPIDGPSKSGAEEQTSKDSPNKEEVKSSEPTEDVEPKEAEDDDTGPEEGSPPKEEKEKMSGSASSENREGTLSDSTGSEKDDLYPNGSGNGSAESSHFFAYLVTAAILVAVLYIAHHNKRKIIAFVLEGKRSKVTRRPKASDYQRLDQKS

SEQ ID NO: 82573 - protein, 379 aa, Artificial Sequence
  derived and/or modified sequence
MRFVVALVLLNVAAAGAVPLLATESVKQEEAGVRPSAGNVSTHPSLSQRPGGSTKSHPEPQTPKDSPSKSSAEAQTPEDTPNKSGAEAKTQKDSSNKSGAEAKTQKGSTSKSGSEAQTTKDSTSKSHPELQTPKDSTGKSGAEAQTPEDSPNRSGAEAKTQKDSPSKSGSEAQTTKDVPNKSGADGQTPKDGSSKSGAEDQTPKDVPNKSGAEKQTPKDGSNKSGAEEQGPIDGPSKSGAEEQTSKDSPNKEEVKSSEPTEDVEPKEAEDDDTGPEEGSPPKEEKEKMSGSASSENREGTLSDSTGSEKDDLYPNGSGNGSAESSHFFAYLVTAAILVAVLYIAHHNKRKIIAFVLEGKRSKVTRRPKASDYQRLDQKS

SEQ ID NO: 82574 - DNA, 846 bp, Artificial Sequence
  derived and/or modified sequence
atgagattcgtggtggccctggtgctgctgaacgtggccgccgccggcgccgtgcccctgctggccaccgagagcgtgaagcaggaggaggccggcgtgagacccagcgccggcaacgtgagcacccaccccagcctgagccagagacccggcggcagcaccaagagccaccccgagccccagacccccaaggacagccccagcaagagcagcagcgaggcccagaccaccaaggacgtgcccaacaagagcggcgccgacggccagacccccaaggacggcagcagcaagagcggcgccgaggaccagacccccaaggacgtgcccaacaagagcggcgccgagaagcagacccccaaggacggcagcaacaagagcggcgccgaggagcagggccccatcgacggccccagcaagagcggcgccgaggagcagaccagcaaggacagccccaacaaggaggaggtgaagagcagcgagcccaccgaggacgtggagcccaaggaggccgaggacgacgacaccggccccgaggagggcagcccccccaaggaggagaaggagaagatgagcggcagcgccagcagcgagaacagagagggcaccctgagcgacagcaccggcagcgagaaggacgacctgtaccccaacggcagcggcaacggcagcgccgagagcagccacttcttcgcctacctggtgaccgccgccatcctggtggccgtgctgtacatcgcccaccacaacaagagaaagatcatcgccttcgtgctggagggcaagagaagcaaggtgaccagaagacccaaggccagcgactaccagagactggaccagaagagctag

SEQ ID NO: 82575 - DNA, 1140 bp, Artificial Sequence
  derived and/or modified sequence
atgagattcgtggtggccctggtgctgctgaacgtggccgccgccggcgccgtgcccctgctggccaccgagagcgtgaagcaggaggaggccggcgtgagacccagcgccggcaacgtgagcacccaccccagcctgagccagagacccggcggcagcaccaagagccaccccgagccccagacccccaaggacagccccagcaagagcagcgccgaggcccagacccccgaggacacccccaacaagagcggcgccgaggccaagacccagaaggacagcagcaacaagagcggcgccgaggccaagacccagaagggcagcaccagcaagagcggcagcgaggcccagaccaccaaggacagcaccagcaagagccaccccgagctgcagacccccaaggacagcaccggcaagagcggcgccgaggcccagacccccgaggacagccccaacagaagcggcgccgaggccaagacccagaaggacagccccagcaagagcggcagcgaggcccagaccaccaaggacgtgcccaacaagagcggcgccgacggccagacccccaaggacggcagcagcaagagcggcgccgaggaccagacccccaaggacgtgcccaacaagagcggcgccgagaagcagacccccaaggacggcagcaacaagagcggcgccgaggagcagggccccatcgacggccccagcaagagcggcgccgaggagcagaccagcaaggacagccccaacaaggaggaggtgaagagcagcgagcccaccgaggacgtggagcccaaggaggccgaggacgacgacaccggccccgaggagggcagcccccccaaggaggagaaggagaagatgagcggcagcgccagcagcgagaacagagagggcaccctgagcgacagcaccggcagcgagaaggacgacctgtaccccaacggcagcggcaacggcagcgccgagagcagccacttcttcgcctacctggtgaccgccgccatcctggtggccgtgctgtacatcgcccaccacaacaagagaaagatcatcgccttcgtgctggagggcaagagaagcaaggtgaccagaagacccaaggccagcgactaccagagactggaccagaagagctag

SEQ ID NO: 82576 - DNA, 846 bp, Artificial Sequence
  derived and/or modified sequence
atgaggttcgtcgtcgctttagtcttattgaatgtggcggcagccggcgctgtgccgttgctggcaacggaaagtgtcaaacaagaagaggccggagtgcgcccatcagccggtaatgtgtccactcacccctccctgtcccagcgccccggaggctccacaaagagtcatccagagccccagactccgaaggactctcctagtaagtcttctagcgaggctcagaccacaaaagacgttcctaataagagcggtgcagacgggcagacaccaaaggacggctcatcgaaaagcggcgcagaagatcaaacccctaaagacgtccccaacaagtctggagccgaaaagcagacccccaaagacggctccaataaatctggcgccgaggaacagggccctatcgatggaccgtcaaaaagcggtgcagaggaacagacaagcaaggacagccctaataaggaggaagttaaaagcagcgagcccaccgaagatgttgagcccaaggaggccgaggacgacgataccgggcccgaggaggggtcccctcccaaggaggaaaaagaaaaaatgagcgggtccgcgagttctgagaacagagagggaacattaagcgactctaccggatccgagaaagatgatctatatcccaatggtagcggaaatgggtctgcggagtccagccatttcttcgcgtatctggtgaccgccgccatcctggttgctgtcctctatattgcccaccacaataagagaaaaatcattgctttcgtacttgaagggaagagatccaaggtcacaagacgtccaaaagcgtcggattatcagcgcctggaccagaaatcttag

SEQ ID NO: 82577 - DNA, 1140 bp, Artificial Sequence
  derived and/or modified sequence
atgagattcgtggttgcgttagtcctgctcaatgtggctgcagcaggtgccgttcccctgctggctaccgagtccgtgaagcaggaggaagctggtgttaggccttccgcgggtaatgttagcactcacccaagtctcagccaacgcccaggggggagtacaaagagccacccagagccccaaacccccaaagatagcccctccaaatcaagcgccgaagcccagaccccagaagatacgcctaataaatccggggccgaagctaaaactcagaaggactcatcaaataagtcgggggcagaggccaaaacgcagaagggttcaaccagcaaatcaggaagcgaagcccagacaacgaaggattcaacaagcaaatcccacccagagctccagacacctaaagattccaccggcaaaagcggggccgaagcacagactccggaggatagcccaaatagaagtggggctgaggcgaagacccaaaaggactcccctagtaagtccggctctgaggctcaaacaactaaggacgtgcccaataagtctggcgctgacggacagacacccaaagatggcagtagtaaatctggcgcagaagaccagacccccaaagacgtgcccaacaagtcaggcgctgagaaacagaccccaaaggatggttccaataagagcggtgctgaagagcagggacccatcgatgggccctcaaaatccggcgcagaagaacagactagcaaggactcaccaaataaggaagaggtcaagtcctccgagcccaccgaggacgttgagcctaaagaagccgaggatgatgataccgggcccgaggaaggcagcccacctaaggaggagaaagaaaagatgtcaggcagcgcttcatctgagaatagggagggtactttaagcgattctaccggtagtgagaaagacgacctgtatccaaacggtagcggcaacggatctgccgaatcttcacacttttttgcctacctggtcaccgccgcaatccttgtcgccgtgttatacatcgcccatcacaacaagcgcaaaatcattgcttttgtgctggaggggaagagaagcaaagttacgcgacgccctaaggcctcagattatcagagattagatcagaagtcctag

SEQ ID NO: 82578 - DNA, 846 bp, Artificial Sequence
  derived and/or modified sequence
atgagatttgtggtggccctggtgctgctgaatgtggccgctgctggagctgtgcccctgctggccacagaatctgtgaagcaggaggaggccggcgtgcggcccagcgctggaaatgtgtccacccaccccagcctgagccagaggcctgggggcagcaccaagagccaccctgagccccagacccccaaggacagccccagcaagagcagcagcgaggcccagaccaccaaggatgtgcccaacaagagcggggctgatggccagacccccaaggatggcagcagcaagagcggggctgaggaccagacccccaaggatgtgcccaacaagagcggggctgagaagcagacccccaaggatggcagcaacaagagcggggctgaggagcagggccccattgatggccccagcaagagcggggctgaggagcagaccagcaaggacagccccaacaaggaggaggtgaagagcagcgagcccacagaagatgtggagcccaaggaggctgaagatgatgacaccggccctgaggagggcagcccccccaaggaggagaaggagaagatgagcggcagcgccagcagtgaaaatcgggagggcaccctgagtgacagcactggaagtgagaaggatgacctgtacccaaatggaagtggaaatggatctgctgagagcagccacttctttgcctacctggtgacagctgccatcctggtggccgtgctgtacatcgcccaccacaacaagaggaagatcatcgcctttgtgctggagggcaagaggagcaaggtgacccggcggcccaaggccagtgactaccagaggctggaccagaagagctag

SEQ ID NO: 82579 - DNA, 1140 bp, Artificial Sequence
  derived and/or modified sequence
atgagatttgtggtggccctggtgctgctgaatgtggccgctgctggagctgtgcccctgctggccacagaatctgtgaagcaggaggaggccggcgtgcggcccagcgctggaaatgtgtccacccaccccagcctgagccagaggcctgggggcagcaccaagagccaccctgagccccagacccccaaggacagccccagcaagagcagcgctgaggcccagaccccagaggacacccccaacaagagcggggctgaggccaagacccagaaggacagcagcaacaagagcggggctgaggccaagacccagaagggcagcaccagcaagagcggcagcgaggcccagaccaccaaggacagcaccagcaagagccaccctgagctgcagacccccaaggacagcacaggcaagagcggggctgaggcccagaccccagaggacagccccaacagaagtggagctgaggccaagacccagaaggacagccccagcaagagcggcagcgaggcccagaccaccaaggatgtgcccaacaagagcggggctgatggccagacccccaaggatggcagcagcaagagcggggctgaggaccagacccccaaggatgtgcccaacaagagcggggctgagaagcagacccccaaggatggcagcaacaagagcggggctgaggagcagggccccattgatggccccagcaagagcggggctgaggagcagaccagcaaggacagccccaacaaggaggaggtgaagagcagcgagcccacagaagatgtggagcccaaggaggctgaagatgatgacaccggccctgaggagggcagcccccccaaggaggagaaggagaagatgagcggcagcgccagcagtgaaaatcgggagggcaccctgagtgacagcactggaagtgagaaggatgacctgtacccaaatggaagtggaaatggatctgctgagagcagccacttctttgcctacctggtgacagctgccatcctggtggccgtgctgtacatcgcccaccacaacaagaggaagatcatcgcctttgtgctggagggcaagaggagcaaggtgacccggcggcccaaggccagtgactaccagaggctggaccagaagagctag

SEQ ID NO: 82580 - DNA, 846 bp, Artificial Sequence
  derived and/or modified sequence
atgcggttcgtggtggccctggtgctgctgaacgtggccgccgccggggcagtacccctcctggccaccgaaagcgtcaagcaggaggaagccggggtgaggccttcagcaggaaatgtttcgacacatcccagtctgagtcaaaggccaggcgggtctacaaaatctcatcctgagccacaaacaccaaaagattccccttccaaaagttcctcagaggcacagaccacaaaagacgtgcctaataagtccggcgcagacggccagacacctaaggacggctcttctaagagcggcgctgaggatcaaacccccaaggatgtccctaacaaatccggagcagagaaacagactcccaaagatggttctaataagtccggcgctgaggagcaagggccaatcgatgggccttctaaatcaggggctgaggaacagacgagcaaggacagcccaaacaaggaagaggtgaagagcagcgagcctacagaggatgtggagcccaaagaagccgaagacgacgacactgggcccgaagagggctccccccccaaagaagagaaggagaagatgtcgggatcagcgtcgtccgagaacagggagggtacgttaagcgattcaactggttccgagaaggacgatctctacccaaatggatctggcaacgggtctgcagagagcagccatttctttgcatatctggtgaccgccgcgattttggtagccgtgctgtacattgcccatcataataaacgaaaaattattgcctttgtccttgaaggcaagcgtagcaaagtgacaagacggcccaaggcttccgactaccagcgcctggaccagaagagttag

SEQ ID NO: 82581 - DNA, 1140 bp, Artificial Sequence
  derived and/or modified sequence
atgcggttcgtggtggccctggtgctgctgaacgtggccgccgccggagctgtgccgctcctggctacagagtcagtcaaacaagaggaggcaggggtacgtccaagtgccggaaatgtttcgactcaccccagtctgagccagcggcccggcgggtccaccaaaagccatccggaacctcagacacccaaggatagccctagcaagtccagcgccgaggcacagaccccggaggataccccaaacaaatctggagcagaagctaagacccagaaagactcctcaaataagtctggagccgaggccaaaacacagaaaggatctacaagtaagtctgggtctgaagcacagactactaaggattccactagcaaatcccatccagagcttcagactcccaaagacagcaccggcaaaagtggcgcggaggcccaaacccccgaggactctcccaatcgatcaggtgcggaggccaagacacagaaggattccccatccaaaagcggctctgaggcccaaacaactaaggacgtacctaacaagtccggcgcagacgggcagaccccaaaggatggttcctccaaatccggtgctgaagatcagacgcccaaggacgtccctaataaatctggggccgaaaaacagacccccaaggacgggagcaataaatcaggcgcggaggagcagggcccgattgacggtccttctaagagcggggccgaagaacagacttccaaggattcgccaaataaagaagaggtgaagtcttcagaacctaccgaggatgtggaacccaaagaggcagaagacgacgatacaggcccagaagagggatctccgccaaaagaagaaaaggagaaaatgtctggaagtgctagcagcgagaatagggagggaactctgagcgacagcactggcagcgaaaaagacgatctgtaccccaacggatccggtaatggcagcgcggagtcttcccatttcttcgcctacttggtcactgctgcaatcctggtggccgtgttgtacatagctcatcataacaaaaggaaaatcattgcgtttgtgctggaggggaagcgatccaaagtgacaaggcgccccaaagcctctgattaccagcgcctggaccagaagtcgtag

SEQ ID NO: 82582 - DNA, 846 bp, Artificial Sequence
  derived and/or modified sequence
atgcgttttgttgtggctttagtgctcctgaatgtagctgcagccggagctgtccctctattggcaacagaatcggtgaaacaggaagaagccggtgtacgaccctccgcgggaaatgtatccacccatccctccttgtcacaaagacctggaggcagcaccaagtcacaccccgagccacagacccccaaagactcaccctccaagagtagctcggaggcgcagactaccaaggatgtaccgaataaatccggcgctgacgggcagacccccaaagatgggtcttccaagtccggggcagaggaccaaacgcctaaggacgtccctaacaagtcaggggctgagaagcagacacctaaagacggcagtaacaaatcaggagctgaagagcagggcccaattgatggaccttcaaagagcggagcagaggagcagacaagcaaagacagccccaataaggaagaggttaaatctagtgaacctaccgaggacgtggagcccaaggaagccgaggacgacgatactggtcctgaagagggctccccacccaaggaagagaaagaaaaaatgtctggtagtgccagctctgagaatagagaaggaacgctgagcgacagcaccgggtctgagaaggatgacttgtaccctaacggaagcggcaacgggtctgcggaaagctcgcactttttcgcttacctcgtaacagcagcgattctggtcgccgtgctgtatatcgcccatcacaacaagaggaaaatcattgcttttgttcttgagggtaaacgaagcaaggttacaagaaggccaaaggcatcagactaccaacgtctggaccagaaatcgtag

SEQ ID NO: 82583 - DNA, 1140 bp, Artificial Sequence
  derived and/or modified sequence
atgcggtttgtcgtggcgctagtccttttgaatgtggccgctgccggagcggtgcctctactcgctacagagtctgtgaagcaagaagaagctggagtccgaccatcagctggtaatgtcagtacacacccctccctctcccagagaccaggcggaagcacgaaatcgcatcctgagcctcagacacctaaggacagtccgagtaagagtagcgctgaagcccagacacctgaggatacacctaacaagagcggcgctgaggctaaaacccagaaggactcatccaacaagagcggagccgaggccaaaacccagaaggggagcactagcaaaagcggaagtgaagcccagaccaccaaagatagcacaagtaagtcacatcccgagttgcagacccctaaagactcgaccgggaaatctggggcagaggcacagacaccagaggattctccaaacaggagcggtgcagaggcaaagacccaaaaggatagtcccagtaaatctggaagcgaagcacaaacaacaaaggatgtgccgaataagtccggagccgacggacagacacccaaggatggtagctcgaaatctggggctgaggatcaaactcctaaagacgtgcctaataagagcggggcagagaagcaaacacccaaggacggttcaaataaaagcggagctgaggagcagggcccaatcgatggaccaagtaagagtggggctgaggagcagacaagcaaggacagcccgaacaaagaagaagtgaaatcttcggagcccaccgaggatgtggagccaaaagaggccgaagatgatgatactggacccgaggagggatcccctcctaaggaagaaaaggagaaaatgagcggttccgcctcatccgagaaccgcgagggaaccctgtctgatagcacaggatcggaaaaggacgatctgtaccccaacgggagcggaaacggctctgcagaaagcagtcatttcttcgcctatcttgtgaccgctgccatactcgttgcggtgctttacatcgcccatcataataagcggaagattattgccttcgtacttgaggggaagcgcagcaaggttactcgacggccaaaggcttcagactatcagcgcctggatcagaaaagctag

SEQ ID NO: 82584 - DNA, 5847 bp, Artificial Sequence
  derived and/or modified sequence
gtaaggtctcggaagtacgaggcggaggggacgaaaaacggggggccagactgttgtggctgtggtggagacgagaaaccaggaagaagaggctcgcctcccactcggcgacagtaagcgaagcagccgaaggcgagcgccgacatcagcagctgccccctaaatcccgcccttcgtcttggcggcagcgggagactgagagacgcgcgcagcaggggcgggactggagaggggccccgcgcgcggatctcgcgagagcattagagggcggaagcgctatccgagcaggatgcggttcgtggttgccttggtcctcctgaacgtcgcagcggcgggagccgtgccgctcttggccaccgaaagcgtcaagcaagaagaagctggagtacggccttctgcaggaaacgtctccacccaccccagcttgagccaacggcctggaggctctaccaagtcgcatccggagccgcagactccaaaagacagccctagcaagtcgagttcggaggcgcagaccacaaaagatgtccctaataagtcgggtgcggacggccagaccccaaaagacggctccagcaagtcgggtgcggaggatcagaccccaaaagacgtccctaacaagtcgggtgcggagaagcagactccaaaagacggctctaacaagtccggtgcagaggagcagggcccaatagacgggcccagcaagtcgggtgcggaggagcagacctcaaaagacagccctaacaaggaggaagttaagtcttcagagcctactgaggatgtggagcccaaagaggctgaagatgatgatacaggacccgaggagggctcaccgcccaaagaagagaaagaaaagatgtccggttctgcctccagtgagaaccgtgaagggacactttcggattccacgggtagcgagaaggatgacctttatccgaacggttctggaaatggcagcgcggagagcagccacttctttgcatatctggtgactgcagccattcttgtggctgtcctctatatcgctcatcacaacaagcggaagatcattgcttttgtcctggaaggaaaaagatctaaagtcacccggcggccaaaggccagtgactaccaacgtttggaccagaagtcctaacagaatggtatattcctctggaaaaagatgaacgtcaccaatggattgtgctgctctcgtttcagctttgatttttttgtccttgagaaccttgtcctccctgctgatttgtttctaaatcaaaagaaatgaagaaaaaagtactgtgacctgagagacaccctcctctagaatttagtggcgggtctgggctggcagaggtagggggctgctttgggctttgcacctgcactttggtgacattgttcttctgtgttccctttatttatgctggtggcttccatccgttcctcctctgagggtgagtggaggggtatatggaaacacggctatgaccaaagggagatcccagcctgggcaggctgcgctgctgaccaccctccctggggcccgggctctgtaggaaagttggtccttgactgtggcattgcactctgcactgtttctctctgcagacctaggggaaaactgcaggtggaagtgcttttctactaaggcctcttactttgggggggatgtgccctacagaagacatagaagatggggaaatgccaatgggcaaagagctactttgaatacataattctcttcaaagacttcagcagcaaaccaaaacagcaggttaaaaaaaaagatgcttttttgggtgcaagtctaacctgtctagcatgagatcttcttgattttctgattattttatgtagcttgagacaaagtgaatcaacttccacttagttgtaccgagcataaaacagaacttgggcttcctggcagtgaggccactgtcccatcacagatttttaaaataaatatgatttgaagtagtgtgatctttcacacaatcatactcagtaggaactttttgaaatagggcaagtttatgtttcatgcgagaaaacatgaaggagggttttggttttggtctgcagtttttccaaagggcttttatgagatacatttcccacaaagtccattttgcctttgttgcctaaaacagacaaaatagacttagatttattaatagaaactatactctctgccaattttacctcagtgtatttaatggtcctttaatctgatataagatgccaagggtatttgataaaaattcttcttccatgccatgtcaggagttaatacaaatgaagaaattccgtgggttcccctgggataagtgagggtagtgtcttggacaacactattgtttgaaggtttatcttttctaatcatgctctaccgcattgtagagagcctaaagagagttgtttctgagctgatctcagggaaatacaaataacttgggagatgagggaaataagatgaattctgtgctgtcaaggcagtaagtctgaagaaaggaccatgcttcttatattatcttccaccttgcttaaaacagcccatagctttgagttgacattttcattcttggcggatagcctactttatgaaggtaaggaatgaactcctacccttcttgggtcattctctgtactgatgcgttagtcttataatactttgcaccaacctgaggaatcttctaggcttctctagcatcccctaagactgtggctatttcacgtctctctccctgcctgccttccttttcccttcctttcccctcctcatgttttctggttgtgcccatctgtaccagctcctttccatccaccttcgtatgcacccagatttttctgttcccatctgtcctatttgttattcatcccgctgctcaacttctccagtatgttgcttcccttaagttgccattcattctcttcatgacttttactaactcacttcggtctctgtctgtcaactaaacttttctaaaggttaccagttatccaatcaccaaatccatggctttttctcaaagcttagtcttgtccttggcagaactggacactattgaccatccaaatggaaattcccctttcttggtgtctctgacaaatggtcctttgccttatcttgtgctggtggtgaagaggccctcaaagccaggcctctctattcctttgactgtctcctcagccattaacccattcttcatcctcggagtgagtgattcccaagtctttgtcttggcttaatccctaaagaacccagttctgctggtatcgaatagttcagcttggttgtcattgaaaggaatttctctcttctgtccatcagcctgtccctcccaactgtctaggacagtcttcggtcacctaaattcctaactgcagacttttgccctttttctctctcatcaccaaagtcccatccatttttttttaataaaagatcctcagctacagtctttccattttccttgcttctcttattgcacacccccagcccattttgcttctctcttggattttgttttttcagatccacatttattgggtttcctgtccagcttcttggaaaggagctcactcttggaaagactgatctttccaaaatattttccctggtctgaagctttggtgtgaacttctcaaggcttagagaatccagttacagaccttttggggttcaggatgctatagattgacaccctcctgcctgtttttctctgcatcccaacctggccaaggcccctcctgtggggtgcccatctgtgcctttattccggctgtgccctcgactttccagcttcccatgtttctttggttaggtttctctcccttccttctttctccttccccaatccgcctgtttcgtcagggcccagtttgtttcctcatacaccttcctcactaccccaccccacatggttgactctttccctcagctccaccagctcttcatcatgccactcatttcagaacttgagcaaaacagggcagtcaggatctgatgtctttctggtctccctaagaaaactaagctcttgagggacagcccttggcaatgctttcctatctgctgatcatggtgaccttccttaggacttccagagttcagttccttctggcagagaggttttctttctccatgccatatggatgtgactcaaatgaggggtcccacagcttttcctggctaccacttgctgtgaccttatacatgttggggtttgctcttaaagaggagagcaggaagaaaggttggtttcagaaaccaagagggtcggcagtggacgcgtacattttgtcacggagtccacagagctgagcttttgagcagactctgagaagtatcattgcttgtgttgaaagaatacaacaggatttaagtttctctttagaaattgcactgaagaaaggccgggcgcggtggctccccctgtaatcccagcgctttgggaggccgaggcggggggatcacgaggtcaagagatcgagaccatcctggccaacatggtgaaaccccgtctctaataaaaatacaaaaattagccgggcatggtgacgtgcacctgtagtcccagctactagataggctgaggcaggagaattgcttgaatccgggaggcggaggttgcagtgagccgagatcgtgccactgaactccaacctgccaatagagcgagactccgtctcaaaaaaaaaaaaaaaaaagaaagaaatagcattgaagaaaataccgcacatcagaggaaagcttattttctgcatggtgtcttttcaaagatagaatatttgaagcatgttttctagcgattgtgtggatgagggtgagctggctgaggcatcgctcaagctggggggtggtgtgtaagaagcacgtggagccacaagaggcacctcctatagtcagctaagggcttccctttctgcgcccagcttttgggtgaagggtgatttctattagacacatctgtgcttcagtcatagatgttaatagaggaagcagttttcctgctgcagattcctgaatagagttgctgaaagagtctacttctggactcaggggaagttgaaggccagtctgtgtagaaaggctgaggcaacggggaaagacctgacagctagttacatacgctctgacatagtactcccatgatggcttccagtgacacatgtgctgatagaattctaaacctctggaatttccctgctggcgacttctatggccgttgactgtacagggtaacctgatgccagatgctatgggcgtgatgagaactagagcattgcagcatggaggaaactgtgaggcaccagatcctgtgcttctgcaggccattttctgaaaacccctgttaggaaggttggatttggcgtgacttgcttgagcaagagtcctggggagagattttgaggtttaatttaacggtatatccagagctaacagtgactcaactcgtctagttctgcaagtcagatgtacacttagagtctctctgtgaagggtttgggtctgagctgtatagtatgtcaaactgccagtaagccagcccctcaccctctgatagatattcctttaatgcaccagacttcatgtttgataaatgattaatggttgaaattgtttctcttcttttgtgttttcccagttaatagatggtcactgtttccacaatgttttatactttcagctttttgtaacttaactataattacttaattttatttttttaaagcttgttgtggtctaatgagaagtatttttcagtgcataatgtttttctgagcttctgtaaatgccatcccaatgtggtttggttttgttgaacagaaaccaaaataaatttcaaaatgttaaagcaatgg

SEQ ID NO: 82585 - DNA, 6138 bp, Artificial Sequence
  derived and/or modified sequence
gtaaggtctcggaagtacgaggcggaggggacgaaaaacggggggccagactgttgtggctgtggtggagacgagaaaccaggaagaagaggctcgcctcccactcggcgacagtaagcgaagcagccgaaggcgagcgccgacatcagcagctgccccctaaatcccgcccttcgtcttggcggcagcgggagactgagagacgcgcgcagcaggggcgggactggagaggggccccgcgcgcggatctcgcgagagcattagagggcggaagcgctatccgagcaggatgcggttcgtggttgccttggtcctcctgaacgtcgcagcggcgggagccgtgccgctcttggccaccgaaagcgtcaagcaagaagaagctggagtacggccttctgcaggaaacgtctccacccaccccagcttgagccaacggcctggaggctctaccaagtcgcatccggagccgcagactccaaaagacagccctagcaagtcgagtgcggaggcgcagaccccagaagacacccccaacaagtcgggtgcggaggcaaagacccaaaaagacagctccaacaagtcgggtgcggaggcaaagacccaaaaaggcagcactagcaagtcgggttcggaggcgcagaccacaaaagacagcactagtaagtcgcatccggagctgcagactccaaaagacagcactggcaaatcgggtgcggaggcgcagaccccagaagacagccccaacaggtcgggtgcggaggcaaagacccaaaaagacagccctagcaagtcaggttcggaggcgcagaccacaaaagatgtccctaataagtcgggtgcggacggccagaccccaaaagacggctccagcaagtcgggtgcggaggatcagaccccaaaagacgtccctaacaagtcgggtgcggagaagcagactccaaaagacggctctaacaagtccggtgcagaggagcagggcccaatagacgggcccagcaagtcgggtgcggaggagcagacctcaaaagacagccctaacaaggaggaagttaagtcttcagagcctactgaggatgtggagcccaaagaggctgaagatgatgatacaggacccgaggagggctcaccgcccaaagaagagaaagaaaagatgtccggttctgcctccagtgagaaccgtgaagggacactttcggattccacgggtagcgagaaggatgacctttatccgaacggttctggaaatggcagcgcggagagcagccacttctttgcatatctggtgactgcagccattcttgtggctgtcctctatatcgctcatcacaacaagcggaagatcattgcttttgtcctggaaggaaaaagatctaaagtcacccggcggccaaaggccagtgactaccaacgtttggaccagaagtcctaacagaatggtatattcctctggaaaaagatgaacgtcaccaatggattgtgctgctctcgtttcagctttgatttttttgtccttgagaaccttgtcctccctgctgatttgtttctaaatcaaaagaaatgaagaaaaaagtactgtgacctgagagacaccctcctctagaatttagtggcgggtctgggctggcagaggtagggggctgctttgggctttgcacctgcactttggtgacattgttcttctgtgttccctttatttatgctggtggcttccatccgttcctcctctgagggtgagtggaggggtatatggaaacacggctatgaccaaagggagatcccagcctgggcaggctgcgctgctgaccaccctccctggggcccgggctctgtaggaaagttggtccttgactgtggcattgcactctgcactgtttctctctgcagacctaggggaaaactgcaggtggaagtgcttttctactaaggcctcttactttgggggggatgtgccctacagaagacatagaagatggggaaatgccaatgggcaaagagctactttgaatacataattctcttcaaagacttcagcagcaaaccaaaacagcaggttaaaaaaaaagatgcttttttgggtgcaagtctaacctgtctagcatgagatcttcttgattttctgattattttatgtagcttgagacaaagtgaatcaacttccacttagttgtaccgagcataaaacagaacttgggcttcctggcagtgaggccactgtcccatcacagatttttaaaataaatatgatttgaagtagtgtgatctttcacacaatcatactcagtaggaactttttgaaatagggcaagtttatgtttcatgcgagaaaacatgaaggagggttttggttttggtctgcagtttttccaaagggcttttatgagatacatttcccacaaagtccattttgcctttgttgcctaaaacagacaaaatagacttagatttattaatagaaactatactctctgccaattttacctcagtgtatttaatggtcctttaatctgatataagatgccaagggtatttgataaaaattcttcttccatgccatgtcaggagttaatacaaatgaagaaattccgtgggttcccctgggataagtgagggtagtgtcttggacaacactattgtttgaaggtttatcttttctaatcatgctctaccgcattgtagagagcctaaagagagttgtttctgagctgatctcagggaaatacaaataacttgggagatgagggaaataagatgaattctgtgctgtcaaggcagtaagtctgaagaaaggaccatgcttcttatattatcttccaccttgcttaaaacagcccatagctttgagttgacattttcattcttggcggatagcctactttatgaaggtaaggaatgaactcctacccttcttgggtcattctctgtactgatgcgttagtcttataatactttgcaccaacctgaggaatcttctaggcttctctagcatcccctaagactgtggctatttcacgtctctctccctgcctgccttccttttcccttcctttcccctcctcatgttttctggttgtgcccatctgtaccagctcctttccatccaccttcgtatgcacccagatttttctgttcccatctgtcctatttgttattcatcccgctgctcaacttctccagtatgttgcttcccttaagttgccattcattctcttcatgacttttactaactcacttcggtctctgtctgtcaactaaacttttctaaaggttaccagttatccaatcaccaaatccatggctttttctcaaagcttagtcttgtccttggcagaactggacactattgaccatccaaatggaaattcccctttcttggtgtctctgacaaatggtcctttgccttatcttgtgctggtggtgaagaggccctcaaagccaggcctctctattcctttgactgtctcctcagccattaacccattcttcatcctcggagtgagtgattcccaagtctttgtcttggcttaatccctaaagaacccagttctgctggtatcgaatagttcagcttggttgtcattgaaaggaatttctctcttctgtccatcagcctgtccctcccaactgtctaggacagtcttcggtcacctaaattcctaactgcagacttttgccctttttctctctcatcaccaaagtcccatccatttttttttaataaaagatcctcagctacagtctttccattttccttgcttctcttattgcacacccccagcccattttgcttctctcttggattttgttttttcagatccacatttattgggtttcctgtccagcttcttggaaaggagctcactcttggaaagactgatctttccaaaatattttccctggtctgaagctttggtgtgaacttctcaaggcttagagaatccagttacagaccttttggggttcaggatgctatagattgacaccctcctgcctgtttttctctgcatcccaacctggccaaggcccctcctgtggggtgcccatctgtgcctttattccggctgtgccctcgactttccagcttcccatgtttctttggttaggtttctctcccttccttctttctccttccccaatccgcctgtttcgtcagggcccagtttgtttcctcatacaccttcctcactaccccaccccacatggttgactctttccctcagctccaccagctcttcatcatgccactcatttcagaacttgagcaaaacagggcagtcaggatctgatgtctttctggtctccctaagaaaactaagctcttgagggacagcccttggcaatgctttcctatctgctgatcatggtgaccttccttaggacttccagagttcagttccttctggcagagaggttttctttctccatgccatatggatgtgactcaaatgaggggtcccacagcttttcctggctaccacttgctgtgaccttatacatgttggggtttgctcttaaagaggagagcaggaagaaaggttggtttcagaaaccaagagggtcggcagtggacgcgtacattttgtcacggagtccacagagctgagcttttgagcagactctgagaagtatcattgcttgtgttgaaagaatacaacaggatttaagtttctctttagaaattgcactgaagaaaggccgggcgcggtggctccccctgtaatcccagcgctttgggaggccgaggcggggggatcacgaggtcaagagatcgagaccatcctggccaacatggtgaaaccccgtctctaataaaaatacaaaaattagccgggcatggtgacgtgcacctgtagtcccagctactagataggctgaggcaggagaattgcttgaatccgggaggcggaggttgcagtgagccgagatcgtgccactgaactccaacctgccaatagagcgagactccgtctcaaaaaaaaaaaaaaaaaagaaagaaatagcattgaagaaaataccgcacatcagaggaaagcttattttctgcatggtgtcttttcaaagatagaatatttgaagcatgttttctagcgattgtgtggatgagggtgagctggctgaggcatcgctcaagctggggggtggtgtgtaagaagcacgtggagccacaagaggcacctcctatagtcagctaagggcttccctttctgcgcccagcttttgggtgaagggtgatttctattagacacatctgtgcttcagtcatagatgttaatagaggaagcagttttcctgctgcagattcctgaatagagttgctgaaagagtctacttctggactcaggggaagttgaaggccagtctgtgtagaaaggctgaggcaacggggaaagacctgacagctagttacatacgctctgacatagtactcccatgatggcttccagtgacacatgtgctgatagaattctaaacctctggaatttccctgctggcgacttctatggccgttgactgtacagggtaacctgatgccagatgctatgggcgtgatgagaactagagcattgcagcatggaggaaactgtgaggcaccagatcctgtgcttctgcaggccattttctgaaaacccctgttaggaaggttggatttggcgtgacttgcttgagcaagagtcctggggagagattttgaggtttaatttaacggtatatccagagctaacagtgactcaactcgtctagttctgcaagtcagatgtacacttagagtctctctgtgaagggtttgggtctgagctgtatagtatgtcaaactgccagtaagccagcccctcaccctctgatagatattcctttaatgcaccagacttcatgtttgataaatgattaatggttgaaattgtttctcttcttttgtgttttcccagttaatagatggtcactgtttccacaatgttttatactttcagctttttgtaacttaactataattacttaattttatttttttaaagcttgttgtggtctaatgagaagtatttttcagtgcataatgtttttctgagcttctgtaaatgccatcccaatgtggtttggttttgttgaacagaaaccaaaataaatttcaaaatgttaaagcaa

SEQ ID NO: 82586 - protein, 1892 aa, Artificial Sequence
  derived and/or modified sequence
MANRRVGRGCWEVSPTERRPPAGLRGPAAEEEASSPPVLSLSHFCRSPFLCFGDVLLGASRTLSLALDNPNEEVAEVKISHFPAADLGFSVSQRCFVLQPKEKIVISVNWTPLKEGRVREIMTFLVNDVLKHQAILLGNAEEQKKKKRSLWDTIKKKKISASTSHNRRVSNIQNVNKTFSVSQKVDRVRSPLQACENLAMNEGGPPTENNSLILEENKIPISPISPAFNECHGATCLPLSVRRSTTYSSLHASENRELLNVHSANVSKVSFNEKAVTETSFNSVNVNGQRGENSKLSLTPNCSSTLNITQSQIHFLSPDSFVNNSHGANNELELVTCLSSDMFMKDNSQPVHLESTIAHEIYQKILSPDSFIKDNYGLNQDLESESVNPILSPNQFLKDNMAYMCTSQQTCKVPLSNENSQVPQSPEDWRKSEVSPRIPECQGSKSPKAIFEELVEMKSNYYSFIKQNNPKFSAVQDISSHSHNKQPKRRPILSATVTKRKATCTRENQTEINKPKAKRCLNSAVGEHEKVINNQKEKEDFHSYLPIIDPILSKSKSYKNEVTPSSTTASVARKRKSDGSMEDANVRVAITEHTEVREIKRIHFSPSEPKTSAVKKTKNVTTPISKRISNREKLNLKKKTDLSIFRTPISKTNKRTKPIIAVAQSSLTFIKPLKTDIPRHPMPFAAKNMFYDERWKEKQEQGFTWWLNFILTPDDFTVKTNISEVNAATLLLGIENQHKISVPRAPTKEEMSLRAYTARCRLNRLRRAACRLFTSEKMVKAIKKLEIEIEARRLIVRKDRHLWKDVGERQKVLNWLLSYNPLWLRIGLETTYGELISLEDNSDVTGLAMFILNRLLWNPDIAAEYRHPTVPHLYRDGHEEALSKFTLKKLLLLVCFLDYAKISRLIDHDPCLFCKDAEFKASKEILLAFSRDFLSGEGDLSRHLGLLGLPVNHVQTPFDEFDFAVTNLAVDLQCGVRLVRTMELLTQNWDLSKKLRIPAISRLQKMHNVDIVLQVLKSRGIELSDEHGNTILSKDIVDRHREKTLRLLWKIAFAFQVDISLNLDQLKEEIAFLKHTKSIKKTISLLSCHSDDLINKKKGKRDSGSFEQYSENIKLLMDWVNAVCAFYNKKVENFTVSFSDGRVLCYLIHHYHPCYVPFDAICQRTTQTVECTQTGSVVLNSSSESDDSSLDMSLKAFDHENTSELYKELLENEKKNFHLVRSAVRDLGGIPAMINHSDMSNTIPDEKVVITYLSFLCARLLDLRKEIRAARLIQTTWRKYKLKTDLKRHQEREKAARIIQLAVINFLAKQRLRKRVNAALVIQKYWRRVLAQRKLLMLKKEKLEKVQNKAASLIQAMWRRYRAKKYLCKVKAACKIQAWYRCWRAHKEYLAILKAVKIIQGCFYTKLERTRFLNVRASAIIIQRKWRAILPAKIAHEHFLMIKRHRAACLIQAHYRGYKGRQVFLRQKSAALIIQKYIRAREAGKHERIKYIEFKKSTVILQALVRGWLVRKRFLEQRAKIRLLHFTAAAYYHLNAVRIQRAYKLYLAVKNANKQVNSVICIQRWFRARLQEKRFIQKYHSIKKIEHEGQECLSQRNRAASVIQKAVRHFLLRKKQEKFTSGIIKIQALWRGYSWRKKNDCTKIKAIRLSLQVVNREIREENKLYKRTALALHYLLTYKHLSAILEALKHLEVVTRLSPLCCENMAQSGAISKIFVLIRSCNRSIPCMEVIRYAVQVLLNVSKYEKTTSAVYDVENCIDILLELLQIYREKPGNKVADKGGSIFTKTCCLLAILLKTTNRASDVRSRSKVVDRIYSLYKLTAHKHKMNTERILYKQKKNSSISIPFIPETPVRTRIVSRLKPDWVLRRDNMEEITNPLQAIQMVMDTLGIPY

SEQ ID NO: 82587 - protein, 1142 aa, Artificial Sequence
  derived and/or modified sequence
MSLRAYTARCRLNRLRRAACRLFTSEKMVKAIKKLEIEIEARRLIVRKDRHLWKDVGERQKVLNWLLSYNPLWLRIGLETTYGELISLEDNSDVTGLAMFILNRLLWNPDIAAEYRHPTVPHLYRDGHEEALSKFTLKKLLLLVCFLDYAKISRLIDHDPCLFCKDAEFKASKEILLAFSRDFLSGEGDLSRHLGLLGLPVNHVQTPFDEFDFAVTNLAVDLQCGVRLVRTMELLTQNWDLSKKLRIPAISRLQKMHNVDIVLQVLKSRGIELSDEHGNTILSKDIVDRHREKTLRLLWKIAFAFQVDISLNLDQLKEEIAFLKHTKSIKKTISLLSCHSDDLINKKKGKRDSGSFEQYSENIKLLMDWVNAVCAFYNKKVENFTVSFSDGRVLCYLIHHYHPCYVPFDAICQRTTQTVECTQTGSVVLNSSSESDDSSLDMSLKAFDHENTSELYKELLENEKKNFHLVRSAVRDLGGIPAMINHSDMSNTIPDEKVVITYLSFLCARLLDLRKEIRAARLIQTTWRKYKLKTDLKRHQEREKAARIIQLAVINFLAKQRLRKRVNAALVIQKYWRRVLAQRKLLMLKKEKLEKVQNKAASLIQAMWRRYRAKKYLCKVKAACKIQAWYRCWRAHKEYLAILKAVKIIQGCFYTKLERTRFLNVRASAIIIQRKWRAILPAKIAHEHFLMIKRHRAACLIQAHYRGYKGRQVFLRQKSAALIIQKYIRAREAGKHERIKYIEFKKSTVILQALVRGWLVRKRFLEQRAKIRLLHFTAAAYYHLNAVRIQRAYKLYLAVKNANKQVNSVICIQRWFRARLQEKRFIQKYHSIKKIEHEGQECLSQRNRAASVIQKAVRHFLLRKKQEKFTSGIIKIQALWRGYSWRKKNDCTKIKAIRLSLQVVNREIREENKLYKRTALALHYLLTYKHLSAILEALKHLEVVTRLSPLCCENMAQSGAISKIFVLIRSCNRSIPCMEVIRYAVQVLLNVSKYEKTTSAVYDVENCIDILLELLQIYREKPGNKVADKGGSIFTKTCCLLAILLKTTNRASDVRSRSKVVDRIYSLYKLTAHKHKMNTERILYKQKKNSSISIPFIPETPVRTRIVSRLKPDWVLRRDNMEEITNPLQAIQMVMDTLGIPY

SEQ ID NO: 82588 - DNA, 5679 bp, Artificial Sequence
  derived and/or modified sequence
atggctaatcgacgcgtgggccggggctgttgggaagtcagtcctactgagcgcaggccacctgctggcctcagggggcctgcagccgaagaagaggcgtccagtccaccggtgttaagtttgagccacttctgtaggtctccctttctttgctttggtgatgttctattaggcgcttccagaactctctccttagcgctggataatcccaatgaggaagtggcagaagttaagatctctcacttccctgcggccgacctgggatttagtgtgagtcagcgatgttttgtccttcagcccaaggagaagatagtgatcagcgtgaattggactcctttaaaagaaggacgtgtgagagagataatgacctttcttgtcaacgacgtgcttaaacaccaagcaatcctgttgggtaatgccgaagaacaaaagaagaagaaacggagcctgtgggacaccatcaaaaagaagaaaatctctgccagtacatcccacaatagacgggtatccaacattcaaaacgtcaataaaaccttcagcgtgagtcagaaagttgaccgggtgcggagcccattgcaggcgtgtgaaaacttagcaatgaacgaaggcggtccccctactgaaaacaactcccttatccttgaggagaataagattccaatttcacccatctcaccagcttttaacgagtgtcatggagccacgtgcctccctctatccgttagaaggtccaccacctactcgtctctccatgctagtgagaacagagaactgctgaatgtgcacagcgccaacgtatccaaggtgtcctttaacgaaaaagcagttaccgagacttcatttaactctgtgaatgtgaacggacaacgcggcgaaaactctaaactgtccctaacgcccaactgcagctccacattaaacatcactcaaagccaaattcactttctatcgcccgattcatttgtgaataactcacacggggccaataacgagctcgagctagtgacatgcctgtccagcgatatgtttatgaaggataatagccaacccgtccatttggaaagcaccatcgcccacgagatctatcaaaagattctttcacccgactcatttattaaagataattatggactcaatcaggacctcgagagcgagtccgttaatccgattctctcccccaatcagttcctgaaggacaacatggcctacatgtgcacgtcccagcaaacttgtaaagtcccgcttagcaacgagaattcgcaagtaccacagtcacctgaagactggagaaaaagtgaggtgtcaccaaggatccccgagtgccagggttcgaagtcacctaaggcgatatttgaggagctcgtagaaatgaaaagcaactattattcctttatcaagcagaataatccgaagtttagcgctgtacaggatatttccagtcacagccataacaagcaacctaaaaggcggccaattttgtctgctacagtgactaagagaaaggctacatgtacacgggagaatcagaccgagatcaacaagccaaaggctaaaaggtgcctgaattccgcagtgggtgaacatgaaaaggtcatcaacaaccaaaaagagaaagaggatttccattcttacttacccatcatagaccctatcctgtctaaaagcaaatcctataaaaatgaggttactcccagcagcacaacagcttccgtggcacggaaaagaaagtctgatgggtcaatggaagacgccaacgtgagagtggcaatcacagagcatactgaagtgcgggagattaaacgtattcacttctccccttccgagccaaaaacttctgccgtcaagaagactaaaaatgtgaccactcctatctccaaacggattagcaacagggaaaaactcaacctgaaaaagaagactgacctttccatattccggacaccaataagcaagacaaacaaaagaaccaagcctattatcgctgtggcgcaatctagcttgacctttattaaaccactaaagactgatatccccaggcatcctatgccattcgcagctaagaatatgttctatgacgagaggtggaaggaaaaacaggaacagggtttcacctggtggttaaatttcatcctgactccagatgacttcactgtcaagacgaacatctccgaagtcaacgccgctacccttctcttagggatcgagaaccagcacaagatctctgtgcctcgggccccaacaaaggaagagatgagccttcgcgcatacacggcaaggtgtcggcttaatagactaaggagggcggcgtgcaggctgtttacaagcgagaagatggtgaaggcaataaagaagttggagattgaaattgaagctcggaggctcattgtgcgtaaagaccggcatctctggaaggatgtgggggaacgccagaaggtactgaactggttgctgagctataatccgctgtggctccgtataggccttgaaactacatatggcgagctaatctctctggaggacaactccgatgtaactggtctcgccatgttcatattaaatcgtctgctgtggaaccctgatatcgccgccgagtacagacaccccactgtacctcatttatatagggacggacacgaagaggccctttccaaatttactcttaagaagctactgttactcgtttgcttcttagactacgccaaaattagtagactgatcgaccacgatccgtgtctgttttgtaaagacgcggagtttaaagcaagtaaagaaatactccttgcattctccagggatttcctgtccggggaaggtgatctttcacgtcatctcggattactcggcctccccgtgaaccacgttcagaccccatttgatgagttcgactttgccgtgacaaatttggcagttgaccttcagtgcggtgtgcgactggtgcggaccatggagctcctaacgcaaaactgggacctgtccaaaaaactgaggattccagctatcagcaggcttcaaaaaatgcataatgtggatatagtcctccaggtgctcaaatcccgggggatcgagctgtcagatgaacacgggaataccattttgtctaaagatatcgtagaccgccatcgcgagaagacattgaggttattgtggaaaatcgcatttgcctttcaagtggacatctccctgaacctagatcagttgaaagaggaaatcgcctttctgaaacatactaagagcattaaaaaaaccatttctctactatcatgccacagcgatgaccttatcaacaagaaaaaagggaaacgggactctggaagcttcgagcagtattccgagaatataaaactcctcatggactgggtgaacgccgtctgcgcgttctacaacaagaaagtggagaatttcacagtgtcctttagcgacggccgggtcctgtgttatctgattcatcattatcatccgtgttatgtacctttcgacgcaatctgtcagcggactacgcaaacagttgagtgtacccagacaggtagcgttgtgctgaatagttctagcgagtccgacgattcaagcctcgacatgagccttaaggcttttgaccatgaaaacacaagtgagctctataaagagctgctagagaatgaaaaaaaaaacttccacctggtccgctccgcagttcgggacctgggcgggatccccgccatgataaaccactcggacatgtccaacaccattccagatgagaaggtggtgatcacgtatctgagtttcttgtgcgcacgtctgctggatttgaggaaggaaatcagagccgcaagacttatccagacaacatggcgcaaatacaagttgaaaacagatctcaagcgccaccaggagcgagaaaaagccgcccgaatcattcagctggccgttatcaactttcttgccaagcagagacttagaaagcgtgtgaacgccgccctggttattcagaaatattggaggcgggtgttagctcagcgcaaactgcttatgctgaagaaagaaaagctagagaaagtgcagaacaaagctgccagcctcattcaagcaatgtggagaagatacagagctaagaaatacctgtgcaaggttaaagctgcttgtaagattcaggcttggtatcggtgctggcgggcgcacaaagagtacctggcaattctgaaggcagtaaagatcattcagggatgtttctacactaaattggagcggacaagattcctgaacgtgcgtgcgtctgcgattattatccagaggaagtggcgagccatactgcctgctaagattgcgcacgagcactttctcatgatcaaacggcatcgcgccgcttgtcttatccaggcccactataggggatacaaaggccggcaggtgttcctgcggcaaaagagcgcagccctgattatccagaaatacataagagcgcgcgaggcgggtaagcacgagagaatcaagtatattgaatttaagaagtctactgtgattctccaggctttggtgcgtggatggcttgtgaggaaaagatttctggagcagagggccaagatccggttattgcacttcaccgccgctgcatactaccacctgaacgcagtaagaatccagcgcgcctacaagctatatctcgctgtcaaaaatgcaaataagcaggtgaactcagtgatttgtattcagcgatggttcagagcccgcttgcaggagaaacggtttattcagaagtaccattcaatcaagaagatcgaacacgagggccaagaatgcctgtctcagaggaatagggcggcatccgtgattcaaaaagccgttcggcactttcttttgcgcaagaagcaggagaagtttacctcgggaatcataaaaattcaggcgctgtggagaggttactcctggcgcaaaaagaacgactgtaccaagataaaagccattaggctgagtctccaggtagtgaatcgggagattcgcgaagagaacaagctctacaagagaaccgcactggctctgcattatctgttgacctataaacacctaagtgccattctggaggccctcaagcatttggaagtggtcaccagactttcccccttatgctgtgaaaacatggctcagagcggggcaatcagtaagatattcgtgctcatcagaagctgtaacagatcaatcccatgcatggaggtcatcaggtacgcagtgcaagtgttgctgaatgtgagcaagtatgaaaagaccaccagtgcagtgtacgatgtcgagaactgcatcgatatcctcctggagcttctgcagatctacagggaaaaacctggtaacaaggttgcggataagggcggaagcatattcacaaaaacttgctgcctgctcgccatcttgctcaagaccaccaatagggcttctgacgtgcgctcccgctcaaaggtggtagatcgaatttactccttgtacaagttaacagcgcacaaacacaagatgaatactgagaggatactgtataagcaaaagaaaaacagcagcatttcaatccccttcatccccgagaccccagtccgcacgcggattgtgtcgaggttgaagcccgactgggtactgcgaagggataacatggaagaaataacaaaccccctccaagctatccagatggtcatggatactttgggaatcccctattag

SEQ ID NO: 82589 - DNA, 3429 bp, Artificial Sequence
  derived and/or modified sequence
atgtctctgcgtgcctacactgcgcggtgccgccttaatcgtttacgcagagcagcgtgtcgactgttcacttcagagaagatggttaaggccattaagaagctggagatcgaaattgaagctaggcgacttattgtgagaaaggatagacacctatggaaggacgtcggcgagaggcagaaagtgctgaactggctcctaagctacaacccgctgtggctgagaattggcctcgaaacgacctacggggagctcatcagtctcgaggacaactctgacgtaacgggccttgctatgtttattctgaatagactgctgtggaatcctgatatcgcggcggaatatagacaccctacggttccccacctgtatcgcgacggacatgaagaagcactgtctaagtttactttgaagaaacttctcctgcttgtctgtttcctcgattatgctaaaatctctcgcctaatagatcatgatccctgtctgttttgcaaagatgcggagttcaaagcgtccaaagagattttgttagctttctctagggacttcttgtctggagagggggatctgtcccgccacctgggcctgctgggactgcctgtcaaccatgtacagaccccctttgacgagttcgattttgcggtcaccaacttggctgtcgatttgcagtgtggcgtaaggttggtgcggactatggagctgctgacacagaactgggatctgtctaagaagttgcggattccggcgatttcgaggctccagaagatgcacaatgtcgatatagttttacaggtactgaagtctagaggtattgagctgagcgacgagcacggcaacaccattcttagcaaagatatcgtcgatagacatcgcgagaagaccctccgtctcctctggaagattgccttcgcttttcaagtggacataagcctgaacctcgaccagctcaaggaggaaatcgcgttcctgaagcatactaagtccattaaaaagacaatcagcctgctgtcatgccattccgatgatcttattaacaagaagaagggtaagcgggattctggcagcttcgagcaatatagcgaaaacataaagctgctgatggactgggttaacgccgtatgcgcattctataacaagaaagtggagaatttcaccgtgtccttttcagatgggcgggtgctctgctacctgatccaccattatcacccatgctacgttcctttcgacgctatctgccaacgcacgactcagacggtggaatgtacccagactggcagcgtcgtgcttaattcctctagtgagagcgacgatagctccctggatatgtcacttaaagctttcgatcatgaaaatacctctgaactgtacaaagagcttcttgagaatgaaaaaaagaattttcacctcgtgcgctccgctgtgagggaccttgggggcatccctgccatgataaaccactccgacatgagcaataccatccccgacgagaaagtcgtcattacctatctaagcttcctgtgtgctaggctgttggatctgcggaaggagatccgcgcagcacggcttattcaaaccacttggcggaaatacaagcttaaaacagacctgaaaagacatcaagagcgagagaaagccgctaggatcatccagctcgcagtgattaatttcctcgctaaacagcggctgcggaagagagtgaatgctgctttggtgatccaaaagtactggaggcgagtcctggcccagaggaaactgctgatgctgaaaaaagaaaaacttgagaaagtccaaaacaaagctgcctcactaatccaggctatgtggcgaagatacagggccaagaagtatctgtgtaaggttaaggcggcctgcaagatacaggcctggtatcgatgctggagagcgcataaagagtacctggcaatcttgaaagctgtgaaaattatccagggatgtttctataccaagctcgagagaacccgttttcttaacgtgagagcttctgcgatcattattcagcggaaatggagagccatactgccagccaagattgcgcatgaacatttcctgatgatcaaaaggcacagagcagcttgcctcatccaagcacactacagaggatataaaggacgccaggtattcctccggcagaagagtgcggccttgattattcaaaagtacatcagagcacgcgaggccggcaaacacgagcggatcaaatacatcgagtttaaaaaaagtactgtaatcctacaggcacttgtccgtggctggctagtgcgcaagcgctttctggagcagagggctaaaattcggcttttgcacttcacagctgcagcctattatcaccttaatgctgtgaggattcagcgggcgtataaactctacttggccgttaagaatgcaaataaacaggtgaactcagtgatctgtattcagcgctggttcagggccagactccaggagaaacgtttcatccagaagtaccattctattaagaagatcgagcatgaaggccaggagtgtctgtctcagaggaaccgagctgcttctgttatccaaaaggctgtgagacatttccttctgcgaaagaagcaagaaaaatttactagcggcatcattaagatccaggccctttggcgcggttatagctggagaaagaagaatgactgcacaaagattaaggcaattcgcctaagtctccaagtggtgaaccgcgagatccgggaggaaaacaagctatacaaaagaacagcactagcccttcactatctgctcacatataagcacttatccgccatcctggaagcactcaagcacctcgaagtggtgacccgtctgtcccctctgtgctgtgaaaatatggcccaatccggggctatctctaagattttcgtgctgatccgatcatgcaaccgatctatcccgtgtatggaggtgattaggtatgccgtccaggtgttgcttaatgtgtcaaagtacgagaagacaacaagcgccgtgtacgacgtcgagaattgtatcgacatattgcttgagttactgcagatttaccgtgaaaagcccgggaacaaagtagctgacaaggggggctccattttcacgaagacttgctgcctcctagcaatcctgctgaagactactaatcgggcctcagacgtgcgctccaggagtaaggtggtggacaggatttatagcctatacaagttgaccgcccataaacataaaatgaacacagagagaatcctctataaacagaaaaagaattcaagcatatcaatcccattcatcccggagactcctgtgcgcaccaggattgtgtcacgattgaaaccagactgggtcttacgccgcgataacatggaggagataacaaatccgctgcaggctatccaaatggttatggatacactcggcataccgtattag

SEQ ID NO: 82590 - DNA, 5679 bp, Artificial Sequence
  derived and/or modified sequence
atggccaacagaagagtgggccggggctgctgggaggtgagccccacagagcggcggcccccagctggcctgcggggccctgctgctgaggaggaggccagcagcccccctgtgctgagcctgagccacttctgccgcagccccttcctgtgctttggagatgtgctgctgggcgccagcaggaccctgagcctggccctggacaaccccaatgaggaggtggccgaggtgaagatcagccacttccctgctgctgacctgggcttctctgtgtcccagcgctgctttgtgctgcagcccaaggagaagatcgtcatctctgtgaactggacccccctgaaggagggccgggtgcgggagatcatgaccttcctggtgaatgatgtgctgaagcaccaggccatcctgctgggcaatgctgaggagcagaagaagaagaagaggagcctgtgggacaccatcaagaagaagaagatcagcgccagcaccagccacaacagaagagtgagcaacatccagaatgtgaacaagaccttctctgtgtcccagaaggtggacagagtgcgcagccccctgcaggcctgtgagaacctggccatgaatgaaggaggccccccaacagagaacaacagcctcatcctggaggagaacaagatccccatcagccccatcagccctgccttcaatgaatgccacggggccacctgcctgcccctgtctgtgcggcgcagcaccacctacagcagcctgcacgccagcgagaaccgggagctgctgaatgtgcacagcgccaacgtgtccaaggtgtccttcaatgagaaggctgtgacagagaccagcttcaacagcgtgaatgtgaatggccagagaggagagaacagcaagctgagcctgacccccaactgcagcagcaccctgaacatcacccagagccagatccacttcctgagcccagacagctttgtgaacaacagccacggggccaacaatgagctggagctggtgacctgcctgagcagtgacatgttcatgaaggacaacagccagcctgtgcacctggagagcaccatcgcccacgagatctaccagaagatcctgagcccagacagcttcatcaaggacaactacggcctgaaccaggacctggagagcgagagcgtgaaccccatcctgagccccaaccagttcctgaaggacaacatggcctacatgtgcaccagccagcagacctgcaaggtgcccctgagcaatgaaaacagccaggtgccccagagccctgaggactggaggaagtctgaggtgagcccccgcatccctgagtgccagggcagcaagagccccaaggccatctttgaggagctggtggagatgaagagcaactactacagcttcatcaagcagaacaaccccaagttctctgctgtgcaggacatcagcagccacagccacaacaagcagcccaagagaagacccatcctgagcgccaccgtgaccaagaggaaggccacctgcacccgggagaaccagacagagatcaacaagcccaaggccaagcgctgcctgaacagcgctgtgggggagcacgagaaggtgatcaacaaccagaaggagaaggaggacttccacagctacctgcccatcatcgaccccatcctgagcaagagcaagagctacaagaatgaggtgacccccagcagcaccacagcctctgtggccaggaagaggaagagtgatggctccatggaggatgccaacgtgcgggtggccatcacagagcacacagaggtgcgggagatcaagaggatccacttcagccccagcgagcccaagaccagcgctgtgaagaagaccaagaatgtgaccacccccatcagcaagaggatcagcaaccgggagaagctgaacctgaagaagaagacagacctgagcatcttccgcacccccatcagcaagaccaacaagaggaccaagcccatcatcgctgtggcccagagcagcctgaccttcatcaagcccctgaagacagacatccccaggcaccccatgccctttgctgccaagaacatgttttatgatgagcgctggaaggagaagcaggagcagggcttcacctggtggctgaacttcatcctgaccccagatgacttcaccgtgaagaccaacatcagcgaggtgaatgctgccaccctgctgctgggcatcgagaaccagcacaagatctctgtgccccgggcccccaccaaggaggagatgagcctgcgggcctacacagcccgctgccgcctgaaccggctgcggcgggccgcctgccgcctcttcaccagcgagaagatggtgaaggccatcaagaagctggagattgaaattgaggcccggcggctgattgtgaggaaggacagacacctgtggaaggatgtgggggagcggcagaaggtgctgaactggctgctgagctacaaccccctgtggctgcgcatcggcctggagaccacctacggggagctgatcagcctggaggacaacagtgatgtgacaggcctggccatgttcatcctgaaccggctgctgtggaacccagacattgctgctgagtaccgccaccccaccgtgccccacctgtacagagatggccacgaggaggccctgagcaagttcaccctgaagaagctgctgctgctggtgtgcttcctggactatgccaagatcagccggctgattgaccatgacccctgcctcttctgcaaggatgctgagttcaaggccagcaaggagatcctgctggccttcagccgggacttcctgtctggagagggggacctgagccgccacctgggcctgctgggcctgcctgtgaaccacgtgcagaccccatttgatgaatttgattttgctgtgaccaacctggccgtggacctgcagtgtggggtgcggctggtgaggaccatggagctgctgacccagaactgggacctgagcaagaagctgcgcatcccagccatcagccggctgcagaagatgcacaacgtggacatcgtgctgcaggtgctgaagagccggggcatcgagctgagtgatgaacatggcaacaccatcctgagcaaggacatcgtggacagacaccgggagaagaccctgcggctgctgtggaagatcgcctttgccttccaggtggacatcagcctgaacctggaccagctgaaggaggagatcgccttcctgaagcacaccaagagcatcaagaagaccatcagcctgctgagctgccacagtgatgacctgatcaacaagaagaagggcaagagggacagcggcagctttgagcagtacagcgagaacatcaagctgctgatggactgggtgaatgctgtgtgtgccttctacaacaagaaggtggagaacttcaccgtgtccttcagtgatggccgggtgctgtgctacctgatccaccactaccacccctgctacgtgccctttgatgccatctgccagaggaccacccagacagtggagtgcacccagacaggctctgtggtgctgaacagcagcagcgagagtgatgacagcagcctggacatgagcctgaaggcctttgaccacgagaacaccagcgagctgtacaaggagctgctggagaatgagaagaagaacttccacctggtgcgctctgctgtgcgggacctgggcggcatcccagccatgatcaaccacagcgacatgagcaacaccatcccagatgagaaggtggtgatcacctacctgtccttcctgtgtgcccggctgctggacctgaggaaggagatccgggccgcccggctcatccagaccacctggaggaagtacaagctgaagacagacctgaagaggcaccaggagcgggagaaggccgcccgcatcatccagctggccgtcatcaacttcctggccaagcagaggctgaggaagagggtgaatgctgccctggtgatccagaagtactggaggagagtgctggcccagaggaagctgctgatgctgaagaaggagaagctggagaaggtgcagaacaaggccgccagcctcatccaggccatgtggaggcgctaccgggccaagaagtacctgtgcaaggtgaaggccgcctgcaagatccaggcctggtaccgctgctggagggcccacaaggagtacctggccatcctgaaggctgtgaagatcatccagggctgcttctacaccaagctggagaggacccgcttcctgaatgtgcgggccagcgccatcatcatccagaggaagtggagggccatcctgcctgccaagatcgcccacgagcacttcctgatgatcaagaggcacagagctgcctgcctgatccaggcccactaccggggctacaagggccggcaggtgttcctgcggcagaagtctgctgccctgatcatccagaagtacatccgggcccgggaggccggcaagcatgagcgcatcaagtacatcgagttcaagaagagcaccgtcatcctgcaggccctggtgcggggctggctggtgaggaagcgcttcctggagcagagggccaagatccggctgctgcacttcaccgctgctgcctactaccacctgaatgctgtgcgcatccagagggcctacaagctgtacctggccgtgaagaatgccaacaagcaggtgaacagcgtcatctgcatccagcgctggttccgggcccggctgcaggagaagcgcttcatccagaagtaccacagcatcaagaagattgaacatgagggccaggagtgcctgagccagaggaacagagctgccagcgtcatccagaaggctgtgcgccacttcctgctgaggaagaagcaggagaagttcaccagcggcatcatcaagatccaggccctgtggaggggctacagctggaggaagaagaatgactgcaccaagatcaaggccatccggctgagcctgcaggtggtgaaccgggagatccgggaggagaacaagctgtacaagaggacagccctggccctgcactacctgctgacctacaagcacctgagcgccatcctggaggccctgaagcacctggaggtggtgacccggctgagccccctgtgctgtgagaacatggcccagagcggggccatcagcaagatctttgtgctgatccgcagctgcaacagaagcatcccctgcatggaggtgatccgctatgctgtgcaggtgctgctgaatgtgtccaaatatgagaagaccaccagcgctgtgtatgatgtggagaactgcatcgacatcctgctggagctgctgcagatctaccgggagaagccaggcaacaaggtggccgacaagggcggcagcatcttcaccaagacctgctgcctgctggccatcctgctgaagaccaccaacagagccagtgatgtgcgcagccgcagcaaggtggtggaccgcatctacagcctgtacaagctgacagcccacaagcacaagatgaacacagagcgcatcctgtacaagcagaagaagaacagcagcatcagcatccccttcatccctgagacccctgtgaggacccgcatcgtgtcccggctgaagccagactgggtgctgcggcgggacaacatggaggagatcaccaaccccctgcaggccatccagatggtgatggacaccctgggcatcccctactag

SEQ ID NO: 82591 - DNA, 3429 bp, Artificial Sequence
  derived and/or modified sequence
atgagcctgcgggcctacacagcccgctgccgcctgaaccggctgcggcgggccgcctgccgcctcttcaccagcgagaagatggtgaaggccatcaagaagctggagattgaaattgaggcccggcggctgattgtgaggaaggacagacacctgtggaaggatgtgggggagcggcagaaggtgctgaactggctgctgagctacaaccccctgtggctgcgcatcggcctggagaccacctacggggagctgatcagcctggaggacaacagtgatgtgacaggcctggccatgttcatcctgaaccggctgctgtggaacccagacattgctgctgagtaccgccaccccaccgtgccccacctgtacagagatggccacgaggaggccctgagcaagttcaccctgaagaagctgctgctgctggtgtgcttcctggactatgccaagatcagccggctgattgaccatgacccctgcctcttctgcaaggatgctgagttcaaggccagcaaggagatcctgctggccttcagccgggacttcctgtctggagagggggacctgagccgccacctgggcctgctgggcctgcctgtgaaccacgtgcagaccccatttgatgaatttgattttgctgtgaccaacctggccgtggacctgcagtgtggggtgcggctggtgaggaccatggagctgctgacccagaactgggacctgagcaagaagctgcgcatcccagccatcagccggctgcagaagatgcacaacgtggacatcgtgctgcaggtgctgaagagccggggcatcgagctgagtgatgaacatggcaacaccatcctgagcaaggacatcgtggacagacaccgggagaagaccctgcggctgctgtggaagatcgcctttgccttccaggtggacatcagcctgaacctggaccagctgaaggaggagatcgccttcctgaagcacaccaagagcatcaagaagaccatcagcctgctgagctgccacagtgatgacctgatcaacaagaagaagggcaagagggacagcggcagctttgagcagtacagcgagaacatcaagctgctgatggactgggtgaatgctgtgtgtgccttctacaacaagaaggtggagaacttcaccgtgtccttcagtgatggccgggtgctgtgctacctgatccaccactaccacccctgctacgtgccctttgatgccatctgccagaggaccacccagacagtggagtgcacccagacaggctctgtggtgctgaacagcagcagcgagagtgatgacagcagcctggacatgagcctgaaggcctttgaccacgagaacaccagcgagctgtacaaggagctgctggagaatgagaagaagaacttccacctggtgcgctctgctgtgcgggacctgggcggcatcccagccatgatcaaccacagcgacatgagcaacaccatcccagatgagaaggtggtgatcacctacctgtccttcctgtgtgcccggctgctggacctgaggaaggagatccgggccgcccggctcatccagaccacctggaggaagtacaagctgaagacagacctgaagaggcaccaggagcgggagaaggccgcccgcatcatccagctggccgtcatcaacttcctggccaagcagaggctgaggaagagggtgaatgctgccctggtgatccagaagtactggaggagagtgctggcccagaggaagctgctgatgctgaagaaggagaagctggagaaggtgcagaacaaggccgccagcctcatccaggccatgtggaggcgctaccgggccaagaagtacctgtgcaaggtgaaggccgcctgcaagatccaggcctggtaccgctgctggagggcccacaaggagtacctggccatcctgaaggctgtgaagatcatccagggctgcttctacaccaagctggagaggacccgcttcctgaatgtgcgggccagcgccatcatcatccagaggaagtggagggccatcctgcctgccaagatcgcccacgagcacttcctgatgatcaagaggcacagagctgcctgcctgatccaggcccactaccggggctacaagggccggcaggtgttcctgcggcagaagtctgctgccctgatcatccagaagtacatccgggcccgggaggccggcaagcatgagcgcatcaagtacatcgagttcaagaagagcaccgtcatcctgcaggccctggtgcggggctggctggtgaggaagcgcttcctggagcagagggccaagatccggctgctgcacttcaccgctgctgcctactaccacctgaatgctgtgcgcatccagagggcctacaagctgtacctggccgtgaagaatgccaacaagcaggtgaacagcgtcatctgcatccagcgctggttccgggcccggctgcaggagaagcgcttcatccagaagtaccacagcatcaagaagattgaacatgagggccaggagtgcctgagccagaggaacagagctgccagcgtcatccagaaggctgtgcgccacttcctgctgaggaagaagcaggagaagttcaccagcggcatcatcaagatccaggccctgtggaggggctacagctggaggaagaagaatgactgcaccaagatcaaggccatccggctgagcctgcaggtggtgaaccgggagatccgggaggagaacaagctgtacaagaggacagccctggccctgcactacctgctgacctacaagcacctgagcgccatcctggaggccctgaagcacctggaggtggtgacccggctgagccccctgtgctgtgagaacatggcccagagcggggccatcagcaagatctttgtgctgatccgcagctgcaacagaagcatcccctgcatggaggtgatccgctatgctgtgcaggtgctgctgaatgtgtccaaatatgagaagaccaccagcgctgtgtatgatgtggagaactgcatcgacatcctgctggagctgctgcagatctaccgggagaagccaggcaacaaggtggccgacaagggcggcagcatcttcaccaagacctgctgcctgctggccatcctgctgaagaccaccaacagagccagtgatgtgcgcagccgcagcaaggtggtggaccgcatctacagcctgtacaagctgacagcccacaagcacaagatgaacacagagcgcatcctgtacaagcagaagaagaacagcagcatcagcatccccttcatccctgagacccctgtgaggacccgcatcgtgtcccggctgaagccagactgggtgctgcggcgggacaacatggaggagatcaccaaccccctgcaggccatccagatggtgatggacaccctgggcatcccctactag

SEQ ID NO: 82592 - DNA, 5679 bp, Artificial Sequence
  derived and/or modified sequence
atggccaaccggcgggtgggccggggctgctgggaggtgagccccaccgagcggaggcctcccgccggcttgcgcggccccgccgccgaggaagaagctagtagcccacctgtcctgagtctgtctcacttttgtcgcagccctttcctgtgctttggcgatgtgctgctcggggccagccgtacccttagcttagcactagataatccgaatgaggaggtggccgaggtgaagatctcacactttccggccgcggacctggggtttagcgtatcccagcggtgctttgttttacagcccaaagaaaaaatagtgatttccgtcaattggaccccccttaaagagggcagggtgcgggaaatcatgacatttcttgtgaatgacgtgctcaaacatcaggctatcttgcttggaaacgctgaggagcaaaaaaaaaagaaacgctccttatgggacacaatcaagaaaaagaaaatctccgcttcaacctcgcacaacaggcgcgtgagtaacatccaaaacgttaacaagaccttcagtgtgagtcagaaggtggacagggtgcgatcaccacttcaggcttgcgaaaacttagcgatgaatgaaggcggcccaccgactgaaaacaactcattaattctagaagagaacaagatcccaatttcccccatctcccccgctttcaatgagtgtcacggggctacttgtctgcccctgtcagtgcgacggtcaaccacatatagctctctccacgcctctgagaatcgtgaattactcaacgtgcattccgcaaacgtgagcaaagtatctttcaatgaaaaagccgtgaccgagacaagtttcaacagcgttaatgtaaatggtcagagaggggagaactcgaagctgagcctgactccaaactgctcttctaccctcaatattacccagtcacagatccactttctctctccggacagttttgttaataattcgcatggcgccaataacgagctggaactggttacctgcctcagttccgacatgtttatgaaggacaatagccagcctgtgcacctcgagtcgaccattgcccatgagatataccaaaaaatattgtcccccgacagctttatcaaagataattatggcttgaatcaggatctggagagtgagtccgtcaatcccatcctttccccaaatcagttcctgaaagacaacatggcctatatgtgcacttcgcaacaaacttgtaaagtgccgctgtccaacgagaattctcaggtccctcagtccccagaggactggaggaaaagcgaggtcagccccagaattccggagtgccagggcagcaagtctcccaaggccatctttgaggagctggtagaaatgaaatctaattattactctttcatcaagcagaataaccccaaattttctgcagtccaggacatctcctcccattctcacaacaagcagccaaagagaagacccattctttcggccaccgtcactaaacggaaggcgacctgcacccgcgagaatcagaccgaaatcaataaacctaaggctaaacgctgccttaattctgccgttggtgagcatgagaaggttatcaataaccagaaggaaaaggaagactttcatagttatcttccaatcatcgaccctatcctctcaaaaagtaaatcttacaagaacgaggtgacaccctccagcaccaccgccagcgttgcaaggaaacgaaagtctgatggaagtatggaagacgcaaatgtgagggtggcaattactgagcatacggaggtccgagaaattaaaagaatccacttttcccctagcgagcccaagacgagtgcagtgaagaagaccaaaaatgtgacaaccccaatttctaagagaatttccaacagggaaaaactgaacctcaaaaaaaaaaccgacttgtcaatcttccggacacctattagcaaaactaacaagcggaccaagcccatcatcgccgttgcgcagagttcactgacgttcatcaaaccattgaaaaccgacattcctaggcaccccatgccttttgctgcgaagaacatgttttacgacgagcgatggaaggagaaacaggagcagggctttacatggtggctgaatttcatcctgacccctgacgactttacagtgaaaaccaacatttcagaggtcaatgcagcgacccttctgctgggaatcgagaaccagcacaagatttccgtgcctagagcccccactaaagaagagatgtccttgagagcatacaccgctcgctgcagactgaatcgcttacggagagcggcgtgccgcttgttcacgtcagagaagatggttaaagccattaaaaaactggagattgaaattgaggcaagacggctgatcgtgcgcaaggacagacacttatggaaggacgtgggagagcgtcagaaggtactcaactggctgttgagttacaaccccctgtggttaaggatagggctcgagacaacatacggagagttgataagtttagaggacaatagtgacgtcaccggactcgcaatgttcatactcaatcgactgctttggaacccggatattgccgccgaatacagacacccaactgtgccccatctctaccgggacggccacgaggaggcactgagtaaatttacgctcaagaagttactactcctggtttgctttctcgactacgccaagatatctcgtctgattgaccacgatccatgcctcttttgtaaggacgctgaattcaaggctagcaaagagatcctgttagctttttcccgtgacttcctgtccggcgagggcgatctaagcagacatcttggcctgctaggacttcccgtgaatcacgtccagaccccgttcgacgagttcgattttgcagtcacaaatctggcggttgacctgcaatgcggcgtgcggctggtgcgtaccatggaactacttacacaaaactgggatttaagtaaaaagctaagaatccctgctataagccggctccaaaaaatgcacaatgtcgacattgtactgcaggttctcaagagtcgcggaatagagcttagcgacgagcatggaaataccatcctgtcgaaggacattgttgaccgacaccgcgagaagaccctgcgtctactttggaagatcgcatttgccttccaagtggacatttctctgaacctcgaccagttaaaggaggaaattgcgttcctgaagcatacaaaaagtataaagaaaaccatttctctcctttcatgtcacagcgatgacctaattaacaaaaagaagggaaagagagattcaggcagctttgagcagtactcagaaaacattaaattacttatggattgggtcaacgcagtttgtgccttctacaataagaaagtggaaaacttcaccgtgtctttttccgacggtagagtgctttgctatctgatccaccactaccatccttgttatgtcccatttgatgctatatgccagcgcactacccagacagtagaatgtacccagactggctcggttgtgctgaattcgtcatccgaatcagatgattcatccctggatatgtccctgaaagcttttgaccacgagaacacctctgagctgtacaaagagcttcttgagaatgaaaaaaaaaattttcacctggtgagatctgccgtgagagacctaggcggaatacctgccatgatcaatcactctgacatgagtaacacaattcccgatgagaaggtggttatcacctacttgagtttcctgtgtgcccgactgctggacctccgcaaagagatccgcgccgcgcgcttgattcagacaacctggcgcaaatacaaacttaagaccgacttaaagcggcatcaggagcgggagaaggccgcaaggattatccagctcgctgtcataaacttcctggcaaagcagcggttgcgcaagcgtgtgaatgctgcgctggttatccaaaagtattggagacgggtgctggcgcagcgcaagctgctgatgctgaagaaagaaaaattggagaaggttcagaataaggccgcctccctgattcaagcaatgtggcggagataccgcgcaaagaaatacctatgtaaggtgaaggccgcttgtaaaatacaggcctggtacagatgctggcgcgcacacaaggagtatctggctattctgaaggccgtgaaaattattcagggctgtttctatactaagctggagcgtacaagattcttaaatgtacgcgcaagcgctattattatccaaaggaaatggagggcaatactgcccgctaagatagcgcacgagcacttcctcatgatcaagaggcatagagccgcctgccttattcaggcccattaccgggggtacaaaggccggcaggtgttcctgcggcagaaatccgccgcccttatcatccagaaatatattagagcacgcgaagcaggtaaacacgagcgaatcaagtacatagagttcaaaaaatccacagtgatcctccaggccctggtgaggggctggctcgtgagaaaaagattcctggagcagagagccaagatccgtctgctccatttcacggcggccgcttattaccacctgaacgccgtgcgcattcagcgtgcatataagctttatctcgccgtgaaaaatgcgaacaaacaagtgaacagcgtcatttgcatccagcggtggttcagagctcggctccaggagaagagattcatacagaagtatcactccatcaagaaaatcgagcacgagggccaggagtgtctgtcccagaggaatcgggccgcaagtgttatccagaaggctgtgagacattttctgcttcggaaaaagcaggaaaagttcacatcagggattatcaaaatccaggccttgtggagggggtattcttggcggaaaaagaatgactgtaccaagataaaagcgatccgtcttagcctccaggtggtcaaccgagaaatccgggaagagaacaagctgtataaacgcaccgcgctcgccttgcattacctgcttacctataaacacttgtccgccatcctggaggctctgaaacacttggaagtggtgacccgactgtctcccctgtgttgtgagaacatggctcagtctggtgctatttctaaaatctttgtgctgatccgcagctgtaaccgatccatcccttgcatggaagtgatcaggtatgccgtgcaggtcctcctgaacgtgtctaagtacgagaaaaccacatcagcggtttacgatgtggaaaactgtattgacatactcctggaactgctacagatatatagagagaagcccggcaacaaagttgcagataaaggaggcagtatctttactaaaacctgttgcttgttagccatcttgttgaagaccactaatcgagcaagcgacgtgagatcccgcagcaaggtcgtggatcggatctattctttgtataagttgacagcacacaaacataaaatgaacacagagcgaatcctgtataagcagaagaaaaattctagcattagtattcccttcatccccgaaacgcctgtccgaacaagaatcgtgtccagattgaaacccgattgggtgctgcgacgtgacaatatggaggaaatcactaatccactacaggccattcaaatggtaatggatacactggggataccttattag

SEQ ID NO: 82593 - DNA, 3429 bp, Artificial Sequence
  derived and/or modified sequence
atgagcctgcgggcctacaccgcccggtgccggctgaaccggctgcggagggccgcctgtagacttttcaccagtgaaaagatggtgaaggctatcaaaaaactcgagatcgagatcgaagcacgcaggttaattgtccgcaaagataggcacctatggaaggacgtgggcgagagacaaaaagtcctcaattggctgctgagctacaaccctctgtggttaaggatagggctagagacaacgtacggtgagctaatcagtctcgaggacaattctgatgttactggccttgcaatgtttatcctcaatagactcctgtggaatcccgatattgctgctgagtaccgccatcccactgtcccgcatctgtaccgggacgggcacgaggaagcgctcagtaagtttacactgaagaaactcttactgttggtatgttttctggattacgcaaaaatctcaagacttattgatcacgacccctgtctcttttgtaaagacgctgagttcaaagcctcgaaggagatccttctggcttttagtcgcgactttctttcaggggaaggtgacttgagtaggcaccttggcctgctggggctgccagtaaaccatgtgcagacaccttttgacgagttcgattttgctgtaaccaacctggccgtggatttacagtgcggtgttagactggttaggaccatggaactgctgacccagaactgggacctgagcaaaaaacttagaatacccgccattagcaggctacagaagatgcataacgtcgacatcgtgctccaggtgttgaaaagccggggtatcgaactctccgatgagcacgggaacaccattctgtccaaagatattgtggacagacacagagagaaaactctgcgcctcctctggaagatagccttcgcctttcaggtggatatttctttaaacctggaccagctcaaagaagagattgcctttctgaaacacaccaaatcgataaaaaaaaccatctctttgctgagttgtcattcagatgatctcattaacaaaaaaaaaggtaagagagatagtggctctttcgagcagtactctgagaacatcaagctcctgatggactgggtgaacgcagtatgcgccttttataacaagaaagtggagaacttcactgtgtcttttagcgatgggcgggtgctgtgttatctgatccaccactaccacccttgctatgtcccctttgacgctatttgtcaaaggacaacccagacagtcgaatgtacccaaaccgggtcagttgtcctcaatagtagttctgagtccgatgacagctcacttgatatgtctctcaaggcgttcgatcacgagaatacgtctgaactgtacaaggagcttctcgaaaatgagaaaaaaaattttcatctcgtgcgatcagcggtaagagatcttggcggcatccctgcaatgattaatcactctgacatgagcaatactatccctgacgagaaggtggtgatcacctacctgtcgtttctttgtgcccgcctgttggatctgaggaaagagattagggccgcaagactcatacaaaccacctggaggaagtacaagctcaaaacagaccttaagaggcaccaggagagagaaaaagccgcccgcatcatccagctagctgtgatcaactttctagccaagcagaggctaaggaagcgggttaacgctgccctagtgatccagaaatactggcgacgtgtgctcgcgcagcgcaagcttctgatgcttaaaaaagagaagctagagaaagtccagaataaggctgccagtctgatccaggctatgtggcgtaggtacagggccaagaaatacctgtgcaaggtgaaggctgcatgcaaaattcaggcttggtaccggtgctggcgggcccataaggagtacctggctatcctcaaagctgttaaaatcatacaggggtgtttctacaccaagcttgagcgaactcgcttcttaaatgtgcgagccagtgccattattatacagcggaaatggcgggctattttgccagcgaaaatcgcacatgagcatttcctgatgatcaaaagacacagggcagcgtgcttgatccaggcccactacagagggtacaaaggtcgccaggtcttcttgagacaaaaatctgccgccctcattatccagaaatacatacgggcccgtgaggcaggtaagcacgagcgcataaagtacattgagttcaaaaaaagtaccgtgatcctccaggctttagttcggggctggttggtgaggaaaagattcctagagcaaagagccaagatccggctgctgcattttaccgcagccgcttactaccatctgaacgcagttcggatccagagagcctacaaactgtatctggccgtaaagaacgcgaataaacaggtgaatagcgttatttgcattcagagatggttccgtgcacgattacaggagaaaaggtttatacagaaataccacagtatcaaaaagatagaacacgaggggcaagagtgtctgtctcaaagaaaccgcgctgcaagtgtaatacagaaagcggtccggcacttcttactgcggaaaaaacaggagaagtttacaagcgggatcatcaagatccaggcattatggcgcggctacagctggcggaaaaaaaatgactgtacaaagattaaagcaatcagactgagtcttcaggtagtgaacagggaaattcgggaggagaataagctgtacaagcggaccgcactggcgctgcactatctcctgacttataagcacctgagcgccattcttgaggcactcaagcatctcgaggtggttacacgccttagcccactctgctgcgagaatatggcccaatctggagctatctcgaagattttcgtcctgatcaggtcttgcaaccgaagtattccttgtatggaagtgattcgatatgccgtgcaggtactcctgaatgtgagtaagtatgaaaaaacaacatccgctgtgtacgacgtggagaattgcattgacatcctgctagagttattgcaaatctacagggagaagccagggaataaagtggccgacaagggcggttccatcttcactaaaacctgttgtttgcttgcgatcctgctgaagacaacaaatcgggcgtccgatgtgaggagtcgtagcaaagtagtggatcggatttattctctttacaagctgacagcacacaaacacaagatgaacacagagagaattctgtacaaacaaaagaagaactcaagtatctctataccatttatcccagaaacccccgtcaggactcgaattgttagccgcctcaagcctgactgggtcctaagaagagataatatggaggagataaccaatccgctgcaggcaatccagatggtaatggataccttagggatcccctactag

SEQ ID NO: 82594 - DNA, 5679 bp, Artificial Sequence
  derived and/or modified sequence
atggccaatcgtagggtcggacgcggttgctgggaggtcagcccgaccgagcggaggcctcccgctggcctgcggggaccagccgcagaggaagaggcgtcatcccctcctgtccttagcctgtctcatttttgccggtcgcccttcctttgtttcggcgatgtgctgctgggtgcgagccgcacgctgagtctggcactggataaccccaacgaagaggtggcagaggtcaaaatctcccatttccctgccgcagatctcgggttctcagtttctcagaggtgcttcgtgctgcagccaaaggaaaagatcgtcattagcgtgaactggacacctttaaaggagggtcgcgtcagagagataatgacatttctggtaaatgacgtgctgaaacaccaggcaattctgttaggcaatgccgaggaacagaagaagaaaaagcgcagcctgtgggacactataaagaaaaagaagattagcgcaagtacaagccacaacagacgcgtgtcaaatattcagaatgttaataagactttctctgtgtcccagaaggtggatagagtcaggtcacccctgcaagcatgcgagaaccttgccatgaacgaggggggtcctcccacagagaacaatagtctcatccttgaggagaataaaatccccatttcccccatctctccagcgtttaacgaatgccacggagcaacctgcctgccccttagcgttagacggtccaccacatattcgtccctgcacgcaagtgaaaacagagaactgctaaacgtgcactccgctaatgtcagtaaagtctctttcaacgagaaggcggttacagagacgagtttcaactcggtcaatgttaatggccagagaggtgaaaactcgaagttgagcctgactcccaattgttcttctactctgaatatcactcagtctcagattcattttctgagtcccgatagtttcgtgaacaactcacatggagccaacaatgaactggaacttgtgacctgcctcagcagcgatatgttcatgaaagataattctcagccagttcacctcgaatcaacaattgcacacgaaatctaccaaaagatccttagtcctgattcattcattaaggacaactacggactgaatcaggatctggaatctgaatccgtgaatccaattctaagtcccaaccagtttctcaaggataatatggcatacatgtgcacctcacaacagacctgtaaagtgccactctctaatgaaaactcccaagtgcctcagtcccccgaggactggcggaagtctgaggtttcacccagaatccccgaatgtcagggatctaagagtcccaaggcaatatttgaggagctggtggagatgaagtcgaattactactcttttattaaacaaaacaatcctaagtttagcgcggtacaggatattagctcccactctcacaacaagcagcccaagaggaggcctatcctaagcgccaccgtgaccaaacgcaaggccacctgcacgcgggagaaccagacggaaataaataaaccaaaggccaaaaggtgcctgaattcagccgtgggggagcatgaaaaggttatcaacaaccagaaggaaaaggaggactttcacagttatctacctattatcgatccgatcctgagcaagagtaagtcttataagaacgaggtgaccccctcctctactacggccagcgtcgccagaaagcggaaaagcgatggatcaatggaggacgccaatgtcagagtcgccatcaccgagcataccgaggtccgtgaaatcaagaggattcacttttccccatcagaaccaaaaactagcgcagtcaagaaaacaaaaaacgtcacaaccccgatttcaaagagaattagcaaccgggagaagctgaacctaaaaaaaaaaaccgatctgagcatttttcggactcctattagtaagaccaataagcgcactaaacccatcattgcagtcgcccagtccagcctgactttcattaagcctctgaaaactgacattcctcgccacccaatgccatttgcggctaaaaacatgttctatgacgagagatggaaagagaaacaggagcaggggttcacatggtggctcaactttattctgacacccgatgatttcaccgtcaagactaatatatccgaggttaatgccgcaacactgcttcttggcatagaaaaccagcacaagatctcagttccccgtgccccaacaaaggaggaaatgtctctgcgggcatacaccgctcgctgccgcctcaatagactgaggcgggcagcctgtcgtctcttcacctcagaaaagatggttaaggctatcaaaaagttagagattgaaatagaagcaagacggttaatcgtccggaaagatcggcacctctggaaggacgtaggagagcggcagaaggtgctaaactggctgctcagttacaatcccctttggctgcggataggcctggagactacatacggcgaactgatatccttagaagataactcagacgtgacgggtctagcaatgtttatcctgaacagactgctttggaaccccgatattgcggcagaatataggcatcctacagtgccccacttgtaccgggacggtcatgaagaagcgctgagtaaattcacccttaaaaaacttctgctgctcgtgtgtttcctggattacgccaaaatatcaaggctaattgatcacgacccttgcctgttttgcaaagacgctgagttcaaggccagcaaggagatacttttggccttctctcgggacttcctgtccggtgagggcgatctgtcacgtcacctcgggctgctcggcctccccgtgaaccatgtgcaaactcccttcgacgagttcgatttcgccgtcacgaacttggccgtggacttgcagtgcggcgtgcgactggtcagaacaatggaacttctaacacagaactgggacctcagcaagaagctccgcatcccggctatttccaggttacagaagatgcacaacgtcgatatagtgctgcaggtgctgaaatctagaggaatcgaactctctgacgaacacggcaacacaatattatcaaaagacattgtggacagacatagggagaaaactttacggttgctgtggaaaatcgcattcgcctttcaggttgatatctcactgaacttagatcagctgaaagaagaaatagctttcttgaagcatacaaaaagtatcaagaagaccattagtctgctctcttgtcattctgacgatttaataaataagaaaaaaggaaagagagattccgggtccttcgagcagtattccgagaatatcaagttgctgatggactgggtcaacgccgtttgtgcattttacaacaaaaaggtggaaaacttcacagtgtcattttccgatggcagagtgctctgttacttgatacatcactaccatccctgctacgtgccctttgatgctatttgtcaaaggacaacccagacagttgaatgcacacagaccggatctgtggtgctcaatagcagctcagaatccgacgactctagcctcgatatgtcactaaaggcattcgatcatgaaaatactagcgaactgtataaggaactcttggagaacgagaagaaaaactttcacctagtgcgatcagctgttcgagacctgggcggaatcccagccatgattaatcattccgatatgtctaacacaatcccggacgagaaagtcgtcatcacctatctttcctttttatgcgccaggctgttggacctgagaaaagagatccgcgctgcgcgactaatccagactacgtggcgcaagtacaagctcaaaacggacctcaaacgacaccaggaaagagagaaggccgctcgcatcattcagctggctgtgataaacttcctggcgaaacagcgtctgcggaagagggtcaatgcagccttggtgatccagaagtactggcgcagagtgcttgcgcagcgaaaattgctgatgctgaagaaagaaaaactggagaaagttcaaaacaaagccgctagtcttattcaggccatgtggagaaggtacagggctaaaaagtatctctgtaaggtgaaagcagcctgcaagatacaggcctggtacaggtgctggcgagcacacaaggagtacctggcaattcttaaggccgtgaaaattatacagggctgtttttataccaagctggagaggactcggttcctcaatgtccgggcttcagcaatcataattcagagaaaatggagagctattctaccagcaaaaatagcccacgagcactttttgatgataaagagacatagggcggcatgtctaattcaagcccattatagaggctataaagggagacaggtcttcttacggcaaaaatctgccgcactgataattcagaagtatataagggccagggaagctggaaagcacgaaaggatcaaatacatcgaattcaagaagtctacagtcatcttacaagcactcgtccgcggttggctcgtgcggaagagatttctggagcagcgcgctaagatcaggttgctgcatttcacagcggcagcttattaccatctgaatgctgtgcgcatacagagggcttataaactctatctcgctgtgaaaaacgccaataaacaagttaattcagtgatttgtatccagcggtggtttcgggcacgtcttcaggaaaaacgctttattcagaagtatcattctattaaaaaaatcgagcacgaaggccaggagtgtctgagccagcgcaatcgtgcagcatcagttatacaaaaggctgtcaggcatttcctgcttcgcaagaaacaggagaagttcacctctgggatcattaagatccaggccctctggcgtggatattcatggcgtaaaaagaacgattgtaccaagattaaggccatcaggctgtcccttcaggtggtgaacagagagattcgcgaagaaaacaagttgtataagcgcacagctctggcactgcattacttgctcacatacaagcacctgagcgcgattctcgaagcgcttaaacacctggaggtcgtgacgaggcttagcccactgtgttgtgaaaacatggctcagagtggcgcaatttcaaagatctttgtcctgatccgaagctgcaacagatcaattccctgcatggaggtaataagatacgctgttcaggtactgttgaatgtttcaaaatatgagaagacaacctctgctgtctatgacgtggagaactgtattgatatactgctcgaactgctgcagatctatcgggagaagcctggcaataaagttgcagataagggagggtccatctttacaaagacttgttgcttactggcgatcttactgaaaaccacaaaccgcgcttctgatgtaagatcccggtcgaaagtcgtggaccggatttacagtctgtacaagctcacagctcataaacataaaatgaacactgaaaggatcctctataaacagaagaaaaatagttcaatttccatacccttcatccctgaaactcccgtccgcacaaggatcgtttcccggcttaagcccgactgggtgctccggcgagataatatggaggagataaccaatcctctgcaggctatacagatggtgatggacacattgggtataccctactac

SEQ ID NO: 82595 - DNA, 3429 bp, Artificial Sequence
  derived and/or modified sequence
atgtccctgcgggcatacactgctaggtgcagactgaaccgtctgagacgggctgcttgcagactgtttacatccgaaaagatggtcaaagcaatcaagaaactggagatcgagattgaggcccgacgactcatagtgcgaaaagaccggcacctatggaaagatgttggggaacgtcagaaggtcctcaactggctcttaagctataacccgctttggctcagaatcggcctggagaccacctacggcgaactgattagcctcgaggacaactccgacgttactgggctggctatgttcatcctcaatcgcttgctgtggaacccagacattgctgcagagtaccgtcaccccactgtcccacacctgtacagggatggacacgaggaagctctgagcaaatttactctcaaaaaactattactgttggtctgttttctcgattacgccaagatctcaagacttattgatcacgacccttgtctcttttgtaaagacgccgagtttaaggcctctaaggaaattcttctggccttttcccgagacttcctcagcggagagggcgacttgagccgtcatttgggattgctcggtctacccgtgaaccacgttcaaactccatttgatgagttcgactttgccgttaccaacctcgccgtggacctacaatgtggcgtccgactggtccgtaccatggagctgttgacccaaaattgggatttgtcaaagaagctgaggattcccgctatatcgcgcctgcagaagatgcacaacgtggatattgttctccaggtgctgaagtcacgcggtatcgaactcagcgatgagcatggcaataccatcctgtcaaaagacattgtcgatcgacatagggaaaagacgctacggctcctctggaagattgcatttgcctttcaagtggatatttcactgaacttagatcaactgaaagaagaaatcgcttttcttaaacataccaaatcaataaaaaaaaccatttcactcctgtcttgtcactccgatgatctgataaacaagaagaaagggaagagagactctgggagcttcgaacagtatagtgaaaatatcaagcttctcatggactgggtaaatgctgtatgcgctttctataataagaaagtggagaatttcaccgtatccttctccgatgggagggtgctatgttaccttattcaccattatcatccttgttatgtacctttcgatgcaatctgccaacgcaccacccagaccgtggaatgtacgcaaactggatcggtcgtcctgaactccagcagcgaatccgacgactcctctctggacatgagcttgaaagcgtttgatcatgaaaatacttctgagctgtataaggagctactggaaaatgaaaaaaaaaattttcatctcgtgagaagcgcagtgcgcgacttgggcggaatccccgcaatgatcaaccactcagatatgtctaacactatacctgatgagaaggttgttataacctacctgagttttctctgtgctcgcctgcttgacctgaggaaagaaattcgcgcagccagattgatccagaccacatggagaaagtacaagctgaaaactgatctaaaaaggcaccaggaaagagaaaaagctgctaggattatacagcttgccgtaattaactttctggccaagcagagactgaggaaacgtgtcaacgctgctctagtgattcagaaatactggagacgggtgctagctcagcgaaaacttctgatgttgaaaaaggagaaacttgagaaggttcagaacaaggcggctagccttattcaggcgatgtggcggaggtaccgggctaagaaatacctgtgtaaggtgaaggccgcatgcaagatccaggcttggtaccgctgctggagggctcacaaagaatacctggctatactcaaagcggtcaagattatccaaggctgcttctacacaaaactggagagaactcgcttccttaatgttagagcctctgcaatcattatccagcgcaagtggcgcgcaatactgcccgctaagatcgctcacgaacactttcttatgatcaaacgacaccgcgctgcctgcttgattcaggcccactataggggatacaaggggagacaagtctttctgcgacagaagtcggccgctcttattatccagaaatacatccgggctagagaagccggaaagcatgagagaattaaatacatcgaattcaaaaaaagcaccgtcatcctacaggccctggtcaggggttggctggtacggaagaggtttttagagcagcgggcaaaaattcgcttgctgcactttaccgcagcggcatactaccatttaaacgctgtgcgcattcagcgcgcatataagctgtaccttgcggtgaaaaacgctaacaaacaggttaacagcgtaatctgcatacagcgatggtttagggctaggttgcaggagaagaggttcatccagaagtatcacagcataaagaaaattgaacacgagggacaggaatgcctttcccaaaggaaccgcgctgcgagcgtcatccagaaagcagtcagacactttctgctgcggaagaagcaagaaaaatttacttctgggattataaagatccaggccctttggagagggtactcctggcggaaaaagaatgattgcacaaagataaaagcaatccgcctgtctctacaggtagtcaacagggagattcgcgaagagaataaactctacaagcgaacagctcttgctctccattacctgctgacctataaacatttgtccgctatcctcgaggctctgaagcatctggaagtggtcacacgacttagccctctgtgttgcgagaacatggcgcaatcaggggctatcagtaagatcttcgtcttaatccggagttgcaataggtctatcccgtgcatggaagtcattaggtacgcagtgcaagttctgctgaatgtaagcaaatacgagaaaacaaccagtgcggtctatgatgtggagaattgcattgatattctgttggagcttttacaaatttacagagaaaaacccggaaataaagtagcggacaagggaggcagcatcttcacaaaaacgtgctgcctgctggcaattctgctcaagaccaccaacagggctagtgacgtgagatcaaggagtaaagtggtggatagaatctactctctgtacaagctgacggcccacaagcataagatgaacacagagcggatcttatacaagcaaaaaaaaaactcaagtatttctataccttttatcccagagacaccggtgcggacgcgcatcgttagccggctgaaaccggactgggtgcttcgcagagacaatatggaagagataaccaaccccttacaagccatccaaatggtcatggacactctgggtatcccctactag

SEQ ID NO: 82596 - DNA, 6132 bp, Artificial Sequence
  derived and/or modified sequence
attggtggaggcggcaagtttaaacagagtcaaaacgccatacttgtttggctcctctttttaatttgcgagtttattgggcttgttttctgttttctagggagtaggttagtggaaaagaaaaagggccgaattcactcccacgacctctacagccgcccctgaggggaagcggtcagcgtaagtcccggatccccgctccggagccgcctcgtgggagcggggcaaggagatccaggaggggtctcgaatctgccatggcgaaccggcgagtggggcgaggctgctgggaagtgagcccgaccgagcggaggccgcccgcggggctgcggggccccgcggccgaggaggaggcgtcttccccgccggtcctgtctctcagccacttctgcaggtctcctttcctttgcttcggggacgttctcctgggagcctcacggacgctgtctctggccctagacaaccctaacgaggaggtggcagaagtgaagatctcccacttcccggccgcggacctgggcttcagtgtgtcgcagcgctgtttcgtgttgcagcctaaagagaaaattgttatttctgttaactggacaccactcaaagaaggccgagtaagagagattatgacatttcttgtaaatgatgttctgaaacaccaagctatattactaggaaatgcagaagagcagaaaaagaaaaagaggagtctttgggataccattaaaaagaagaaaatttcagcctctacaagtcacaacagaagggtttcaaatattcagaatgttaataaaacatttagtgtttcccaaaaagttgacagagttaggagcccactacaagcttgtgaaaacttggctatgaatgaaggcggtcccccaacagaaaacaattctttaatacttgaagaaaataaaatacccatatcacctattagccctgctttcaatgaatgccatggtgcaacttgcttgccactctctgtacgtcgatctactacctactcatctcttcatgcatcagaaaatagggaactattaaatgtacacagtgccaacgtttcaaaagtttcttttaatgagaaagctgtaactgaaacttcctttaattccgtaaatgttaatggccaaagaggagagaatagtaaacttagtcttacccccaactgttcttcaactttgaacattacacaaagccaaatacattttctaagtccagattcttttgtaaataatagtcatggagctaataatgaactagaattagtaacatgtctttcatcagatatgtttatgaaagataattcacagcctgtgcatttggaatcaacaattgcacatgaaatttatcagaaaattttaagtccagattctttcataaaagataattatggactaaatcaggatctagaatcagagtcagttaatcctattttatcccctaatcaatttttaaaagataacatggcatatatgtgtacatctcagcaaacatgtaaagtaccattatcaaatgaaaattctcaagtcccacagtctcctgaagattggagaaaaagtgaagtttcgccacgtattcctgaatgtcagggttcaaaatctcccaaagctatttttgaagaactagtagaaatgaagtcaaattactacagttttataaaacaaaataatcctaaattttctgcagttcaggatatttctagtcatagccacaataaacaacctaagagacgtccaatactttctgccactgttactaaaaggaaggccacctgtaccagagaaaaccaaactgagattaataaaccaaaagcaaaaagatgtctcaacagtgcagtgggtgaacatgaaaaagtaataaataatcaaaaggaaaaagaagattttcattcttatcttccaattatagatccaatattaagtaaatctaagagttataaaaacgaggtaacaccctcttcgacaacagcttcagttgctcggaaaagaaagagcgatggaagcatggaagatgcaaatgtgagagttgcaattacagaacatacagaagtgcgagaaatcaaaagaatccatttttctccctcagagcctaaaacatcagctgttaagaaaacaaaaaatgtgacaacacccatctcaaaacgtattagcaacagagagaaattaaacctgaagaagaaaactgatttatcaatattcagaactccaatttctaaaacaaacaaaaggacaaaacccattatcgctgtggcacagtccagtttgaccttcataaaaccattaaaaacagatattcccagacacccgatgccatttgctgcaaaaaacatgttttatgatgaacgctggaaggaaaagcaggaacagggcttcacttggtggttaaattttatattaacccctgatgacttcactgtaaaaacaaatatttctgaagtaaatgctgctactcttcttttgggaatagagaatcaacataaaataagtgttcctagagcacctacaaaagaggaaatgtctctcagagcttatactgctcggtgtaggttaaacagactacgtcgtgcagcatgccgtttgtttacttctgaaaaaatggttaaagctattaaaaagcttgaaattgaaattgaagctaggcggttaattgttcgaaaagatagacacctatggaaagatgtgggagaacgtcagaaagtcctgaattggctgttgtcctacaatcctttgtggcttcgaattggtctagagacaacttatggagaactcatatctttggaagataacagtgatgtcacagggttggctatgtttattctgaatcgcctactttggaatcctgatatagcagctgagtatagacaccccactgttcctcacctgtatagagatggtcatgaagaagctttgtccaagtttacattgaaaaagttattgttgttggtctgttttcttgattatgctaaaatttccagactcattgatcatgatccttgtctcttctgtaaagatgccgaattcaaggctagtaaagaaatccttttggctttttcacgagatttcctaagtggtgaaggtgacctttcccgtcaccttggcttattgggattacctgttaaccatgttcagacaccatttgatgaatttgattttgccgttacaaatcttgccgtagacttgcaatgtggagtgcgccttgtgcgaaccatggaacttctcacacagaactgggacctctcaaagaaactcaggattccggcaataagtcgtcttcaaaagatgcacaatgttgacattgttcttcaagttcttaaatcacgaggaattgaattaagtgatgagcatggaaatacaattctatctaaggatattgtggataggcacagagaaaaaactctcaggttgctttggaaaatagcgtttgcttttcaggtggatatttcccttaacttagatcaattaaaggaagaaattgcctttctaaaacacacaaagagtataaagaaaacaatatctctactatcatgccattctgatgatcttattaataagaaaaaaggcaaaagggatagtggttcctttgaacaatatagtgaaaacataaagttattgatggattgggtaaatgctgtttgtgccttctataataaaaaggtggagaattttacagtgtctttctcagacggccgtgtgttatgttacctgatccaccattaccatccttgctatgtgccatttgacgctatatgtcagcgtactactcaaactgtggaatgtacgcaaactggttcagtggtattaaattcatcatctgaatctgatgacagttctctggatatgtctcttaaagcatttgatcatgaaaatacttcagagctatacaaagagctcctagaaaatgaaaagaaaaattttcacttggttaggtctgcagttagagaccttggtggaatacctgctatgattaatcattcagatatgtcaaatacaattccagatgaaaaggtggttattacctatttgtcatttctttgtgcaaggcttttggatcttcgtaaagaaataagagctgctcgactcatacaaacaacatggagaaaatataaactaaaaacagatctcaaacgccatcaggagagagagaaagctgcaagaattattcaattggctgtaatcaattttctagcaaaacaaagattgagaaaaagagttaatgcagcactcgtcattcagaaatattggcgaagagtcttagcacagagaaaattattaatgttaaaaaaggaaaagctggaaaaagttcaaaataaagcagcatcacttattcaggctatgtggaggagatatagagccaagaaatatttatgtaaagtgaaagctgcctgcaagattcaagcctggtatagatgttggagagcacacaaagaatatctagctatattaaaagctgttaaaattattcaaggttgcttctataccaaactagagagaacacggtttttgaatgtgagagcatcagcaattatcattcagagaaaatggagagctatacttcctgcaaagatagctcatgaacacttcttaatgataaaaagacatcgagctgcttgtttgatccaagcacattatagaggatataaaggaaggcaggtctttcttcggcagaaatctgctgctttgatcatacaaaaatatatacgagccagggaggctggaaagcatgaaaggataaaatatattgaatttaaaaaatctacagttatcctacaagcactggtgcgtggttggctagtacgaaaaagatttttagaacagagagccaaaattcgacttcttcacttcactgcagctgcatattatcacctgaatgctgttagaattcaaagagcctataaactttacctggctgtgaagaatgctaacaagcaggttaattcagtcatctgtattcagagatggtttcgagcaagattacaagaaaagagatttattcagaaatatcatagcatcaaaaagattgagcatgaaggtcaagaatgtctgagccagcgaaatagggctgcatcagtaatacagaaagcagtgcgccattttctcctccgtaaaaagcaggaaaaattcactagtggaatcattaaaattcaggcattatggagaggctattcttggaggaagaaaaatgattgtacaaaaattaaagctatacgactaagtcttcaagttgttaatagggagattcgagaagaaaacaaactctacaaaagaactgcacttgcacttcattaccttttgacatataagcacctttctgccattcttgaggccttaaaacacctagaggtagttactagattgtctccactttgttgtgagaacatggcccagagtggagcaatttctaaaatatttgttttgatccgaagttgtaatcgcagtattccttgtatggaagtcatcagatatgctgtgcaagtcttgcttaatgtatctaagtatgagaaaactacttcagcagtttatgatgtagaaaattgtatagatatactattggagcttttgcagatataccgagaaaagcctggtaataaagttgcagacaaaggcggaagcatttttacaaaaacttgttgtttgttggctattttactgaagacaacaaatagagcctctgatgtacgaagtaggtccaaagttgttgaccgtatttacagtctctacaaacttacagctcataaacataaaatgaatactgaaagaatactttacaagcaaaagaagaattcttctataagcattccttttatcccagaaacacctgtaaggaccagaatagtttcaagacttaagccagattgggttttgagaagagataacatggaagaaatcacaaatcccctgcaagctattcaaatggtgatggatacgcttggcattccttattagtaaatgtaaacattttcagtatgtatagtgtaaagaaatattaaagccaatcatgagtacgtaaagtgatttttgctctccgtgtacaacttttaaaatctgactttgttttaaaaaaacataaactgttcattacattcttcatttttatcatttatagttttatgcatgtaataaactaatatgtcataagatg

SEQ ID NO: 82597 - DNA, 3747 bp, Artificial Sequence
  derived and/or modified sequence
tttatattaacccctgatgacttcactgtaaaaacaaatatttctgaagtaaatgctgctactcttcttttgggaatagagaatcaacataaaataagtgttcctagagcacctacaaaagaggaaatgtctctcagagcttatactgctcggtgtaggttaaacagactacgtcgtgcagcatgccgtttgtttacttctgaaaaaatggttaaagctattaaaaagcttgaaattgaaattgaagctaggcggttaattgttcgaaaagatagacacctatggaaagatgtgggagaacgtcagaaagtcctgaattggctgttgtcctacaatcctttgtggcttcgaattggtctagagacaacttatggagaactcatatctttggaagataacagtgatgtcacagggttggctatgtttattctgaatcgcctactttggaatcctgatatagcagctgagtatagacaccccactgttcctcacctgtatagagatggtcatgaagaagctttgtccaagtttacattgaaaaagttattgttgttggtctgttttcttgattatgctaaaatttccagactcattgatcatgatccttgtctcttctgtaaagatgccgaattcaaggctagtaaagaaatccttttggctttttcacgagatttcctaagtggtgaaggtgacctttcccgtcaccttggcttattgggattacctgttaaccatgttcagacaccatttgatgaatttgattttgccgttacaaatcttgccgtagacttgcaatgtggagtgcgccttgtgcgaaccatggaacttctcacacagaactgggacctctcaaagaaactcaggattccggcaataagtcgtcttcaaaagatgcacaatgttgacattgttcttcaagttcttaaatcacgaggaattgaattaagtgatgagcatggaaatacaattctatctaaggatattgtggataggcacagagaaaaaactctcaggttgctttggaaaatagcgtttgcttttcaggtggatatttcccttaacttagatcaattaaaggaagaaattgcctttctaaaacacacaaagagtataaagaaaacaatatctctactatcatgccattctgatgatcttattaataagaaaaaaggcaaaagggatagtggttcctttgaacaatatagtgaaaacataaagttattgatggattgggtaaatgctgtttgtgccttctataataaaaaggtggagaattttacagtgtctttctcagacggccgtgtgttatgttacctgatccaccattaccatccttgctatgtgccatttgacgctatatgtcagcgtactactcaaactgtggaatgtacgcaaactggttcagtggtattaaattcatcatctgaatctgatgacagttctctggatatgtctcttaaagcatttgatcatgaaaatacttcagagctatacaaagagctcctagaaaatgaaaagaaaaattttcacttggttaggtctgcagttagagaccttggtggaatacctgctatgattaatcattcagatatgtcaaatacaattccagatgaaaaggtggttattacctatttgtcatttctttgtgcaaggcttttggatcttcgtaaagaaataagagctgctcgactcatacaaacaacatggagaaaatataaactaaaaacagatctcaaacgccatcaggagagagagaaagctgcaagaattattcaattggctgtaatcaattttctagcaaaacaaagattgagaaaaagagttaatgcagcactcgtcattcagaaatattggcgaagagtcttagcacagagaaaattattaatgttaaaaaaggaaaagctggaaaaagttcaaaataaagcagcatcacttattcaggctatgtggaggagatatagagccaagaaatatttatgtaaagtgaaagctgcctgcaagattcaagcctggtatagatgttggagagcacacaaagaatatctagctatattaaaagctgttaaaattattcaaggttgcttctataccaaactagagagaacacggtttttgaatgtgagagcatcagcaattatcattcagagaaaatggagagctatacttcctgcaaagatagctcatgaacacttcttaatgataaaaagacatcgagctgcttgtttgatccaagcacattatagaggatataaaggaaggcaggtctttcttcggcagaaatctgctgctttgatcatacaaaaatatatacgagccagggaggctggaaagcatgaaaggataaaatatattgaatttaaaaaatctacagttatcctacaagcactggtgcgtggttggctagtacgaaaaagatttttagaacagagagccaaaattcgacttcttcacttcactgcagctgcatattatcacctgaatgctgttagaattcaaagagcctataaactttacctggctgtgaagaatgctaacaagcaggttaattcagtcatctgtattcagagatggtttcgagcaagattacaagaaaagagatttattcagaaatatcatagcatcaaaaagattgagcatgaaggtcaagaatgtctgagccagcgaaatagggctgcatcagtaatacagaaagcagtgcgccattttctcctccgtaaaaagcaggaaaaattcactagtggaatcattaaaattcaggcattatggagaggctattcttggaggaagaaaaatgattgtacaaaaattaaagctatacgactaagtcttcaagttgttaatagggagattcgagaagaaaacaaactctacaaaagaactgcacttgcacttcattaccttttgacatataagcacctttctgccattcttgaggccttaaaacacctagaggtagttactagattgtctccactttgttgtgagaacatggcccagagtggagcaatttctaaaatatttgttttgatccgaagttgtaatcgcagtattccttgtatggaagtcatcagatatgctgtgcaagtcttgcttaatgtatctaagtatgagaaaactacttcagcagtttatgatgtagaaaattgtatagatatactattggagcttttgcagatataccgagaaaagcctggtaataaagttgcagacaaaggcggaagcatttttacaaaaacttgttgtttgttggctattttactgaagacaacaaatagagcctctgatgtacgaagtaggtccaaagttgttgaccgtatttacagtctctacaaacttacagctcataaacataaaatgaatactgaaagaatactttacaagcaaaagaagaattcttctataagcattccttttatcccagaaacacctgtaaggaccagaatagtttcaagacttaagccagattgggttttgagaagagataacatggaagaaatcacaaatcccctgcaagctattcaaatggtgatggatacgcttggcattccttattagtaaatgtaaacattttcagtatgtatagtgtaaagaaatattaaagccaatcatgagtacgtaaagtgatttttgctctccgtgtacaacttttaaaatctgactttgttttaaaaaaacataaactgttcattacattcttcatttttatcatttatagttttatgcatgtaataaactaatatgtcataa

SEQ ID NO: 82598 - DNA, 5679 bp, Artificial Sequence
  derived and/or modified sequence
atggccaacagaagagtgggcagaggctgctgggaggtgagccccaccgagagaagaccccccgccggcctgagaggccccgccgccgaggaggaggccagcagcccccccgtgctgagcctgagccacttctgcagaagccccttcctgtgcttcggcgacgtgctgctgggcgccagcagaaccctgagcctggccctggacaaccccaacgaggaggtggccgaggtgaagatcagccacttccccgccgccgacctgggcttcagcgtgagccagagatgcttcgtgctgcagcccaaggagaagatcgtgatcagcgtgaactggacccccctgaaggagggcagagtgagagagatcatgaccttcctggtgaacgacgtgctgaagcaccaggccatcctgctgggcaacgccgaggagcagaagaagaagaagagaagcctgtgggacaccatcaagaagaagaagatcagcgccagcaccagccacaacagaagagtgagcaacatccagaacgtgaacaagaccttcagcgtgagccagaaggtggacagagtgagaagccccctgcaggcctgcgagaacctggccatgaacgagggcggcccccccaccgagaacaacagcctgatcctggaggagaacaagatccccatcagccccatcagccccgccttcaacgagtgccacggcgccacctgcctgcccctgagcgtgagaagaagcaccacctacagcagcctgcacgccagcgagaacagagagctgctgaacgtgcacagcgccaacgtgagcaaggtgagcttcaacgagaaggccgtgaccgagaccagcttcaacagcgtgaacgtgaacggccagagaggcgagaacagcaagctgagcctgacccccaactgcagcagcaccctgaacatcacccagagccagatccacttcctgagccccgacagcttcgtgaacaacagccacggcgccaacaacgagctggagctggtgacctgcctgagcagcgacatgttcatgaaggacaacagccagcccgtgcacctggagagcaccatcgcccacgagatctaccagaagatcctgagccccgacagcttcatcaaggacaactacggcctgaaccaggacctggagagcgagagcgtgaaccccatcctgagccccaaccagttcctgaaggacaacatggcctacatgtgcaccagccagcagacctgcaaggtgcccctgagcaacgagaacagccaggtgccccagagccccgaggactggagaaagagcgaggtgagccccagaatccccgagtgccagggcagcaagagccccaaggccatcttcgaggagctggtggagatgaagagcaactactacagcttcatcaagcagaacaaccccaagttcagcgccgtgcaggacatcagcagccacagccacaacaagcagcccaagagaagacccatcctgagcgccaccgtgaccaagagaaaggccacctgcaccagagagaaccagaccgagatcaacaagcccaaggccaagagatgcctgaacagcgccgtgggcgagcacgagaaggtgatcaacaaccagaaggagaaggaggacttccacagctacctgcccatcatcgaccccatcctgagcaagagcaagagctacaagaacgaggtgacccccagcagcaccaccgccagcgtggccagaaagagaaagagcgacggcagcatggaggacgccaacgtgagagtggccatcaccgagcacaccgaggtgagagagatcaagagaatccacttcagccccagcgagcccaagaccagcgccgtgaagaagaccaagaacgtgaccacccccatcagcaagagaatcagcaacagagagaagctgaacctgaagaagaagaccgacctgagcatcttcagaacccccatcagcaagaccaacaagagaaccaagcccatcatcgccgtggcccagagcagcctgaccttcatcaagcccctgaagaccgacatccccagacaccccatgcccttcgccgccaagaacatgttctacgacgagagatggaaggagaagcaggagcagggcttcacctggtggctgaacttcatcctgacccccgacgacttcaccgtgaagaccaacatcagcgaggtgaacgccgccaccctgctgctgggcatcgagaaccagcacaagatcagcgtgcccagagcccccaccaaggaggagatgagcctgagagcctacaccgccagatgcagactgaacagactgagaagagccgcctgcagactgttcaccagcgagaagatggtgaaggccatcaagaagctggagatcgagatcgaggccagaagactgatcgtgagaaaggacagacacctgtggaaggacgtgggcgagagacagaaggtgctgaactggctgctgagctacaaccccctgtggctgagaatcggcctggagaccacctacggcgagctgatcagcctggaggacaacagcgacgtgaccggcctggccatgttcatcctgaacagactgctgtggaaccccgacatcgccgccgagtacagacaccccaccgtgccccacctgtacagagacggccacgaggaggccctgagcaagttcaccctgaagaagctgctgctgctggtgtgcttcctggactacgccaagatcagcagactgatcgaccacgacccctgcctgttctgcaaggacgccgagttcaaggccagcaaggagatcctgctggccttcagcagagacttcctgagcggcgagggcgacctgagcagacacctgggcctgctgggcctgcccgtgaaccacgtgcagacccccttcgacgagttcgacttcgccgtgaccaacctggccgtggacctgcagtgcggcgtgagactggtgagaaccatggagctgctgacccagaactgggacctgagcaagaagctgagaatccccgccatcagcagactgcagaagatgcacaacgtggacatcgtgctgcaggtgctgaagagcagaggcatcgagctgagcgacgagcacggcaacaccatcctgagcaaggacatcgtggacagacacagagagaagaccctgagactgctgtggaagatcgccttcgccttccaggtggacatcagcctgaacctggaccagctgaaggaggagatcgccttcctgaagcacaccaagagcatcaagaagaccatcagcctgctgagctgccacagcgacgacctgatcaacaagaagaagggcaagagagacagcggcagcttcgagcagtacagcgagaacatcaagctgctgatggactgggtgaacgccgtgtgcgccttctacaacaagaaggtggagaacttcaccgtgagcttcagcgacggcagagtgctgtgctacctgatccaccactaccacccctgctacgtgcccttcgacgccatctgccagagaaccacccagaccgtggagtgcacccagaccggcagcgtggtgctgaacagcagcagcgagagcgacgacagcagcctggacatgagcctgaaggccttcgaccacgagaacaccagcgagctgtacaaggagctgctggagaacgagaagaagaacttccacctggtgagaagcgccgtgagagacctgggcggcatccccgccatgatcaaccacagcgacatgagcaacaccatccccgacgagaaggtggtgatcacctacctgagcttcctgtgcgccagactgctggacctgagaaaggagatcagagccgccagactgatccagaccacctggagaaagtacaagctgaagaccgacctgaagagacaccaggagagagagaaggccgccagaatcatccagctggccgtgatcaacttcctggccaagcagagactgagaaagagagtgaacgccgccctggtgatccagaagtactggagaagagtgctggcccagagaaagctgctgatgctgaagaaggagaagctggagaaggtgcagaacaaggccgccagcctgatccaggccatgtggagaagatacagagccaagaagtacctgtgcaaggtgaaggccgcctgcaagatccaggcctggtacagatgctggagagcccacaaggagtacctggccatcctgaaggccgtgaagatcatccagggctgcttctacaccaagctggagagaaccagattcctgaacgtgagagccagcgccatcatcatccagagaaagtggagagccatcctgcccgccaagatcgcccacgagcacttcctgatgatcaagagacacagagccgcctgcctgatccaggcccactacagaggctacaagggcagacaggtgttcctgagacagaagagcgccgccctgatcatccagaagtacatcagagccagagaggccggcaagcacgagagaatcaagtacatcgagttcaagaagagcaccgtgatcctgcaggccctggtgagaggctggctggtgagaaagagattcctggagcagagagccaagatcagactgctgcacttcaccgccgccgcctactaccacctgaacgccgtgagaatccagagagcctacaagctgtacctggccgtgaagaacgccaacaagcaggtgaacagcgtgatctgcatccagagatggttcagagccagactgcaggagaagagattcatccagaagtaccacagcatcaagaagatcgagcacgagggccaggagtgcctgagccagagaaacagagccgccagcgtgatccagaaggccgtgagacacttcctgctgagaaagaagcaggagaagttcaccagcggcatcatcaagatccaggccctgtggagaggctacagctggagaaagaagaacgactgcaccaagatcaaggccatcagactgagcctgcaggtggtgaacagagagatcagagaggagaacaagctgtacaagagaaccgccctggccctgcactacctgctgacctacaagcacctgagcgccatcctggaggccctgaagcacctggaggtggtgaccagactgagccccctgtgctgcgagaacatggcccagagcggcgccatcagcaagatcttcgtgctgatcagaagctgcaacagaagcatcccctgcatggaggtgatcagatacgccgtgcaggtgctgctgaacgtgagcaagtacgagaagaccaccagcgccgtgtacgacgtggagaactgcatcgacatcctgctggagctgctgcagatctacagagagaagcccggcaacaaggtggccgacaagggcggcagcatcttcaccaagacctgctgcctgctggccatcctgctgaagaccaccaacagagccagcgacgtgagaagcagaagcaaggtggtggacagaatctacagcctgtacaagctgaccgcccacaagcacaagatgaacaccgagagaatcctgtacaagcagaagaagaacagcagcatcagcatccccttcatccccgagacccccgtgagaaccagaatcgtgagcagactgaagcccgactgggtgctgagaagagacaacatggaggagatcaccaaccccctgcaggccatccagatggtgatggacaccctgggcatcccctactag

SEQ ID NO: 82599 - DNA, 3429 bp, Artificial Sequence
  derived and/or modified sequence
atgagcctgagagcctacaccgccagatgcagactgaacagactgagaagagccgcctgcagactgttcaccagcgagaagatggtgaaggccatcaagaagctggagatcgagatcgaggccagaagactgatcgtgagaaaggacagacacctgtggaaggacgtgggcgagagacagaaggtgctgaactggctgctgagctacaaccccctgtggctgagaatcggcctggagaccacctacggcgagctgatcagcctggaggacaacagcgacgtgaccggcctggccatgttcatcctgaacagactgctgtggaaccccgacatcgccgccgagtacagacaccccaccgtgccccacctgtacagagacggccacgaggaggccctgagcaagttcaccctgaagaagctgctgctgctggtgtgcttcctggactacgccaagatcagcagactgatcgaccacgacccctgcctgttctgcaaggacgccgagttcaaggccagcaaggagatcctgctggccttcagcagagacttcctgagcggcgagggcgacctgagcagacacctgggcctgctgggcctgcccgtgaaccacgtgcagacccccttcgacgagttcgacttcgccgtgaccaacctggccgtggacctgcagtgcggcgtgagactggtgagaaccatggagctgctgacccagaactgggacctgagcaagaagctgagaatccccgccatcagcagactgcagaagatgcacaacgtggacatcgtgctgcaggtgctgaagagcagaggcatcgagctgagcgacgagcacggcaacaccatcctgagcaaggacatcgtggacagacacagagagaagaccctgagactgctgtggaagatcgccttcgccttccaggtggacatcagcctgaacctggaccagctgaaggaggagatcgccttcctgaagcacaccaagagcatcaagaagaccatcagcctgctgagctgccacagcgacgacctgatcaacaagaagaagggcaagagagacagcggcagcttcgagcagtacagcgagaacatcaagctgctgatggactgggtgaacgccgtgtgcgccttctacaacaagaaggtggagaacttcaccgtgagcttcagcgacggcagagtgctgtgctacctgatccaccactaccacccctgctacgtgcccttcgacgccatctgccagagaaccacccagaccgtggagtgcacccagaccggcagcgtggtgctgaacagcagcagcgagagcgacgacagcagcctggacatgagcctgaaggccttcgaccacgagaacaccagcgagctgtacaaggagctgctggagaacgagaagaagaacttccacctggtgagaagcgccgtgagagacctgggcggcatccccgccatgatcaaccacagcgacatgagcaacaccatccccgacgagaaggtggtgatcacctacctgagcttcctgtgcgccagactgctggacctgagaaaggagatcagagccgccagactgatccagaccacctggagaaagtacaagctgaagaccgacctgaagagacaccaggagagagagaaggccgccagaatcatccagctggccgtgatcaacttcctggccaagcagagactgagaaagagagtgaacgccgccctggtgatccagaagtactggagaagagtgctggcccagagaaagctgctgatgctgaagaaggagaagctggagaaggtgcagaacaaggccgccagcctgatccaggccatgtggagaagatacagagccaagaagtacctgtgcaaggtgaaggccgcctgcaagatccaggcctggtacagatgctggagagcccacaaggagtacctggccatcctgaaggccgtgaagatcatccagggctgcttctacaccaagctggagagaaccagattcctgaacgtgagagccagcgccatcatcatccagagaaagtggagagccatcctgcccgccaagatcgcccacgagcacttcctgatgatcaagagacacagagccgcctgcctgatccaggcccactacagaggctacaagggcagacaggtgttcctgagacagaagagcgccgccctgatcatccagaagtacatcagagccagagaggccggcaagcacgagagaatcaagtacatcgagttcaagaagagcaccgtgatcctgcaggccctggtgagaggctggctggtgagaaagagattcctggagcagagagccaagatcagactgctgcacttcaccgccgccgcctactaccacctgaacgccgtgagaatccagagagcctacaagctgtacctggccgtgaagaacgccaacaagcaggtgaacagcgtgatctgcatccagagatggttcagagccagactgcaggagaagagattcatccagaagtaccacagcatcaagaagatcgagcacgagggccaggagtgcctgagccagagaaacagagccgccagcgtgatccagaaggccgtgagacacttcctgctgagaaagaagcaggagaagttcaccagcggcatcatcaagatccaggccctgtggagaggctacagctggagaaagaagaacgactgcaccaagatcaaggccatcagactgagcctgcaggtggtgaacagagagatcagagaggagaacaagctgtacaagagaaccgccctggccctgcactacctgctgacctacaagcacctgagcgccatcctggaggccctgaagcacctggaggtggtgaccagactgagccccctgtgctgcgagaacatggcccagagcggcgccatcagcaagatcttcgtgctgatcagaagctgcaacagaagcatcccctgcatggaggtgatcagatacgccgtgcaggtgctgctgaacgtgagcaagtacgagaagaccaccagcgccgtgtacgacgtggagaactgcatcgacatcctgctggagctgctgcagatctacagagagaagcccggcaacaaggtggccgacaagggcggcagcatcttcaccaagacctgctgcctgctggccatcctgctgaagaccaccaacagagccagcgacgtgagaagcagaagcaaggtggtggacagaatctacagcctgtacaagctgaccgcccacaagcacaagatgaacaccgagagaatcctgtacaagcagaagaagaacagcagcatcagcatccccttcatccccgagacccccgtgagaaccagaatcgtgagcagactgaagcccgactgggtgctgagaagagacaacatggaggagatcaccaaccccctgcaggccatccagatggtgatggacaccctgggcatcccctactag

SEQ ID NO: 82600 - protein, 648 aa, Artificial Sequence
  derived and/or modified sequence
MVYIHGGSYMEGTGNMIDGSILASYGNVIVITINYRLGILGFLSTGDQAAKGNYGLLDQIQALRWIEENVGAFGGDPKRVTIFGSGAGASCVSLLTLSHYSEGLFQKAIIQSGTALSSWAVNYQPAKYTRILADKVGCNMLDTTDMVECLKNKNYKELIQQTITPATYHIAFGPVIDGDVIPDDPQILMEQGEFLNYDIMLGVNQGEGLKFVDGIVDNEDGVTPNDFDFSVSNFVDNLYGYPEGKDTLRETIKFMYTDWADKENPETRRKTLVALFTDHQWVAPAVATADLHAQYGSPTYFYAFYHHCQSEMKPSWADSAHGDEVPYVFGIPMIGPTELFSCNFSKNDVMLSAVVMTYWTNFAKTGDPNQPVPQDTKFIHTKPNRFEEVAWSKYNPKDQLYLHIGLKPRVRDHYRATKVAFWLELVPHLHNLNEIFQYVSTTTKVPPPDMTSFPYGTRRSPAKIWPTTKRPAITPANNPKHSKDPHKTGPEDTTVLIETKRDYSTELSVTIAVGASLLFLNILAFAALYYKKDKRRHETHRHPSPQRNTTNDITHIQNEEIMSLQMKQLEHDHECESLQAHDTLRLTCPPDYTLTLRRSPDDIPFMTPNTITMIPNTLMGMQPLHTFKTFSGGQNSTNLPHGHSTTRV

SEQ ID NO: 82601 - DNA, 1947 bp, Artificial Sequence
  derived and/or modified sequence
atggtgtacattcacggtggttcatatatggagggaaccgggaacatgattgatgggagtatccttgccagctatggtaatgtgatcgtgatcacgatcaactatcgacttggcattttgggtttcttgtccaccggcgaccaggcagctaagggaaactacggcctcttagatcagatacaggccctgagatggatagaggaaaacgtcggagcctttgggggagacccaaaacgcgtaacaatctttggtagtggagccggcgcaagctgtgtcagcctgctgacactcagccactattccgaaggactgttccagaaagcaattatccagagcggcacggcactatcttcatgggctgtgaactaccagcccgcaaagtatacacggatcctggccgataaggtaggttgcaatatgttggacaccactgatatggtggagtgtctgaagaacaaaaactacaaagaactcattcagcagactattaccccagctacgtaccatatagcttttggccccgtaatcgacggcgatgtgattcccgatgacccgcagatcctgatggaacagggcgaattcttgaattatgatataatgctaggtgtaaaccagggagaaggcctaaaattcgtagatggaatagtggataacgaagacggagtcacaccaaatgacttcgactttagcgtcagcaacttcgtcgataacctttatgggtatcccgaagggaaagatactctgagggaaacaattaaattcatgtacaccgactgggctgacaaagagaatcctgagacgagacgtaagaccctcgtggccctgttcacagaccaccaatgggttgcacccgcagtggctacggccgacctgcacgctcagtatgggtccccaacctacttttacgccttctaccatcattgtcagtctgagatgaagccaagttgggccgattctgctcacggagacgaggtaccgtacgttttcggtatacccatgatcggacctacagagctcttcagctgtaactttagtaagaacgatgttatgttgagtgccgtggttatgacatactggaccaatttcgccaagaccggagaccctaatcaacccgtgccccaggacactaaattcattcacaccaagcccaatcggttcgaggaggtggcctggagcaagtataacccaaaggatcagctctatctgcatatcggcctgaagccccgtgttagggatcattatcgtgccacgaaggtggccttttggctggagctggtgccgcaccttcataacctcaacgaaatctttcagtatgtaagtaccacaacaaaggtgcctcctcccgatatgaccagtttcccatatgggacacgacgatcgcccgctaagatttggcctacgacgaagaggcccgctatcacaccggccaataaccccaagcacagtaaagatccccataagacaggtcccgaagacactacagttttgattgaaactaaacgagactactccacggagttgtcagtgactattgctgttggcgccagcctattgttccttaacatcctggcctttgctgctctgtattataaaaaggacaagcggcggcatgagactcatagacatccctctccacagaggaatacgaccaatgatattacgcatatacagaacgaagaaatcatgagcctgcagatgaagcagctggaacacgatcacgagtgcgagtcattgcaagcgcacgacaccctccgtctgacatgtccaccggactacacgctgactctcagaagatcacccgatgacatcccttttatgactccaaacaccatcaccatgatccccaacacactcatgggcatgcagccgctccacaccttcaaaaccttttcaggtggacagaacagtacaaatctcccccacggtcactccaccaccagggtgtag

SEQ ID NO: 82602 - DNA, 1947 bp, Artificial Sequence
  derived and/or modified sequence
atggtgtacatccatggaggcagctacatggagggcactggaaacatgattgatggcagcatcctggccagctatggaaatgtgattgtcatcaccatcaactaccgcctgggcatcctgggcttcctgagcactggagaccaggccgccaagggcaactacggcctgctggaccagatccaggccctgcgctggattgaggagaatgtgggcgcctttggaggagaccccaagagggtgaccatctttggaagtggagctggggccagctgtgtgtccctgctgaccctgagccactacagcgagggcctcttccagaaggccatcatccagagcggcacagccctgagctcctgggccgtgaactaccagcctgccaagtacacccgcatcctggccgacaaggtgggctgcaacatgctggacaccacagacatggtggagtgcctgaagaacaagaactacaaggagctgatccagcagaccatcaccccagccacctaccacatcgccttcggccctgtgattgatggagatgtgatcccagatgacccccagatcctgatggagcagggcgagttcctgaactatgacatcatgctgggcgtgaaccagggcgagggcctgaagtttgtggatggcatcgtggacaatgaagatggagtgaccccaaatgactttgacttctctgtgagcaactttgtggacaacctgtatggctacccagagggcaaggacaccctgcgggagaccatcaagttcatgtacacagactgggccgacaaggaaaatcctgagaccaggaggaagaccctggtggccctcttcacagaccaccagtgggtggccccagctgtggccacagctgacctgcacgcccagtatggcagccccacctacttctacgccttctaccaccactgccagagcgagatgaagcccagctgggccgacagcgcccatggagatgaggtgccctacgtgtttggcatccccatgattggccccacagagctgttcagctgcaacttcagcaagaatgatgtgatgctgtctgctgtggtgatgacctactggaccaactttgccaagacaggagaccccaaccagcctgtgccccaggacaccaagttcatccacaccaagcccaacagatttgaggaggtggcctggagcaagtacaaccccaaggaccagctgtacctgcacatcggcctgaagccccgggtgcgggaccactaccgggccaccaaggtggccttctggctggagctggtgccccacctgcacaacctgaatgagatcttccagtatgtgtccaccaccaccaaggtgcccccaccagacatgaccagcttcccctacggcacccggcgcagccctgccaagatctggcccaccaccaagaggcctgccatcaccccagccaacaaccccaagcacagcaaggacccccacaagacaggccctgaggacaccaccgtgctgattgagaccaagagggactacagcacagagctgtctgtgaccatcgctgtgggcgccagcctgctcttcctgaacatcctggcctttgctgccctgtactacaagaaggacaagagaagacatgagacccaccgccaccccagcccccagaggaacaccaccaatgacatcacccacatccagaatgaggagatcatgagcctgcagatgaagcagctggagcatgaccatgaatgtgagagcctgcaggcccatgacaccctgcggctgacctgccccccagactacaccctgaccctgcggcgcagcccagatgacatccccttcatgacccccaacaccatcaccatgatccccaacaccctgatgggcatgcagcccctgcacaccttcaagaccttcagcggcggccagaacagcaccaacctgccccacggccacagcaccaccagggtgtag

SEQ ID NO: 82603 - DNA, 1947 bp, Artificial Sequence
  derived and/or modified sequence
atggtgtacatccacggcggcagctacatggagggcaccggcaacatgatcgatggctcaattctcgcctcttacggcaacgtgatcgtaataacgattaactacaggctgggaattctggggttcttaagcaccggtgatcaggctgccaaaggaaattatgggcttttggaccagattcaggcgctccggtggattgaggaaaacgtgggcgccttcgggggcgatcccaaacgtgtaactatattcgggtcgggggccggtgctagctgtgtgtcactgttgactctgagtcactacagcgagggtttgtttcagaaggctataattcagtctggaacagcactcagtagctgggctgtcaattaccagcccgcaaaatacacccgcatcctcgctgacaaggtggggtgtaatatgctcgacacgactgacatggtggagtgcctgaaaaacaaaaattacaaagagcttatccagcaaactattactcctgccacgtaccatatcgcttttggcccagtgattgatggagacgtaatcccggatgacccacagatcttgatggagcagggcgaattcctgaactatgacattatgttaggtgtgaatcaaggtgaaggactcaaatttgttgacggaatcgtcgacaacgaggacggcgtcacgccgaatgatttcgacttcagcgtgtcaaacttcgtcgataatctgtacggctacccagagggaaaagacacactccgcgagaccatcaagttcatgtatacagactgggccgataaggagaatcctgagacgagaagaaaaaccctggttgcgctgtttaccgaccatcagtgggtggcacccgctgttgccaccgctgacctgcacgctcagtacggatctcccacctatttttatgcgttctatcaccactgtcaatcggagatgaagccttcctgggccgactcagcccacggggacgaggttccttacgtcttcggcatcccaatgataggcccgacagaactgttctcatgcaacttctccaagaacgacgtaatgctgtcagccgttgtaatgacatattggacaaatttcgctaagacaggggatcctaaccagccagtaccccaggacacgaaattcatccataccaaaccgaacagattcgaagaagttgcttggagcaagtataatccaaaggatcagctttacttgcacattgggctgaagcctagggtccgcgatcattacagggccactaaagtggctttttggttggaactggtgccccaccttcacaatctgaacgaaatcttccagtacgtgagcaccacgaccaaggtgcccccccctgacatgacaagctttccgtatggaacccgcaggagccccgctaagatctggccgactacaaagcgcccagcgatcaccccagctaacaacccgaaacacagcaaggatccacataagactggtccagaggacactacggttctcattgaaacaaagagggactacagcacagaactatccgtgacgatagcagtgggagcctctctgttatttctgaatatcctcgcgtttgctgctctgtattataagaaagacaagcggcgtcacgagacccaccgccaccctagtccccagagaaataccacaaatgacataactcatatccagaacgaggagattatgtctctccaaatgaagcagctggaacacgatcatgaatgtgagagtctacaagcacacgacacactccgactgacctgcccccccgactacacactcactctgcggcggagcccggacgatatcccctttatgacaccaaatactatcactatgatccccaacacgctgatgggaatgcagccactgcacacttttaagaccttctcaggtggtcagaatagcaccaatctgcctcatgggcatagtactaccagggtctag

SEQ ID NO: 82604 - DNA, 1947 bp, Artificial Sequence
  derived and/or modified sequence
atggtttatatccacggaggctcttacatggagggcacgggcaatatgatcgacgggagtattcttgcatcatacggaaacgttattgttattaccatcaattaccgattaggcattttaggattcctttctaccggcgatcaagcagccaagggcaactacggccttttggaccagatacaggcccttaggtggatcgaagagaatgtcggggcatttggaggggaccccaagagggtaactatctttggatctggtgccggtgcctcgtgcgtgagcctcctgacattgtctcattactcagagggtctgtttcagaaagcgattatacagagtggcacggccctgtcttcctgggcagtaaattaccagcctgccaaatatactaggatcttagcggacaaagtcggatgcaatatgctcgacacaactgacatggtggaatgtctgaagaacaagaactacaaggagctgattcaacaaaccatcacccccgctacgtatcacattgcctttggacctgtgatcgacggggacgtaatccccgacgatccccaaattctcatggagcaaggtgagttcctcaattatgatatcatgctgggggtgaatcagggagagggtctgaagttcgtggacggtatagtggataacgaggacggggttactcccaacgattttgacttctctgtgtctaattttgtggataacctctacgggtaccctgagggtaaagacacacttcgggagaccataaagttcatgtatactgattgggccgacaaagagaaccctgagacccgcagaaagactctcgtggcactttttactgatcaccaatgggtcgctccggctgtcgccacggctgatctgcacgcccagtacgggtcccccacatatttctacgcattttaccaccactgtcagtctgagatgaagccttcctgggctgactcagcccatggcgacgaggtgccatatgttttcggaattcctatgatcggtccaaccgagctgtttagttgcaatttcagtaaaaacgacgtgatgctgtcagctgtggtgatgacttactggactaacttcgcgaagacaggcgacccaaaccagcctgtacctcaagataccaagttcattcataccaaacccaacagattcgaagaggttgcctggagtaagtataaccccaaggatcagctgtacttacacattggcttaaagccgagggtaagagaccattatcgagccacgaaagtcgccttctggctagaacttgtgcctcatcttcacaatctgaacgaaatcttccagtatgtcagcacaacaactaaggtgccacccccagacatgaccagcttcccctacggcacacgtcgctcgccagctaagatctggccaacaactaaacgtcctgcgattaccccagccaacaaccccaagcattctaaagatccccataagacgggacccgaggacacaacagtgttgatcgaaacaaagcgggactattctacagaattatctgtaacaatagccgtcggggctagcctgttgtttcttaatattttggctttcgcagccctatattataagaaggataaacggcgtcacgagacccacagacacccaagcccccagcgaaatacaacgaacgacatcacacatatacagaatgaggagattatgtccctgcagatgaaacagcttgagcatgatcacgagtgcgagagtttgcaggcacacgatacactgagattgacctgtccgcctgactacactctgacgctgcggcgaagcccagatgatattccgtttatgacccctaatacaattactatgatccccaacacattaatgggaatgcagcccctgcacacattcaagactttcagcggcggacagaactctactaacctgccacatggccattctaccacgagagtgtag

SEQ ID NO: 82605 - DNA, 1947 bp, Artificial Sequence
  derived and/or modified sequence
atggtgtacatccacggcggcagctacatggagggcaccggcaacatgatcgacggcagcatcctggccagctacggcaacgtgatcgtgatcaccatcaactacagactgggcatcctgggcttcctgagcaccggcgaccaggccgccaagggcaactacggcctgctggaccagatccaggccctgagatggatcgaggagaacgtgggcgccttcggcggcgaccccaagagagtgaccatcttcggcagcggcgccggcgccagctgcgtgagcctgctgaccctgagccactacagcgagggcctgttccagaaggccatcatccagagcggcaccgccctgagcagctgggccgtgaactaccagcccgccaagtacaccagaatcctggccgacaaggtgggctgcaacatgctggacaccaccgacatggtggagtgcctgaagaacaagaactacaaggagctgatccagcagaccatcacccccgccacctaccacatcgccttcggccccgtgatcgacggcgacgtgatccccgacgacccccagatcctgatggagcagggcgagttcctgaactacgacatcatgctgggcgtgaaccagggcgagggcctgaagttcgtggacggcatcgtggacaacgaggacggcgtgacccccaacgacttcgacttcagcgtgagcaacttcgtggacaacctgtacggctaccccgagggcaaggacaccctgagagagaccatcaagttcatgtacaccgactgggccgacaaggagaaccccgagaccagaagaaagaccctggtggccctgttcaccgaccaccagtgggtggcccccgccgtggccaccgccgacctgcacgcccagtacggcagccccacctacttctacgccttctaccaccactgccagagcgagatgaagcccagctgggccgacagcgcccacggcgacgaggtgccctacgtgttcggcatccccatgatcggccccaccgagctgttcagctgcaacttcagcaagaacgacgtgatgctgagcgccgtggtgatgacctactggaccaacttcgccaagaccggcgaccccaaccagcccgtgccccaggacaccaagttcatccacaccaagcccaacagattcgaggaggtggcctggagcaagtacaaccccaaggaccagctgtacctgcacatcggcctgaagcccagagtgagagaccactacagagccaccaaggtggccttctggctggagctggtgccccacctgcacaacctgaacgagatcttccagtacgtgagcaccaccaccaaggtgcccccccccgacatgaccagcttcccctacggcaccagaagaagccccgccaagatctggcccaccaccaagagacccgccatcacccccgccaacaaccccaagcacagcaaggacccccacaagaccggccccgaggacaccaccgtgctgatcgagaccaagagagactacagcaccgagctgagcgtgaccatcgccgtgggcgccagcctgctgttcctgaacatcctggccttcgccgccctgtactacaagaaggacaagagaagacacgagacccacagacaccccagcccccagagaaacaccaccaacgacatcacccacatccagaacgaggagatcatgagcctgcagatgaagcagctggagcacgaccacgagtgcgagagcctgcaggcccacgacaccctgagactgacctgcccccccgactacaccctgaccctgagaagaagccccgacgacatccccttcatgacccccaacaccatcaccatgatccccaacaccctgatgggcatgcagcccctgcacaccttcaagaccttcagcggcggccagaacagcaccaacctgccccacggccacagcaccaccagagtgtag

SEQ ID NO: 82606 - protein, 342 aa, Artificial Sequence
  derived and/or modified sequence
MVSNGFRPRRSLLFISWDGGDFGSVGSTEWLEGYLSVLHLKAVVYVSLDNAVLGDDKFHAKTSPLLTSLIESVLKQVDSPNHSGQTLYEQVVFTNPSWDAEVIRPLPMDSSAYSFTAFVGVPAVEFSFMEDDQAYPFLHTKEDTYENLHKVLQGRLPAVAQAVAQLAGQLLIRLSHDRLLPLDFGRYGDVVLRHIGNLNEFSGDLKARGLTLQWVYSARGDYIRAAEKLRQEIYSSEERDERLTRMYNVRIMRVEFYFLSQYVSPADSPFRHIFMGRGDHTLGALLDHLRLLRSNSSGTPGATSSTGFQESRFRRQLALLTWTLQGAANALSGDVWNIDNNF

SEQ ID NO: 82607 - DNA, 1029 bp, Artificial Sequence
  derived and/or modified sequence
atggtgagcaacggcttcagacccagaagaagcctgctgttcatcagctgggacggcggcgacttcggcagcgtgggcagcaccgagtggctggagggctacctgagcgtgctgcacctgaaggccgtggtgtacgtgagcctggacaacgccgtgctgggcgacgacaagttccacgccaagaccagccccctgctgaccagcctgatcgagagcgtgctgaagcaggtggacagccccaaccacagcggccagaccctgtacgagcaggtggtgttcaccaaccccagctgggacgccgaggtgatcagacccctgcccatggacagcagcgcctacagcttcaccgccttcgtgggcgtgcccgccgtggagttcagcttcatggaggacgaccaggcctaccccttcctgcacaccaaggaggacacctacgagaacctgcacaaggtgctgcagggcagactgcccgccgtggcccaggccgtggcccagctggccggccagctgctgatcagactgagccacgacagactgctgcccctggacttcggcagatacggcgacgtggtgctgagacacatcggcaacctgaacgagttcagcggcgacctgaaggccagaggcctgaccctgcagtgggtgtacagcgccagaggcgactacatcagagccgccgagaagctgagacaggagatctacagcagcgaggagagagacgagagactgaccagaatgtacaacgtgagaatcatgagagtggagttctacttcctgagccagtacgtgagccccgccgacagccccttcagacacatcttcatgggcagaggcgaccacaccctgggcgccctgctggaccacctgagactgctgagaagcaacagcagcggcacccccggcgccaccagcagcaccggcttccaggagagcagattcagaagacagctggccctgctgacctggaccctgcagggcgccgccaacgccctgagcggcgacgtgtggaacatcgacaacaacttctag

SEQ ID NO: 82608 - DNA, 1029 bp, Artificial Sequence
  derived and/or modified sequence
atggtatctaacggtttccgccctcgaagaagcctgctcttcatttcatgggacggcggagacttcggctccgtaggctctactgaatggctggaggggtatctgagtgtattgcacttgaaagccgtagtatatgtctccttggacaacgccgtgctcggggatgataagttccacgctaaaacatcccctctactgacgtctttaatcgagagcgtgctgaagcaggtggactctccaaaccattccggccaaactctctacgagcaagtcgtattcaccaacccttcctgggatgccgaggtgatccggccactgccgatggactcaagtgcctattcttttacggcctttgtgggcgttcccgctgtggaattttctttcatggaagatgatcaagcttaccccttcctccataccaaggaggatacctacgagaatctgcacaaagttctgcaggggcgtttgcctgcagtcgctcaggcagttgcacaattagccggccagttactgatccggctgtctcacgacagattactacctctcgattttggacgctatggtgatgtcgttctccgccatataggtaacctcaatgagtttagtggtgatctcaaagctcgcggcctgaccctccagtgggtatactcggcacgaggcgattacatccgggctgcagagaaactgcgtcaggaaatatattccagcgaggaacgggatgagcgattgactcgcatgtataatgtgcgtataatgagggtagagttttacttcctgtctcagtatgtcagccccgcagacagtccattccgccatatctttatgggtcgcggcgaccacactctgggcgcactactggaccatcttcgtttgctgagatccaattcatcaggaacccccggcgctacaagcagcactggttttcaggagtcgaggtttcgtcggcagttggccttgcttacttggactttacaaggcgctgccaacgccctgagcggcgatgtgtggaatatcgacaacaacttttag

SEQ ID NO: 82609 - DNA, 1029 bp, Artificial Sequence
  derived and/or modified sequence
atggtgtccaatggcttccggcccaggaggagcctgctcttcatctcctgggatggaggagactttggatctgtgggcagcacagagtggctggagggctacctgtctgtgctgcacctgaaggctgtggtgtatgtgtccctggacaatgctgtgctgggagatgacaagttccacgccaagaccagccccctgctgaccagcctcatcgagagcgtgctgaagcaggtggacagccccaaccacagcggccagaccctgtatgagcaggtggtgttcaccaaccccagctgggatgctgaggtgatccggcccctgcccatggacagcagcgcctacagcttcaccgcctttgtgggcgtgcctgctgtggagttctccttcatggaggatgaccaggcctaccccttcctgcacaccaaggaggacacctatgagaacctgcacaaggtgctgcagggccgcctgcctgctgtggcccaggccgtggcccagctggccggccagctgctgatccggctgagccatgaccggctgctgcccctggactttggccgctatggagatgtggtgctgcggcacatcggcaacctgaatgagttcagcggggacctgaaggcccggggcctgaccctgcagtgggtgtacagcgcccggggggactacatccgggctgctgagaagctgcggcaggagatctacagcagcgaggagagagatgagcggctgaccaggatgtacaacgtgcgcatcatgagggtggagttctacttcctgagccagtatgtgtccccagctgacagccccttccgccacatcttcatgggccgcggggaccacaccctgggcgccctgctggaccacctgcggctgctgcggagcaacagcagcggcacccctggggccaccagcagcacaggcttccaggagagccgcttccggcggcagctggccctgctgacctggaccctgcagggcgccgccaatgccctgtctggagatgtgtggaacatcgacaacaacttctag

SEQ ID NO: 82610 - DNA, 1029 bp, Artificial Sequence
  derived and/or modified sequence
atggtgagcaacggcttccggccccggcggagcctgctgttcatctcctgggacggaggtgacttcggatccgttggcagcacagagtggttagaagggtatctgagcgtgttgcatctgaaggctgtggtatatgtaagtctggacaatgccgtcctcggagacgataagttccatgccaaaaccagccccctacttacttccctcatcgagtctgtcctgaagcaggtagattccccaaaccatagcggtcaaacactatatgaacaagttgtgtttacaaatccctcttgggatgcggaagtgattcgccccctgccaatggacagtagtgcttacagctttaccgcctttgttggagttcctgctgttgaatttagttttatggaggatgatcaggcgtaccctttcctgcacaccaaggaggacacctacgaaaacctgcacaaggttcttcagggacggctccccgctgtggcacaagccgttgcccagctagcaggacagctgctgatccggctttctcatgaccggctgcttcccctcgatttcggaaggtatggcgacgttgtgctccggcacattggaaacctcaatgaattctccggggatctgaaagcccgcggtctgaccctacagtgggtttatagcgctcgcggcgactatatccgggccgccgagaaattacggcaggagatctatagctcagaggaaagagacgaacgcctcacaaggatgtacaatgtccgcataatgcgggtagagttctatttcttgtctcagtatgtgagccccgctgactcccccttccggcatatcttcatgggtcggggcgaccatactttaggcgctctacttgatcacctgagattgttgaggtctaattcgtctggaactcccggagccacttccagcacaggcttccaggagtctcgatttcggcggcagctcgctctgctgacttggactctccagggcgcagccaatgctctgtctggagacgtctggaatattgataacaatttctag

SEQ ID NO: 82611 - DNA, 1029 bp, Artificial Sequence
  derived and/or modified sequence
atggtatctaatggtttcaggcctcgccgtagcctcctgtttatttcatgggatggcggtgattttggatccgtgggatcaacagaatggctagaggggtatctgagtgtgctccacctgaaggctgtggtgtacgtgtctcttgataacgccgtcctgggcgacgataaatttcatgccaagacgtcacctctgctgaccagcttaatcgaaagcgtcctgaaacaggtcgactcccccaaccactcaggacaaaccctctacgaacaggtggtgttcactaatccctcttgggacgccgaagtgatccggcctttgcctatggactctagtgcctattcctttactgcctttgtcggcgtcccagccgtggaattttctttcatggaggatgaccaggcctacccctttctgcacacaaaggaggacacctacgagaatctacataaggtgctgcaaggtagactcccggcagtcgcacaggcggttgctcagctcgcagggcagttactcatcagactgagccatgatcgccttctgcccctggatttcggccgatacggcgacgttgtactgaggcacattggaaatttgaatgagtttagtggagacctgaaagcgagaggacttacactccagtgggtgtatagcgctagaggtgactacattcgagcagccgaaaaactgaggcaggagatttacagctccgaagagcgggatgaaagactgacccgcatgtacaacgtgagaataatgcgcgtggaattttacttcctgtctcagtatgtgtcccccgcagattctcccttccggcatatattcatgggtagaggggaccacactttgggtgcgttgttggaccatctgcggctgctcagatctaattcgtctggtacgcccggagccacttcttcgacaggctttcaagagtcaagattcaggcggcaactggccttgctcacatggactctgcagggcgcagcgaacgcgctctctggcgacgtttggaatatagataataatttttag

SEQ ID NO: 82612 - DNA, 2631 bp, Artificial Sequence
  derived and/or modified sequence
cgctgggggacagcctgcaggcttcaggaggggacacaagcatggagcggctttggggtctattccagagagcgcaacaactgtccccaagatcctctcagaccgtctaccagcgtgtggaaggcccccggaaagggcacctggaggaggaagaggaagacggggaggagggggcggagacattggcccacttctgccccatggagctgaggggccctgagcccctgggctctagacccaggcagccaaacctcattccctgggcggcagcaggacggagggctgccccctacctggtcctgacggccctgctgatcttcactggggccttcctactgggctacgtcgccttccgagggtcctgccaggcgtgcggagactctgtgttggtggtcagtgaggatgtcaactatgagcctgacctggatttccaccagggcagactctactggagcgacctccaggccatgttcctgcagttcctgggggaggggcgcctggaggacaccatcaggcaaaccagccttcgggaacgggtggcaggctcggccgggatggccgctctgactcaggacattcgcgcggcgctctcccgccagaagctggaccacgtgtggaccgacacgcactacgtggggctgcaattcccggatccggctcaccccaacaccctgcactgggtcgatgaggccgggaaggtcggagagcagctgccgctggaggaccctgacgtctactgcccctacagcgccatcggcaacgtcacgggagagctggtgtacgcccactacgggcggcccgaagacctgcaggacctgcgggccaggggcgtggatccagtgggccgcctgctgctggtgcgcgtgggggtgatcagcttcgcccagaaggaagctcaaaggccctgtggccccccaagaatggcaggggagcctcctaggctccccttatcacctgggccccgggccacgactgcggctagtggtcaacaatcacaggacctccacccccatcaacaacatcttcggctgcatcgaaggccgctcagagccagatcactacgttgtcatcggggcccagagggatgcatggggcccaggagcagctaaatccgctgtggggacggctatactcctggagctggtgcggaccttttcctccatggtgagcaacggcttccggccccgcagaagtctcctcttcatcagctgggacggtggtgactttggaagcgtgggctccacggagtggctagagggctacctcagcgtgctgcacctcaaagccgtagtgtacgtgagcctggacaacgcagtgctgggggatgacaagtttcatgccaagaccagcccccttctgacaagtctcattgagagtgtcctgaagcaggtggattctcccaaccacagtgggcagactctctatgaacaggtggtgttcaccaatcccagctgggatgctgaggtgatccggcccctacccatggacagcagtgcctattccttcacggcctttgtgggagtccctgccgtcgagttctcctttatggaggacgaccaggcctacccattcctgcacacaaaggaggacacttatgagaacctgcataaggtgctgcaaggccgcctgcccgccgtggcccaggccgtggcccagctcgcagggcagctcctcatccggctcagccacgatcgcctgctgcccctcgacttcggccgctacggggacgtcgtcctcaggcacatcgggaacctcaacgagttctctggggacctcaaggcccgcgggctgaccctgcagtgggtgtactcggcgcggggggactacatccgggcggcggaaaagctgcggcaggagatctacagctcggaggagagagacgagcgactgacacgcatgtacaacgtgcgcataatgcgggtggagttctacttcctttcccagtacgtgtcgccagccgactccccgttccgccacatcttcatgggccgtggagaccacacgctgggcgccctgctggaccacctgcggctgctgcgctccaacagctccgggacccccggggccacctcctccactggcttccaggagagccgtttccggcgtcagctagccctgctcacctggacgctgcaaggggcagccaatgcgcttagcggggatgtctggaacattgataacaacttctgaggccctggggatcctcacatccccgtcccccagtcaagagctcctctgctcctcgcttgaatgattcagggtcagggaggtggctcagagtccacctctcattgctgatcaatttctcattacccctacacatctctccacggagcccagaccccagcacagatatccacacaccccagccctgcagtgtagctgaccctaatgtgacggtcatactgtcggttaatcagagagtagcatcccttcaatcacagccccttcccctttctggggtcctccatacctagagaccactctgggaggtttgctaggccctgggacctggccagctctgttagtgggagagatcgctggcaccatagccttatggccaacaggtggtctgtggtgaaaggggcgtggagtttcaatatcaataaaccacctgatatcaataagcca

SEQ ID NO: 82613 - protein, 905 aa, Artificial Sequence
  derived and/or modified sequence
MEVQVSQASLGFELTSVEKSLREWSRLSREVIAWLCPSSPNFILNFPPPPSASSVSMVQLFSSPFGYQSPSGHSEEEREGNMKSAKPQVNHSQHGESQRALSPLQSTLSSAASPSQAYETYIENGLICLKHKIRNIEKKKLKLEDYKDRLKSGEHLNPDQLEAVEKYEEVLHNLEFAKELQKTFSGLSLDLLKAQKKAQRREHMLKLEAEKKKLRTILQVQYVLQNLTQEHVQKDFKGGLNGAVYLPSKELDYLIKFSKLTCPERNESLSVEDQMEQSSLYFWDLLEGSEKAVVGTTYKHLKDLLSKLLNSGYFESIPVPKNAKEKEVPLEEEMLIQSEKKTQLSKTESVKESESLMEFAQPEIQPQEFLNRRYMTEVDYSNKQGEEQPWEADYARKPNLPKRWDMLTEPDGQEKKQESFKSWEASGKHQEVSKPAVSLEQRKQDTSKLRSTLPEEQKKQEISKSKPSPSQWKQDTPKSKAGYVQEEQKKQETPKLWPVQLQKEQDPKKQTPKSWTPSMQSEQNTTKSWTTPMCEEQDSKQPETPKSWENNVESQKHSLTSQSQISPKSWGVATASLIPNDQLLPRKLNTEPKDVPKPVHQPVGSSSTLPKDPVLRKEKLQDLMTQIQGTCNFMQESVLDFDKPSSAIPTSQPPSATPGSPVASKEQNLSSQSDFLQEPLQAAIPPGKQPSSLASPNPPMAKGSEQGFQSPPASSSSVTINTAPFQAMQTVFNVNAPLPPRKEQEIKESPYSPGYNQSFTTASTQTPPQCQLPSIHVEQTVHSQETAQTNVFPRPTQPFVNSRGSVRGCTRGGRLITNSYRSPGGYKGFDTYRGLPSISNGNYSQLQFQAREYSGAPYSQRDNFQQCYKRGGTSGGPRANSRANCFIMRNSLLLIKQQGGVILLR

SEQ ID NO: 82614 - DNA, 2718 bp, Artificial Sequence
  derived and/or modified sequence
atggaggtgcaggtgagccaggccagcctgggcttcgagctgaccagcgtggagaagagcctgagagagtggagcagactgagcagagaggtgatcgcctggctgtgccccagcagccccaacttcatcctgaacttcccccccccccccagcgccagcagcgtgagcatggtgcagctgttcagcagccccttcggctaccagagccccagcggccacagcgaggaggagagagagggcaacatgaagagcgccaagccccaggtgaaccacagccagcacggcgagagccagagagccctgagccccctgcagagcaccctgagcagcgccgccagccccagccaggcctacgagacctacatcgagaacggcctgatctgcctgaagcacaagatcagaaacatcgagaagaagaagctgaagctggaggactacaaggacagactgaagagcggcgagcacctgaaccccgaccagctggaggccgtggagaagtacgaggaggtgctgcacaacctggagttcgccaaggagctgcagaagaccttcagcggcctgagcctggacctgctgaaggcccagaagaaggcccagagaagagagcacatgctgaagctggaggccgagaagaagaagctgagaaccatcctgcaggtgcagtacgtgctgcagaacctgacccaggagcacgtgcagaaggacttcaagggcggcctgaacggcgccgtgtacctgcccagcaaggagctggactacctgatcaagttcagcaagctgacctgccccgagagaaacgagagcctgagcgtggaggaccagatggagcagagcagcctgtacttctgggacctgctggagggcagcgagaaggccgtggtgggcaccacctacaagcacctgaaggacctgctgagcaagctgctgaacagcggctacttcgagagcatccccgtgcccaagaacgccaaggagaaggaggtgcccctggaggaggagatgctgatccagagcgagaagaagacccagctgagcaagaccgagagcgtgaaggagagcgagagcctgatggagttcgcccagcccgagatccagccccaggagttcctgaacagaagatacatgaccgaggtggactacagcaacaagcagggcgaggagcagccctgggaggccgactacgccagaaagcccaacctgcccaagagatgggacatgctgaccgagcccgacggccaggagaagaagcaggagagcttcaagagctgggaggccagcggcaagcaccaggaggtgagcaagcccgccgtgagcctggagcagagaaagcaggacaccagcaagctgagaagcaccctgcccgaggagcagaagaagcaggagatcagcaagagcaagcccagccccagccagtggaagcaggacacccccaagagcaaggccggctacgtgcaggaggagcagaagaagcaggagacccccaagctgtggcccgtgcagctgcagaaggagcaggaccccaagaagcagacccccaagagctggacccccagcatgcagagcgagcagaacaccaccaagagctggaccacccccatgtgcgaggagcaggacagcaagcagcccgagacccccaagagctgggagaacaacgtggagagccagaagcacagcctgaccagccagagccagatcagccccaagagctggggcgtggccaccgccagcctgatccccaacgaccagctgctgcccagaaagctgaacaccgagcccaaggacgtgcccaagcccgtgcaccagcccgtgggcagcagcagcaccctgcccaaggaccccgtgctgagaaaggagaagctgcaggacctgatgacccagatccagggcacctgcaacttcatgcaggagagcgtgctggacttcgacaagcccagcagcgccatccccaccagccagccccccagcgccacccccggcagccccgtggccagcaaggagcagaacctgagcagccagagcgacttcctgcaggagcccctgcaggccgccatcccccccggcaagcagcccagcagcctggccagccccaacccccccatggccaagggcagcgagcagggcttccagagcccccccgccagcagcagcagcgtgaccatcaacaccgcccccttccaggccatgcagaccgtgttcaacgtgaacgcccccctgccccccagaaaggagcaggagatcaaggagagcccctacagccccggctacaaccagagcttcaccaccgccagcacccagacccccccccagtgccagctgcccagcatccacgtggagcagaccgtgcacagccaggagaccgcccagaccaacgtgttccccagacccacccagcccttcgtgaacagcagaggcagcgtgagaggctgcaccagaggcggcagactgatcaccaacagctacagaagccccggcggctacaagggcttcgacacctacagaggcctgcccagcatcagcaacggcaactacagccagctgcagttccaggccagagagtacagcggcgccccctacagccagagagacaacttccagcagtgctacaagagaggcggcaccagcggcggccccagagccaacagcagagccaactgcttcatcatgagaaacagcctgctgctgatcaagcagcagggcggcgtgatcctgctgagatag

SEQ ID NO: 82615 - DNA, 2718 bp, Artificial Sequence
  derived and/or modified sequence
atggaggtacaggttagtcaggccagcctgggctttgaactaacctccgtggagaagtccttgcgcgagtggtccaggttgtctagggaagtgatagcatggttgtgcccttcctcgccgaattttatccttaacttccccccccctccatctgcttccagcgtgtctatggtgcagctgtttagtagcccgttcggctatcagagtccgagcggccatagtgaggaggagcgggagggaaacatgaagagcgcaaagccccaggtgaatcacagccaacatggcgaaagccaacgggcattgagcccactccagagcaccctatcatcagcagccagtccctctcaagcctacgagacctacattgagaatggattgatctgcttgaaacataagattagaaacatcgagaagaagaagctgaagctggaagattacaaagataggctgaaaagtggcgagcacctgaacccagatcaactggaagccgttgagaagtacgaagaagtgcttcataacctggaatttgctaaggagctccagaagacgttctctggtttgagtctggacctcctgaaggcccagaagaaagcccagcggagagaacacatgctcaaactggaagcggaaaaaaaaaaactccggacgatcttacaagtgcagtacgtcttgcagaatctgacccaggagcatgtgcagaaggactttaaaggagggttgaacggcgccgtctatttacccagtaaagaactggactacttgataaagttttccaagcttacatgccccgagaggaacgagtccctctccgtagaggaccaaatggagcaatctagcttgtatttttgggatttgctggagggctctgagaaggcagtggtgggtacaacctacaaacatcttaaagatctgctgtccaagcttctcaactcagggtacttcgagagtatccctgttcctaagaacgctaaggagaaggaggtccccttggaagaagagatgctgatccagagtgaaaagaagacacaattgagtaagacggaaagcgttaaggagagtgagtctctcatggaatttgcacagcctgagattcagccccaggagttcctgaatcgtaggtacatgaccgaggttgattatagtaacaaacagggcgaggagcagccatgggaggcagactatgctaggaagcctaacctgcccaaacgctgggatatgctgaccgagccagacggacaggaaaaaaagcaggagagttttaagagctgggaagcgagtgggaagcatcaagaggtgtctaaaccagcagtgtccttggaacagcgcaaacaggatacttccaagctgcgctctacactgcccgaagaacaaaaaaaacaggaaattagcaagtctaagcctagccccagtcagtggaagcaggacactccaaagtctaaggcaggatacgtgcaggaagagcagaaaaaacaggagaccccaaagctttggccggtccaactgcagaaggaacaggatcccaagaagcagaccccgaagtcatggaccccttcaatgcagagtgagcagaataccaccaaaagttggaccacccccatgtgtgaggaacaagattctaaacagcctgagacacccaagagttgggaaaacaatgttgagtcacaaaagcatagtctgacttctcaatcccagatctccccaaagtcttggggtgtggcaaccgcatctctcatccctaatgatcagctgctgccccggaagctgaataccgaacctaaagatgtgccgaaacccgtccatcagccggtgggctcctcctcgactctgcccaaggatcccgttctgagaaaagaaaagctgcaggatctcatgacgcagatccagggaacttgcaatttcatgcaggaatcggttcttgactttgacaagccatcaagtgccattcctacatcacagccacctagcgccacccccggctcccctgtagccagcaaagaacagaatctcagctcacagtccgacttcctccaggaaccactccaagccgccatcccacctggcaaacaacccagttctctggcctcccccaatccccccatggccaaggggtcagagcagggatttcaatcacctccagcatcttctagctccgtgaccattaataccgcacctttccaggcaatgcagacagtgttcaacgtgaacgcccctctccctccccgtaaggaacaagaaatcaaagagtccccctactctcctggttacaatcagtcttttactaccgcctccacacagacccccccacaatgtcaactccccagcattcacgtcgaacaaacagttcactcacaggaaaccgcacaaaccaacgttttccccagacctactcagccgtttgtgaactctagaggaagtgttaggggctgtactcggggaggacgcctgataactaatagttacagatcccctggcgggtataagggatttgatacctacagaggactccctagcatctctaacggcaactattcacaactgcagttccaagcccgcgaatatagcggcgctccttattcgcagagggataactttcagcagtgttacaaacgcggagggacttccggaggcccaagggctaattcccgcgcaaactgttttattatgagaaacagcctcttactcatcaaacagcagggcggcgtgatcctgcttcgatag

SEQ ID NO: 82616 - DNA, 2718 bp, Artificial Sequence
  derived and/or modified sequence
atggaggtgcaggtgtcccaggccagcctgggctttgagctgacctctgtggagaagagcctgcgggagtggagccggctgagccgggaggtgattgcctggctgtgccccagcagccccaacttcatcctgaacttccccccacctccttctgccagctctgtgtccatggtgcagctgttcagcagccccttcggctaccagagccccagcggccacagcgaggaggagcgggagggcaacatgaagagcgccaagccccaggtgaaccacagccagcacggggagagccagagggccctgagccccctgcagagcaccctgagcagcgctgccagccccagccaggcctatgagacctacattgaaaatggcctcatctgcctgaagcacaagatccggaacatcgagaagaagaagctgaagctggaggactacaaggaccggctgaagagcggggagcacctgaacccagaccagctggaggccgtggagaagtatgaggaggtgctgcacaacctggagtttgccaaggagctgcagaagaccttcagcggcctgagcctggacctgctgaaggcccagaagaaggcccagaggcgggagcacatgctgaagctggaggccgagaagaagaagctgcggaccatcctgcaggtgcagtatgtgctgcagaacctgacccaggagcacgtgcagaaggacttcaagggcggcctgaatggagctgtgtacctgcccagcaaggagctggactacctgatcaagttcagcaagctgacctgcccagagagaaatgaaagcctgtctgtggaggaccagatggagcagagcagcctgtacttctgggacctgctggagggcagcgagaaggctgtggtgggcaccacctacaagcacctgaaggacctgctgagcaagctgctgaacagcggctactttgagagcatccctgtgcccaagaatgccaaggagaaggaggtgcccctggaggaggagatgctgatccagagcgagaagaagacccagctgagcaagacagaatctgtgaaggagagcgagagcctgatggagtttgcccagcctgagatccagccccaggagttcctgaacagacgctacatgacagaggtggactacagcaacaagcagggcgaggagcagccctgggaggccgactatgccaggaagcccaacctgcccaagcgctgggacatgctgacagagccagatggccaggagaagaagcaggagagcttcaagtcctgggaggccagcggcaagcaccaggaggtgtccaagccagctgtgtccctggagcagaggaagcaggacaccagcaagctgcggagcaccctgcctgaggagcagaagaagcaggagatcagcaagagcaagcccagccccagccagtggaagcaggacacccccaagagcaaggccggctacgtgcaggaggagcagaagaagcaggagacccccaagctgtggcctgtgcagctgcagaaggagcaggaccccaagaagcagacccccaagtcctggacccccagcatgcagagcgagcagaacaccaccaagtcctggaccacccccatgtgtgaggagcaggacagcaagcagcctgagacccccaagtcctgggagaacaacgtggagagccagaagcacagcctgaccagccagagccagatcagccccaagtcctggggcgtggccacagccagcctcatccccaatgaccagctgctgcccaggaagctgaacacagagcccaaggatgtgcccaagcctgtgcaccagcctgtgggcagcagcagcaccctgcccaaggaccctgtgctgaggaaggagaagctgcaggacctgatgacccagatccagggcacctgcaacttcatgcaggagagcgtgctggactttgacaagcccagcagcgccatccccaccagccagcccccatctgccaccccaggcagccctgtggccagcaaggagcagaacctgagcagccagagcgacttcctgcaggagcccctgcaggccgccatccccccaggcaagcagcccagcagcctggccagccccaacccccccatggccaagggcagcgagcagggcttccagagccccccagccagcagcagctctgtgaccatcaacacagcccccttccaggccatgcagaccgtcttcaacgtgaatgcccccctgccccccaggaaggagcaggagatcaaggagagcccctacagccctggctacaaccagagcttcaccacagccagcacccagaccccaccccagtgccagctgcccagcatccacgtggagcagacagtgcacagccaggagacagcccagaccaacgtgttcccccggcccacccagccctttgtgaacagccggggctctgtgcggggctgcacccggggcggccgcctcatcaccaacagctaccgcagccctgggggctacaagggctttgacacctaccggggcctgcccagcatcagcaatggaaactacagccagctgcagttccaggcccgggagtacagcggggccccctacagccagagggacaacttccagcagtgctacaagagaggaggcaccagcggcggcccccgggccaacagccgggccaactgcttcatcatgaggaacagcctgctgctgatcaagcagcagggcggcgtcatcctgctgaggtag

SEQ ID NO: 82617 - DNA, 4156 bp, Artificial Sequence
  derived and/or modified sequence
tagggcacgggaagggctcgctagaatgagctcttaaactggttgggtgtaagcggttttgggctagtctaaaccaaacaactgagaataaacgcggggttcctgcaggttgagagagtacctgtctgcaaatgtccagtagtgatggattgccttgtaggccccagagcaatcggggaagttagcattcttgttcaagaagctgctggttcacttagagctataaaagaatgttgtgagtttggattttcttccaaacgttcaggattgaggttagggctggtggtgagggatcatgtaaagaggtttgagtggctcagccttaggtcccggtgtggaaagcttattcttttggtgtcatcacgtggccgtgggaattatttagaatgtgatctgccctcatgagaagaaaggagctctgaagccgttgcagttcttcctccctatgtggaaaatcgaatttctggaaacatcctccgtattgggagattttgcctatgtaaaggctatccttattggctagcggcactaattactttaaaagtaggatggaagtacaagtatctcaagcatcattgggtttcgagctcacttctgtggaaaagagtttaagggagtggtctagactttccagggaagttattgcctggctgtgtccctctagtcctaattttatacttaactttcccccacctccttcagcctcatctgtttcaatggtgcaactcttttcatccccttttggttaccagtcaccttcaggccattcagaggaggaaagagaggggaatatgaagtcagccaagccccaagtgaaccacagtcagcatggggaaagccagcgggccttgagccccctgcagtctactctgagttctgctgcatctccttcccaagcgtatgagacctatattgaaaatggactcatatgccttaaacacaaaattagaaacatcgagaaaaagaagctcaaactggaggattataaggatcgcctgaaaagtggagagcatcttaatccagaccagttggaagctgtagagaaatatgaagaagtgctacataatttggaatttgccaaggagcttcaaaaaaccttttctgggttgagcctagatctactaaaagcgcaaaagaaggcccagagaagggagcacatgctaaaacttgaggctgagaagaaaaagcttcgaactatacttcaagttcagtatgtattgcagaacttgacacaggagcacgtacaaaaagacttcaaagggggtttgaatggtgcagtgtatttgccttcaaaagaacttgactacctcattaagttttcaaaactgacctgccctgaaagaaatgaaagtctgagtgttgaagaccagatggagcagtcatccttgtacttttgggaccttttggaaggtagtgagaaagcagtggtaggaacgacatacaaacacttgaaggatctactgtctaaattgctgaactcaggctattttgaaagtatcccagttcccaaaaatgccaaggaaaaggaagtaccactggaggaagaaatgctaatacaatcagagaaaaaaacacaattatcgaagactgaatctgtcaaagagtcagagtctctaatggaatttgcccagccagagatacaaccacaagagtttcttaacagacgctatatgacagaagtagattattcaaacaaacaaggcgaagagcaaccttgggaagcagattatgctagaaaaccaaatctcccaaaacgttgggatatgcttactgaaccagatggtcaagagaagaaacaggagtcctttaagtcctgggaggcttctggtaagcaccaggaggtatccaagcctgcagtttccttagaacagaggaaacaagacacctcaaaactcaggtctactctgccggaagagcagaagaagcaggagatctccaaatccaagccatctcctagccagtggaagcaagatacacctaaatccaaagcagggtatgttcaagaggaacaaaagaaacaggagacaccaaagctgtggccagttcagctgcagaaagaacaagatccaaagaagcaaactccaaagtcttggacaccttccatgcagagcgaacagaacaccaccaagtcatggaccactcccatgtgtgaagaacaggattcaaaacagccagagactccaaaatcctgggaaaacaatgttgagagtcaaaaacactctttaacatcacagtcacagatttctccaaagtcctggggagtagctacagcaagcctcataccaaatgaccagctgctgcccaggaagttgaacacagaacccaaagatgtgcctaagcctgtgcatcagcctgtaggttcttcctctacccttccgaaggatccagtattgaggaaagaaaaactgcaggatctgatgactcagattcaaggaacttgtaactttatgcaagagtctgttcttgactttgacaaaccttcaagtgcaattccaacgtcacaaccgccttcagctactccaggtagccccgtagcatctaaagaacaaaatctgtccagtcaaagtgattttcttcaagagccgttacaggcagcaattcccccaggcaagcaaccgtcttcactagcttctccaaatcctcccatggcaaagggctctgaacagggcttccagtcacctccagcaagtagtagttcagtaaccattaacacagcaccctttcaagccatgcagacagtatttaacgttaatgcacctctgcctccacgaaaagaacaagaaataaaagaatccccttattcacctggctacaatcaaagttttaccacagcaagtacacaaacaccaccccagtgccaactgccatctatacatgtagaacaaactgtccattctcaagagactgcacagacgaatgtgtttcccagacctactcagccatttgtcaatagccggggatctgttagaggatgtactcgtggtgggagattaataaccaattcctatcggtcccctggtggttataaaggttttgatacttatagaggactcccttcaatttccaatggaaattatagccagctgcagttccaagctagagagtattctggagcaccttattcccaaagggataatttccagcagtgttataagcgaggagggacatctggtggtccacgagcaaattcgagagctaactgcttcattatgagaaactcactgttgctaataaaacagcagggtggagtgattcttctcaggtgagcagcccagaaagagacaacgaaacctttaacagtggtgactctggacaaggagactcccgtagcatgacccctgtggatgtgccagtgacaaatccagcagccaccatactgccagtacacgtctaccctctgcctcagcagatgcgagttgccttctcagcagccagaacctctaatctggcccctggaactttagaccaacctattgtgtttgatcttcttctgaacaacttaggagaaacttttgatcttcagcttggtagatttaattgcccagtgaatggcacttacgttttcatttttcacatgctaaagctggcagtgaatgtgccactgtatgtcaacctcatgaagaatgaagaggtcttggtatcagcctatgccaatgatggtgctccagaccatgaaactgctagcaatcatgcaattcttcagctcttccagggagaccagatatggttacgtctgcacaggggagcaatttatggaagtagctggaaatattctacgttttcaggctatcttctttatcaagattgaaagtcagtacagtattgacaataaaaggatggtgttctaattagtgggattgaaggaaaagtagtctttgccctcatgactgattggtttaggaaaatgtttttgttcctagagggaggaggtccttacttttttgttttccttcctgaggtgaaaaatcaagctgaatgacaattagcactaatctggcactttataaattgtgatgtagcctcgctagtcaagctgtgaatgtatattgtttgcacttaatccttaactgtattaacgttcagcttactaaactgactgcctcaagtccaggcaagttacaatgccttgttgtgcctcaataaaaaagttacatgc

SEQ ID NO: 82618 - DNA, 2718 bp, Artificial Sequence
  derived and/or modified sequence
atggaggtgcaggtgagccaggccagcctgggcttcgagctgaccagtgttgaaaaaagtttgcgtgagtggagtaggctgtcacgggaggtaatcgcttggctttgcccgagcagccccaattttatcctgaacttcccaccccctccctcagcaagttccgtgtcgatggtgcagcttttctcttcgccctttggataccagtcaccatcgggtcatagcgaagaggagcgtgaaggcaatatgaagagtgctaagccacaagtgaaccattcccagcacggcgaaagtcagagggctctgtcaccccttcagtccaccttgagctccgcagcgagcccatctcaggcttacgagacgtacatcgaaaatggcctgatttgcctgaaacacaaaatccggaacatcgagaaaaagaaattgaagttagaggattacaaggatcgactaaagtcaggcgagcatctgaaccctgaccagctggaagctgtggagaagtatgaggaagtccttcataacctggagtttgcaaaggagttgcagaagacctttagcggactttccctcgatcttcttaaagctcagaaaaaagcccagcgcagggagcacatgctgaagctggaggccgagaagaaaaaattacgtacaatcctgcaggttcagtacgtactgcagaacctgactcaggagcacgtgcagaaggacttcaagggcggcctgaacggtgcagtatatctaccctctaaagagctcgactatttgattaaattttctaagctgacttgtcctgaaagaaacgagagcctctcagtggaagaccagatggagcagtcttccttatacttttgggatctgctggaaggttccgagaaagcagtggttgggactacttataagcatctgaaggatctgctctcaaagctgttgaattctggttattttgagtcaatccctgtgcctaagaacgccaaggagaaggaagtgccattggaggaagaaatgcttatccaaagcgagaagaagacacagctgagcaaaactgagtctgtgaaggaaagcgaatccctcatggagtttgcacagcctgaaattcagcctcaagaatttctcaacagaaggtatatgactgaagtggattatagcaacaaacagggcgaggaacagccatgggaagctgattacgctcgaaagccaaatctacctaagcggtgggatatgctgaccgaacctgatgggcaagagaaaaaacaggaaagtttcaaaagctgggaggcgtctggtaagcaccaggaagtgtctaaaccggccgtgtccctcgagcaacgcaaacaagacacgtccaagttaaggtctacgctgccggaagaacaaaagaagcaggagatcagcaagagcaagccttcccccagtcagtggaaacaagacaccccaaagtccaaggcaggatacgtgcaggaggagcagaagaagcaggaaacccccaagttatggccggtccagttgcaaaaggagcaagatcccaagaagcagactccaaaaagctggaccccaagtatgcagtctgaacagaatacgactaagtcctggactacacctatgtgcgaagaacaggactcaaaacaacctgagacccctaaaagctgggagaacaatgtggaatcccagaagcattcactgaccagccaatcacagatatcccccaagtcctggggagtggctaccgcatcactcattccaaacgatcaactgttgccaagaaaactaaacacggaacctaaagacgtacccaagcccgttcatcagccagtcgggtcctcatcaacccttcccaaagatcccgtgctccgaaaagagaagctgcaggacttgatgacgcagattcagggcacctgcaacttcatgcaagaatctgtccttgatttcgataagccctcatctgccatccccacttctcagcctccaagtgctacccctgggtcgccagtagcatcaaaagaacagaacctatcctcacaatcagactttttgcaggaacccctgcaggcagctatacctcctggaaagcagcctagtagcctggcgtcacctaatcctcccatggctaagggcagcgagcagggcttccagtcccccccggcctctagttcatccgtgaccatcaacacagccccctttcaggccatgcagacggtgttcaacgtgaacgcccctcttccgcctaggaaagagcaggagattaaggagtcgccgtattctccaggctacaaccagagcttcacaaccgctagtacacaaactcctccgcagtgccagctgccctctatccacgtcgaacaaaccgtacactcacaggaaaccgctcagaccaatgtgttccctcgccccacgcagccctttgtgaatagccggggctcagtaaggggatgtacccgtggtgggcgcctgattaccaatagttacaggtcgcccggaggctacaaggggttcgacacttatcgagggctgccaagtatatccaatggaaattactcccagctccagttccaggcccgcgagtactcaggggctccgtacagccaaagggacaactttcaacagtgctataagaggggaggaacaagcggcggccccagggcaaacagtcgagccaattgctttataatgagaaattcactcctcctcatcaagcaacaaggcggagtgattctccttcgttag

SEQ ID NO: 82619 - DNA, 2718 bp, Artificial Sequence
  derived and/or modified sequence
atggaggtgcaggttagccaggctagcctgggctttgagctcacgtccgtagaaaagtccctgagggagtggagccgccttagtcgggaagtcatcgcctggctatgtccaagttctcccaatttcatcctgaattttcccccacctccatcggccagctccgtgagtatggtgcagttgtttagttcacctttcgggtaccaaagtcccagtggacatagcgaggaggaacgggagggcaacatgaaatctgctaagccccaggtcaaccacagtcagcatggtgaatcacagcgggcactgtctcccctgcagagcaccttgagctctgccgcaagcccatcacaggcgtatgaaacctatatcgaaaacggcctgatatgtctgaagcataagattcgcaatatcgaaaagaagaagctcaagctggaggattacaaagatcgtttaaagagcggcgaacatctgaatccggaccagcttgaggccgtggagaaatatgaggaagtgctgcacaacctggaatttgccaaagaactgcagaagactttctctggcctgagcctggatctcctgaaggcacagaagaaagcgcaacgaagagagcacatgcttaaactcgaggctgagaagaagaagctcaggaccatcctccaggtgcagtacgttctgcagaatctgacacaggagcacgtgcaaaaagattttaaaggcggactcaacggagcagtgtatcttccatccaaggaactggattatttaatcaagttctcaaagctgacctgtcctgagcgcaatgagtcacttagtgtggaagatcagatggagcagtccagcctgtacttctgggacctgttggaggggtccgagaaggcagtagtgggcacgacatacaagcacctgaaagatctgttatccaagctcttgaacagcggatattttgaatcaatccccgtgcccaagaacgctaaagagaaggaagtgccattggaggaagagatgttgatccagagcgaaaaaaaaacccagctgtccaagacggagtcggtcaaggagtcagaaagccttatggaattcgcacagccagagatccagcctcaggagtttctcaatagacggtacatgaccgaggtcgattactcgaataagcagggtgaagagcagccttgggaggcagactatgcaaggaagccaaacctgcccaagagatgggatatgttgactgaacccgatggccaggaaaagaagcaggagagctttaaatcctgggaggccagcggcaagcatcaggaagttagcaagcccgcagtctctcttgaacagaggaaacaggatacaagcaagctcagaagcaccctccctgaagagcagaaaaaacaggaaatatccaaatccaagccatccccctcccagtggaaacaagacactccaaaaagcaaagctggctacgtccaggaagaacaaaaaaagcaagagacgccaaaactctggcctgtgcaactccagaaggaacaggaccccaaaaaacagactcccaagtcgtggaccccatcaatgcagtctgagcagaatacgacaaagagttggacaacaccaatgtgcgaagagcaagattccaaacagcccgagacccctaaaagctgggaaaacaacgtggaatcccagaagcactcccttacgagccagtcccagatatcccctaagtcctggggtgtagccaccgcttccttgattcctaacgaccagctcctgccccgaaaactaaataccgagcccaaggacgtccccaagcctgtgcatcagccagtgggctcatcatctacacttcccaaggaccccgtgttgagaaaggaaaaactgcaggatctcatgacccagattcagggcacctgcaactttatgcaggaaagcgtcctggacttcgataaacccagctccgccattcctacgtcacagccaccaagcgcaacacccggaagtcctgtagccagcaaggagcagaacctgagtagccagagcgatttcttacaggagcctctgcaagccgctatacccccaggcaaacagccttccagtctggcttcacctaatcccccaatggctaagggctctgagcaaggctttcagagtccgccagctagcagtagcagcgtcacaattaatacggcaccatttcaggccatgcaaaccgtgtttaacgtgaacgcaccactgccaccccgaaaggagcaggagatcaaagagagcccttattcccccggatacaatcagtcgtttacgactgcatccactcagactcccccacagtgccaactgccctccatccatgtggaacagactgtgcactcccaggagaccgcccagacaaacgtctttcctagacccacccagccatttgttaattctaggggctcagtaagggggtgtacccggggtgggagactgatcacaaacagttacaggtcccccggaggatataaaggtttcgacacgtaccgtgggctgccctccatcagcaacggaaactattcccagttacagtttcaggcccgtgaatacagcggcgcaccatattctcagcgtgataacttccagcagtgctacaagagaggcggtacaagtggcggaccacgggctaactcacgcgctaactgtttcatcatgagaaactcccttctgctgataaagcagcagggcggagtgattcttctgagatag

SEQ ID NO: 82620 - protein, 377 aa, Artificial Sequence
  derived and/or modified sequence
MSLLDCFCTSRTQVESLRPEKQSETSIHQYLVDEPTLSWSRPSTRASEVLCSTNVSHYELQVEIGRGFDNLTSVHLARHTPTGTLVTIKITNLENCNEERLKALQKAVILSHFFRHPNITTYWTVFTVGSWLWVISPFMAYGSASQLLRTYFPEGMSETLIRNILFGAVRGLNYLHQNGCIHRSIKASHILISGDGLVTLSGLSHLHSLVKHGQRHRAVYDFPQFSTSVQPWLSPELLRQDLHGYNVKSDIYSVGITACELASGQVPFQDMHRTQMLLQKLKGPPYSPLDISIFPQSESRMKNSQSGVDSGIGESVLVSSGTHTVNSDRLHTPSSKTFSPAFFSLVQLCLQQDPEKRPSASSLLSHVFFKQPYFEFL

SEQ ID NO: 82621 - DNA, 1134 bp, Artificial Sequence
  derived and/or modified sequence
atgagcctgctggactgcttctgcaccagcagaacccaggtggagagcctgagacccgagaagcagagcgagaccagcatccaccagtacctggtggacgagcccaccctgagctggagcagacccagcaccagagccagcgaggtgctgtgcagcaccaacgtgagccactacgagctgcaggtggagatcggcagaggcttcgacaacctgaccagcgtgcacctggccagacacacccccaccggcaccctggtgaccatcaagatcaccaacctggagaactgcaacgaggagagactgaaggccctgcagaaggccgtgatcctgagccacttcttcagacaccccaacatcaccacctactggaccgtgttcaccgtgggcagctggctgtgggtgatcagccccttcatggcctacggcagcgccagccagctgctgagaacctacttccccgagggcatgagcgagaccctgatcagaaacatcctgttcggcgccgtgagaggcctgaactacctgcaccagaacggctgcatccacagaagcatcaaggccagccacatcctgatcagcggcgacggcctggtgaccctgagcggcctgagccacctgcacagcctggtgaagcacggccagagacacagagccgtgtacgacttcccccagttcagcaccagcgtgcagccctggctgagccccgagctgctgagacaggacctgcacggctacaacgtgaagagcgacatctacagcgtgggcatcaccgcctgcgagctggccagcggccaggtgcccttccaggacatgcacagaacccagatgctgctgcagaagctgaagggccccccctacagccccctggacatcagcatcttcccccagagcgagagcagaatgaagaacagccagagcggcgtggacagcggcatcggcgagagcgtgctggtgagcagcggcacccacaccgtgaacagcgacagactgcacacccccagcagcaagaccttcagccccgccttcttcagcctggtgcagctgtgcctgcagcaggaccccgagaagagacccagcgccagcagcctgctgagccacgtgttcttcaagcagccctacttcgagttcctgtag

SEQ ID NO: 82622 - DNA, 1134 bp, Artificial Sequence
  derived and/or modified sequence
atgtctctgcttgactgcttttgtaccagccgcacgcaggtcgagtccctgagacccgagaagcagagtgagacgtccatccatcaatatttggtggatgagcccacactgtcttggagcaggccatctacacgggcatcagaagtgctctgctcaaccaatgtgagccactacgaactgcaggtggagatcgggagaggctttgacaatctaacatccgttcacctggctcgccacacccccacaggtactctggtcaccatcaagataactaacctggagaattgcaatgaggaacgactcaaggctctccagaaagctgttatcttatctcacttttttcggcaccctaatatcaccacctactggaccgtattcactgtgggttcttggttgtgggtaatttctcccttcatggcatacgggagcgctagccagctcttacgcacgtacttccccgagggtatgagtgagaccctcattcgtaacatcctgttcggtgccgtcaggggactcaattatctccatcaaaatgggtgtatccacagaagtattaaagcatcccatatccttattagtggcgacggactcgttaccttgtccggattgtctcacttgcacagcttggtgaaacacggccagcggcacagagccgtgtatgatttcccccagtttagcacctccgtgcaaccttggctaagccccgagctacttagacaggatctgcacgggtacaatgtgaaatccgacatatatagtgtcggaataacagcatgcgaattagccagtggccaggtgcctttccaagatatgcacagaacacaaatgctcctgcagaagctcaagggtcccccatacagccctctggacatatccatttttccacagagtgagtcccggatgaaaaactcccagtcaggcgtggattcagggattggcgagtctgtgctcgtatccagtgggacccatacagttaatagcgaccgtctccacacaccaagcagcaaaaccttttctcccgcattcttttcactggttcagctatgcctgcagcaggatccagaaaagaggccctccgcctcctccctgctcagccatgtcttctttaaacagccttactttgagtttctttag

SEQ ID NO: 82623 - DNA, 1134 bp, Artificial Sequence
  derived and/or modified sequence
atgagcctgctggactgcttctgcaccagcaggacccaggtggagagcctgcggcctgagaagcagagcgagaccagcatccaccagtacctggtggatgagcccaccctgtcctggagccggcccagcacccgggccagcgaggtgctgtgcagcaccaacgtgagccactatgagctgcaggtggagatcggccggggctttgacaacctgacctctgtgcacctggcccggcacacccccaccggcaccctggtgaccatcaagatcaccaacctggagaactgcaatgaggagcggctgaaggccctgcagaaggctgtgatcctgagccacttcttccgccaccccaacatcaccacctactggacagtgttcaccgtgggctcctggctgtgggtgatcagccccttcatggcctacggcagcgccagccagctgctgcggacctacttccctgagggcatgtctgagaccctcatccggaacatcctgtttggagctgtgcggggcctgaactacctgcaccagaatggctgcatccacaggagcatcaaggccagccacatcctgatctctggagatggcctggtgaccctgagcggcctgagccacctgcacagcctggtgaagcacggccagaggcacagagctgtgtatgacttcccccagttcagcacctctgtgcagccctggctgagccctgagctgctgcggcaggacctgcacggctacaacgtgaagagtgacatctacagcgtgggcatcacagcctgtgagctggccagcggccaggtgcccttccaggacatgcacaggacccagatgctgctgcagaagctgaagggccccccctacagccccctggacatcagcatcttcccccagagcgagagcaggatgaagaacagccagagcggcgtggacagcggcatcggggagagcgtgctggtgagcagcggcacccacacagtgaacagcgaccggctgcacacccccagcagcaagaccttcagccctgccttcttcagcctggtgcagctgtgcctgcagcaggaccctgagaagaggccttctgccagcagcctgctgagccacgtgttcttcaagcagccctactttgagttcctgtag

SEQ ID NO: 82624 - DNA, 1134 bp, Artificial Sequence
  derived and/or modified sequence
atgagcctgctggactgcttctgcaccagccggacccaggtggagtccctgcggcccgagaagcagtctgaaacgagtattcatcaatacctggtggacgagccaacactctcctggagtaggccatccactcgtgcctcagaagtcctgtgctctaccaacgtcagccattatgaactacaagtagaaatcggaagaggctttgataacttaacctctgtacacctcgctcgtcatacgcctactggtacactggtcacaatcaaaataactaatttggagaattgcaatgaagagcggttgaaagcgctacagaaagcagtaatcctgagccatttttttaggcatcccaatataaccacatattggactgtctttacagtcgggtcttggctctgggtgatctctccattcatggcctatgggtcagcgtcacagctgcttcgaacctacttcccagagggcatgagtgaaacactcattcggaatatcctgttcggagctgtccgcggactgaactacttgcaccagaacggatgcatccacagaagtatcaaagcctcccatattctcatctccggagatgggctcgtaactctgtctggactgtcccatctacattctctggtcaaacatggccagcggcacagagctgtctacgattttccacagttctctactagtgtgcagccatggttatcccccgagctgttacgccaagacctgcacggctataacgtgaagtctgatatttatagcgtaggcatcacggcttgcgagctcgccagtggccaggttccattccaagacatgcatcgcacacagatgctactacagaaactcaaagggcctccctactctcccctggacatatctatattcccgcagtctgaatcccgcatgaagaactctcaaagcggagtagactccggaatcggggagagcgtgctcgtgtccagcggtacccataccgtgaatagcgaccgccttcacacgccaagctctaaaacattctctcccgctttctttagcctagtgcagctgtgtctgcaacaagaccccgaaaaacgtccatccgccagctccctgctgtcccacgtcttttttaaacaaccctattttgagttcttatag

SEQ ID NO: 82625 - DNA, 1134 bp, Artificial Sequence
  derived and/or modified sequence
atgagtctcttggattgcttctgtacatctaggacccaagtggaatctctcagacccgaaaaacagtctgagaccagtatacaccaatatctggtcgacgagcctacgctgagctggtctcgcccttcaacacgtgcttctgaagttttgtgctctacgaacgtgtcacattatgaattacaggtggagattggcagaggcttcgacaacctgactagcgtgcatctggcaaggcatacccccacgggcacattggtcaccattaagattacaaatctggagaattgtaacgaggagagacttaaagcactccagaaggccgtgattttgtcccattttttcaggcaccctaacataactacgtattggaccgtttttaccgtcgggagctggttgtgggtcatctctccctttatggcttacgggtcggcttctcagctcctccggacatacttccccgaaggaatgagcgagacgctcattcgtaatatcttgtttggagccgtccggggactcaactacctgcaccagaacgggtgtatccatcgctctatcaaagccagtcacatccttataagcggggacggactggtgactctttcaggtctttctcacctgcattctctcgtaaagcacggccagagacacagggctgtctacgactttcctcagttttcaacctccgtgcagccttggcttagtccagagctgctgagacaagacctccacgggtacaacgtgaagtcagatatttacagcgtgggaatcactgcatgcgagctggcctcaggccaggttccttttcaagatatgcaccgaacccagatgttactgcagaagcttaaaggccctccttactcgcccctcgacatctcgatattcccacaatctgagagtcggatgaaaaactcgcagagtggcgtagatagcggcattggtgaatcagtgctggtgagttcgggaactcacactgttaattccgaccgcttgcacacgcctagcagcaagacattctcccctgcattctttagcctggtgcagctatgcctgcagcaggatccagaaaaacgcccatcagcgtcctcactgctgtcccatgtgtttttcaaacaaccatatttcgagtttctctag

SEQ ID NO: 82626 - protein, 260 aa, Artificial Sequence
  derived and/or modified sequence
MVAAPWATQEQEEGRGIQPGDRGDQKSAASQKPRSRGILHSLFCCVCRDDGEALPAHSGAPLLVEENGAIPKTPVQYLLPEAKAQDSDKICVVIDLDETLVHSSFKPVNNADFIIPVEIDGVVHQVYVLKRPHVDEFLQRMGELFECVLFTASLAKYADPVADLLDKWGAFRARLFRESCVFHRGNYVKDLSRLGRDLRRVLILDNSPASYVFHPDNAVPVASWFDNMSDTELHDLLPFFEQLSRVDDVYSVLRQPRPGS

SEQ ID NO: 82627 - DNA, 783 bp, Artificial Sequence
  derived and/or modified sequence
atggtagccgctccctgggcaacacaggagcaagaagagggcagaggcatccagccaggtgacagaggcgatcagaagtccgctgcatcacagaagccaaggagccgggggatcttgcattctctgttctgttgcgtctgccgcgatgatggcgaagctctgcccgcacactccggcgcccctctgcttgtcgaagagaacggggccattccaaaaacccccgtgcaatatctcctcccagaggcaaaggcgcaggatagcgacaaaatttgtgtggtcatcgatctcgatgaaaccttggttcactcttcattcaagccagtaaacaacgctgacttcattatccctgtggagatagacggcgtagtgcaccaggtgtatgtgctgaaaagaccacatgttgatgaatttctgcagcggatgggagaactgtttgagtgtgtgttgtttactgccagcctggccaagtacgccgatcctgtggccgacctccttgacaaatggggcgcgttccgtgcaagactattccgcgagagttgtgtgtttcaccgcggcaactatgttaaagacctttcccggctggggagggacctgcgtagggttttgattttggacaactctccagcgtcttacgtattccatcctgataatgcagtgcctgtagcgagctggtttgacaacatgtcggatacagaacttcatgacctcttgcccttctttgaacagctcagccgtgtcgatgacgtgtatagcgtgcttaggcaaccgaggcccggctcatag

SEQ ID NO: 82628 - DNA, 783 bp, Artificial Sequence
  derived and/or modified sequence
atggtggccgccccctgggccacccaggagcaggaggagggccggggcatccagcccggggacagaggagaccagaagtctgctgccagccagaagcccaggagccggggcatcctgcacagcctcttctgctgcgtgtgcagagatgatggagaggccctgcctgcccacagcggggcccccctgctggtggaggagaatggagccatccccaagacccctgtgcagtacctgctgcctgaggccaaggcccaggacagcgacaagatctgtgtggtgattgacctggatgagaccctggtgcacagcagcttcaagcctgtgaacaatgctgacttcatcatccctgtggagattgatggagtggtgcaccaggtgtatgtgctgaagaggcctcatgtggatgagttcctgcagaggatgggagagctgtttgaatgtgtgctcttcaccgccagcctggccaagtatgctgaccctgtggccgacctgctggacaagtggggcgccttccgggcccggctcttccgggagagctgtgtgttccaccggggcaactacgtgaaggacctgagccggctgggccgggacctgcggcgggtgctgatcctggacaacagccctgccagctatgtgttccacccagacaatgctgtgcctgtggcctcctggtttgacaacatgtctgacacagagctgcatgacctgctgcccttctttgagcagctgagccgggtggatgatgtgtacagcgtgctgcggcagccccggcccggcagctag

SEQ ID NO: 82629 - DNA, 783 bp, Artificial Sequence
  derived and/or modified sequence
atggtggccgccccctgggccacccaggagcaggaggagggccggggcatccagcctggcgataggggcgaccagaagagcgcagccagccagaaaccgcgcagtcggggcatactgcacagccttttctgttgcgtatgccgtgacgacggcgaggcccttcctgcccactctggcgcaccactcctcgtagaggaaaatggcgcgattcccaaaacgccggtgcagtaccttttgccagaggctaaagcccaggacagtgacaaaatttgtgtagtcattgacctggacgagaccctggtccactcgagctttaaaccagttaacaacgccgattttatcattcctgttgagattgacggcgtcgttcaccaagtttatgtgctaaagcggccccacgtggacgagttccttcagcgtatgggagaactgttcgaatgcgtgctgtttactgccagtctggccaagtacgccgatcctgtggctgatctcctcgacaaatggggcgccttccgcgctcgactgttcagggaatcctgtgtgtttcacagaggaaattacgtcaaggatctgagtcgcttagggcgcgacttgcgtcgcgtgcttattctggataatagccccgccagctacgttttccatccagacaacgccgtgccagtcgccagttggtttgacaacatgagcgacactgagctccacgacttgttacccttcttcgagcagttaagccgggtggacgatgtgtactccgttctgcggcagcctcgtccagggagttag

SEQ ID NO: 82630 - DNA, 783 bp, Artificial Sequence
  derived and/or modified sequence
atggtggcggctccatgggcaacacaggaacaggaagaaggcagggggatccagcccggagacaggggagaccagaaaagcgctgcctcacaaaagcccaggtctagggggatcctccattcactcttttgctgcgtctgccgcgatgatggggaggctctacccgcacatagtggcgcacctctgttagttgaagaaaatggcgcaatccccaagacgcctgtacagtatttacttcctgaggccaaagcacaggattccgacaagatttgtgtagtcatagaccttgacgaaacattagtccacagtagctttaagcctgttaataacgctgacttcataatcccagttgaaatagacggtgtggtccatcaggtgtatgtgctgaaacgtcctcacgtcgacgagttcctgcaacggatgggagagctgttcgagtgtgtgttatttacagcaagcctggctaagtacgctgatcccgtggctgacttgcttgacaagtggggcgcattccgagcgaggttgtttcgcgagtcctgtgtgttccataggggcaattacgttaaggatctgagtcggctaggtcgcgatctccgtcgtgtgttgattttagacaactcacccgcttcatatgtcttccatcccgataacgccgtgccagttgcctcttggttcgataacatgtcggataccgaactccacgatctgttgcccttttttgagcaattatccagggtggacgacgtctacagtgttctccggcagccacgccctggctcatag

SEQ ID NO: 82631 - DNA, 1109 bp, Artificial Sequence
  derived and/or modified sequence
tgagattagggggcgcagccagagcaggcctaggaaaacgccagcagcgtgtggcgatcacggtgatgaagcgcaatggtggccgccccgtgggctacccaggagcaggaggagggccgagggatccagcccggggaccggggtgaccagaagtcagcagcttcccagaagccccgaagccggggcatcctccactcactcttctgctgtgtctgccgggatgatggggaggccctgcctgctcacagcggggcgcccctgcttgtggaggagaatggcgccatccctaagaccccagtccaatacctgctccctgaggccaaggcccaggactcagacaagatctgcgtggtcatcgacctggacgagaccctggtgcacagctccttcaagccagtgaacaacgcggacttcatcatccctgtggagattgatggggtggtccaccaggtctacgtgttgaagcgtcctcacgtggatgagttcctgcagcgaatgggcgagctctttgaatgtgtgctgttcactgctagcctcgccaagtacgcagacccagtagctgacctgctggacaaatggggggccttccgggcccggctgtttcgagagtcctgcgtcttccaccgggggaactacgtgaaggacctgagccggttgggtcgagacctgcggcgggtgctcatcctggacaattcacctgcctcctatgtcttccatccagacaatgctgtaccggtggcctcgtggtttgacaacatgagtgacacagagctccacgacctcctccccttcttcgagcaactcagccgtgtggacgacgtgtactcagtgctcaggcagccacggccagggagctagtgagggtgatggggccaggacctgcccctgaccaatgatacccacacctcctcccaggaagactgcccaggcctttgttaggaaaacccatgggccgccgccacactcagtgccatggggaagcgggcgtctcccccaccagccccaccaggcggtgtaggggcagcaggctgcactgaggaccgtgagctccaggccccgtgtcagtgccttcaaacctcctcccctattctcaggggacctggggggcc

SEQ ID NO: 82632 - DNA, 783 bp, Artificial Sequence
  derived and/or modified sequence
atggtggccgccccctgggccacccaggagcaggaggagggcagaggcatccagcccggcgacagaggcgaccagaagagcgccgccagccagaagcccagaagcagaggcatcctgcacagcctgttctgctgcgtgtgcagagacgacggcgaggccctgcccgcccacagcggcgcccccctgctggtggaggagaacggcgccatccccaagacccccgtgcagtacctgctgcccgaggccaaggcccaggacagcgacaagatctgcgtggtgatcgacctggacgagaccctggtgcacagcagcttcaagcccgtgaacaacgccgacttcatcatccccgtggagatcgacggcgtggtgcaccaggtgtacgtgctgaagagaccccacgtggacgagttcctgcagagaatgggcgagctgttcgagtgcgtgctgttcaccgccagcctggccaagtacgccgaccccgtggccgacctgctggacaagtggggcgccttcagagccagactgttcagagagagctgcgtgttccacagaggcaactacgtgaaggacctgagcagactgggcagagacctgagaagagtgctgatcctggacaacagccccgccagctacgtgttccaccccgacaacgccgtgcccgtggccagctggttcgacaacatgagcgacaccgagctgcacgacctgctgcccttcttcgagcagctgagcagagtggacgacgtgtacagcgtgctgagacagcccagacccggcagctag

SEQ ID NO: 82633 - protein, 706 aa, Artificial Sequence
  derived and/or modified sequence
MVKAPQSEERLARGGKENNSVLACGAQASWSIFGADAAEVPGTRGHSQQEAAMPHIPEDEEPPGEPQAAQSPAGQGPPAAGVSCSPTPTIVLTGDATSPEGETDKNLANRVHSPHKRLSHRHLKVSTASLTSVDPAGHIIDLVNDQLPDISISEEDKKKNLALLEEAKLVSERFLTRRGRKSRSSPGDSPSAVSPNLSPSASPTSSRSNSLTVPTPPGLDVCSGPPSPLPGAPPQKGDEADVSSPHPGEPEHILMRNQNLVGLKLPDLSEAAEQEKGLPSELSPAIEEEESKSGLDVMPNISDVLLRKLRVHRSLPGSAPPLTEKEVENVFVQLSLAFRNDSYTLESRINQAERERNLTEENTEKELENFKASITSSASLWHHCEHRETYQKLLEDIAVLHRLAARLSSRAEVVGAVRQEKRMSKATEVMMQYVENLKRTYEKDHAELMEFKKLANQNSSRSCGPSEDGVPRTARSMSLTLGKNMPRRRVSVAVVPKFNALNLPGQTPSSSSIPSLPALSESPNGKGSLPVTSALPALLENGKTNGDPDCEASAPALTLSCLEELSQETKARMEEEAYSKGFQEGLKKTKELQDLKEEEEEQKSESPEEPEEVEETEEEEKGPRSSKLEELVHFLQVMYPKLCQHWQVIWMMAAVMLVLTVVLGLYNSYNSCAEQADGPLGRSTCSAAQRDSWWSSGLQHEQPTEQ

SEQ ID NO: 82634 - DNA, 2121 bp, Artificial Sequence
  derived and/or modified sequence
atggtgaaggccccccagagcgaggagagactggccagaggcggcaaggagaacaacagcgtgctggcctgcggcgcccaggccagctggagcatcttcggcgccgacgccgccgaggtgcccggcaccagaggccacagccagcaggaggccgccatgccccacatccccgaggacgaggagccccccggcgagccccaggccgcccagagccccgccggccagggcccccccgccgccggcgtgagctgcagccccacccccaccatcgtgctgaccggcgacgccaccagccccgagggcgagaccgacaagaacctggccaacagagtgcacagcccccacaagagactgagccacagacacctgaaggtgagcaccgccagcctgaccagcgtggaccccgccggccacatcatcgacctggtgaacgaccagctgcccgacatcagcatcagcgaggaggacaagaagaagaacctggccctgctggaggaggccaagctggtgagcgagagattcctgaccagaagaggcagaaagagcagaagcagccccggcgacagccccagcgccgtgagccccaacctgagccccagcgccagccccaccagcagcagaagcaacagcctgaccgtgcccaccccccccggcctggacgtgtgcagcggcccccccagccccctgcccggcgcccccccccagaagggcgacgaggccgacgtgagcagcccccaccccggcgagcccgagcacatcctgatgagaaaccagaacctggtgggcctgaagctgcccgacctgagcgaggccgccgagcaggagaagggcctgcccagcgagctgagccccgccatcgaggaggaggagagcaagagcggcctggacgtgatgcccaacatcagcgacgtgctgctgagaaagctgagagtgcacagaagcctgcccggcagcgccccccccctgaccgagaaggaggtggagaacgtgttcgtgcagctgagcctggccttcagaaacgacagctacaccctggagagcagaatcaaccaggccgagagagagagaaacctgaccgaggagaacaccgagaaggagctggagaacttcaaggccagcatcaccagcagcgccagcctgtggcaccactgcgagcacagagagacctaccagaagctgctggaggacatcgccgtgctgcacagactggccgccagactgagcagcagagccgaggtggtgggcgccgtgagacaggagaagagaatgagcaaggccaccgaggtgatgatgcagtacgtggagaacctgaagagaacctacgagaaggaccacgccgagctgatggagttcaagaagctggccaaccagaacagcagcagaagctgcggccccagcgaggacggcgtgcccagaaccgccagaagcatgagcctgaccctgggcaagaacatgcccagaagaagagtgagcgtggccgtggtgcccaagttcaacgccctgaacctgcccggccagacccccagcagcagcagcatccccagcctgcccgccctgagcgagagccccaacggcaagggcagcctgcccgtgaccagcgccctgcccgccctgctggagaacggcaagaccaacggcgaccccgactgcgaggccagcgcccccgccctgaccctgagctgcctggaggagctgagccaggagaccaaggccagaatggaggaggaggcctacagcaagggcttccaggagggcctgaagaagaccaaggagctgcaggacctgaaggaggaggaggaggagcagaagagcgagagccccgaggagcccgaggaggtggaggagaccgaggaggaggagaagggccccagaagcagcaagctggaggagctggtgcacttcctgcaggtgatgtaccccaagctgtgccagcactggcaggtgatctggatgatggccgccgtgatgctggtgctgaccgtggtgctgggcctgtacaacagctacaacagctgcgccgagcaggccgacggccccctgggcagaagcacctgcagcgccgcccagagagacagctggtggagcagcggcctgcagcacgagcagcccaccgagcagtag

SEQ ID NO: 82635 - DNA, 2121 bp, Artificial Sequence
  derived and/or modified sequence
atggtgaaggccccacagtccgaggaaagattggctagaggcggcaaggaaaataattctgtgctggcttgtggagctcaggcctcctggagcatttttggagcagatgccgcggaggtccctggcacccggggacactcccagcaagaagcggctatgccgcatattccagaagacgaagaaccgcctggcgagccccaggctgcccagagccccgccgggcagggccctcccgccgccggggtgtcttgcagccccacgcccaccatcgtgctaaccggggatgctacaagtccagagggcgaaactgataaaaatctggctaaccgcgtgcacagcccacataaaaggttgagccacaggcaccttaaagtgagcacggcttccctgacctccgtcgatccagccggacatatcattgacctggtgaatgaccaactacccgacatttcaatatctgaggaggacaaaaaaaaaaatctcgctcttctcgaagaagctaagctggtatctgaaagattcttgactagacggggcaggaagtcacgatcttcacccggtgacagtccctcagctgtgtcaccaaatctgagcccatccgcgtccccgaccagctcacgaagcaattcattgactgtgcctacaccacccgggctggatgtgtgcagcggacctcccagccctcttcccggggcacctccccagaaaggagatgaggcagatgtctcatctccacatccaggcgaacctgagcacatcttgatgagaaaccagaacctcgtggggctaaaactgccagatctaagcgaggccgctgaacaagaaaagggccttcccagtgagctgtcccccgccatcgaagaggaggaatcaaaatccggactcgacgtcatgcctaatatcagcgacgtgcttctgcgaaagctgcgcgtgcacagaagcttacctgggagtgctccacccctgaccgagaaggaagtagaaaacgtctttgtgcagttaagcctggcctttaggaatgatagttacacactggaatcccgaattaatcaggctgagagggagcgaaatttgaccgaagagaacaccgagaaagaactcgaaaactttaaggcaagcattaccagcagcgccagcctctggcaccactgcgaacacagggagacttaccagaagttgctggaagatatcgcagtattacaccgtctcgctgcacggctgagctcacgagctgaagtcgtgggggccgtgagacaggaaaagcggatgtccaaggctactgaggtgatgatgcagtacgtggagaaccttaagcgcacatacgaaaaggatcacgccgagcttatggaattcaaaaagctcgccaaccaaaatagctcacgctcctgcggcccatcagaggacggcgtcccccggacagccagatctatgagcttgactctggggaagaacatgccaaggcgccgggtgtcagtcgcggtggtgcccaagtttaacgcacttaatctccccggacagacacccagctccagttccataccctcacttccagccctgagtgagtcacccaacgggaaaggttcattgccagttacaagcgccctgcccgctcttctcgaaaacggcaaaacaaatggggatccagattgcgaggcaagcgcccccgccctgacactgtcctgtttggaggagctctcccaggagactaaagcccggatggaggaggaggcttacagcaagggcttccaggaaggactgaaaaagacaaaagaacttcaggacttgaaagaggaagaggaagagcaaaaatcagaaagcccagaggaacctgaggaagtcgaggagacagaggaagaggagaagggaccccgctcgtccaaactagaggaactggtgcactttcttcaggtcatgtatccgaaactgtgccaacattggcaggtgatctggatgatggccgccgtgatgcttgtgctgactgttgttcttggactgtacaacagttacaactcatgtgccgagcaggccgatgggcctctgggccgcagtacgtgctctgccgcccagagagacagttggtggagcagtggcctgcagcacgagcagcccacggagcaatag

SEQ ID NO: 82636 - DNA, 2121 bp, Artificial Sequence
  derived and/or modified sequence
atggtgaaggccccccagagcgaggagcggctggcccggggcggcaaggagaacaacagcgtgctggcctgtggggcccaggcctcctggagcatctttggagcagatgctgctgaggtgcccggcacccggggccacagccagcaggaggccgccatgccccacatcccagaagatgaggagcccccaggagagccccaggccgcccagagccctgctggccagggccccccagctgctggggtgtcctgcagccccacccccaccatcgtgctgactggagatgccaccagccctgagggggagacagacaagaacctggccaacagagtgcacagcccccacaagaggctgagccaccgccacctgaaggtgtccacagccagcctgacctctgtggaccctgctggccacatcatcgacctggtgaatgaccagctgcctgacatcagcatcagcgaggaggacaagaagaagaacctggccctgctggaggaggccaagctggtgtctgagcgcttcctgacccggcggggcaggaagagccgcagcagccctggggacagccccagcgctgtgagccccaacctgagccccagcgccagccccaccagcagccgcagcaacagcctgactgtgcccaccccacctggcctggatgtgtgcagcggcccccccagccccctgcccggggccccaccccagaagggagatgaagcagatgtgagcagcccccaccctggagagcctgagcacatcctgatgaggaaccagaacctggtgggcctgaagctgcctgacctgtctgaggccgctgagcaggagaagggcctgcccagcgagctgagccctgccatcgaggaggaggagagcaagagcggcctggatgtgatgcccaacatcagtgatgtgctgctgaggaagctgcgggtgcacaggagcctgcccggcagcgccccacccctgacagagaaggaggtggagaatgtgtttgtgcagctgagcctggccttcagaaatgacagctacaccctggagagccgcatcaaccaggccgagcgggagaggaacctgacagaagaaaatacagagaaggagctggagaacttcaaggccagcatcaccagcagcgccagcctgtggcaccactgtgagcaccgggagacctaccagaagctgctggaggacattgctgtgctgcaccggctggccgcccggctgagcagcagagctgaggtggtgggcgctgtgcggcaggagaagaggatgagcaaggccacagaggtgatgatgcagtatgtggagaacctgaagaggacctatgagaaggaccacgccgagctgatggagttcaagaagctggccaaccagaacagcagccgcagctgtggccccagtgaagatggagtgcccaggacagcccgctccatgagcctgaccctgggcaagaacatgccccggcggcgggtgtctgtggccgtggtgcccaagttcaatgccctgaacctgcccggccagacccccagcagcagcagcatccccagcctgcctgccctgtctgagagccccaacgggaagggcagcctgcctgtgaccagcgccctgcctgccctgctggagaatggcaagaccaatggagaccctgactgtgaggccagcgccccagccctgaccctgagctgcctggaggagctgagccaggagaccaaggccaggatggaggaggaggcctacagcaagggcttccaggagggcctgaagaagaccaaggagctgcaggacctgaaggaggaggaggaggagcagaagtctgagagccctgaggagcctgaggaggtggaggagacagaggaggaggagaagggccccaggagcagcaagctggaggagctggtgcacttcctgcaggtgatgtaccccaagctgtgccagcactggcaggtgatctggatgatggctgctgtgatgctggtgctgactgtggtgctgggcctgtacaacagctacaacagctgtgccgagcaggctgatggccccctgggccgcagcacctgcagcgctgcccagagggacagctggtggagcagcggcctgcagcacgagcagcccacagagcagtag

SEQ ID NO: 82637 - DNA, 2468 bp, Artificial Sequence
  derived and/or modified sequence
agatgtaacattgaccttaaatggtaaaagctccccagagtgaagagaggctggccagaggaggaaaggagaataactcagttttagcctgtggagcccaggcctcttggagcatctttggggctgacgcagcggaggttccgggcacacgtggccactcccagcaggaggctgccatgccccacattcccgaggacgaggagccccccggagagccacaggcagcccagagccctgccggccaaggtcctcctgccgcaggagtatcttgcagtccaactcccacgattgtcctgactggggatgccacttcaccagaaggagaaaccgacaaaaacctggccaacagagttcacagtccccacaagaggctttctcaccgacacttgaaggtgtccactgcctccctgacatctgtggaccccgcggggcacatcattgacctggtgaatgaccagctgccagacatcagcatctcagaggaggacaagaagaaaaacctggcgctgctggaagaagccaagttggtgagtgagcgattcctgacccgccgtgggaggaagtccaggagcagccccggagactccccatcagctgtttccccgaacctcagccccagcgcttctcctacatcctctcggagcaactcacttacagtccccaccccgccaggtttggatgtgtgcagtggcccgccatcccctctgcctggagcaccaccacagaagggggatgaggccgacgtctcttcacctcaccctggcgagcctgagcacatcctgatgagaaatcagaacttagtggggctcaagcttccagaccttagtgaagcagctgagcaggaaaaagggcttccttctgaactctccccagctattgaggaagaagagtcaaagagtggcttagatgtcatgcctaatatttctgatgtgctgctgcgcaaactgcgggtccacaggagtctccctggaagtgcccctccactcactgaaaaggaagttgagaacgtgtttgtgcaactgtccttggcctttagaaatgacagctacactctggaatctagaattaaccaggctgaaagggaacgcaacctgacagaggagaacactgagaaagaactggaaaacttcaaagcttccattacgtcctcagcttcactctggcaccactgtgagcaccgggaaacctaccagaagttgctggaggacatcgctgtcctgcaccgcctggctgcccgcctctccagccgagctgaggtggtaggcgccgtccgccaggaaaagcgcatgtcgaaagcaacggaagtgatgatgcagtatgtggagaatctaaagaggacgtatgagaaggaccatgcggagctcatggagtttaaaaagcttgcaaatcagaattcaagccgcagctgtggcccctctgaagatggggtccctcgcacggcacggtccatgtccctcacgctgggaaagaatatgcctcgccggagggtcagcgttgctgtggttcctaagtttaatgccctgaatctgcctggccaaactcccagctcatcatccattccctccttaccagccttgtcggaatcacccaatgggaaaggcagcctacctgtcacttcagcactgcctgcacttttggaaaatggaaagacaaatggggacccagattgtgaagcctctgctcctgcgctgaccctgagctgcctggaggagcttagtcaggagaccaaggccaggatggaggaagaagcctacagcaagggattccaagaaggtctaaagaagaccaaagaacttcaagacctgaaggaggaggaggaagaacagaagagtgagagtcctgaggaacctgaagaggtagaagaaactgaggaagaggaaaagggcccaagaagcagcaaacttgaagaattggtccatttcttacaagtcatgtatcccaaactgtgtcagcactggcaagtgatctggatgatggctgcagtgatgctggtcttgactgttgtgctggggctctacaattcctataactcttgtgcagagcaggctgatgggccccttggaagatccacttgctcggcagcccagagggactcctggtggagctcaggactccagcatgagcagcctacagagcagtaggaaacctcacacctagccagtgccctgctctgagacactcagactaccaccctttccccaagtataacgtcaggcccaagtgtggacacactgccgcccatcccatcaggtcatgaggaagggttcttttaacactcggcacttctgtgggagctattcatacacagtgacttgatgttcttggaggatcaacaaaactgccctgggaaagcatccagtggatgaagaagtcaccttcaccaaggaactctattggaagggaaggtctcctgcccctagctcaggtggctggggagaactaaaacaccttcactggtggttgggggt

SEQ ID NO: 82638 - DNA, 2121 bp, Artificial Sequence
  derived and/or modified sequence
atggtgaaggccccccagagcgaggagcggctggcccggggcggcaaggaaaataactctgtcctggcatgtggtgctcaagccagctggagtattttcggagccgacgctgctgaggtccctggcactcgcggccactctcagcaggaagctgccatgcctcatattccagaggacgaagagccccctggggagccgcaggctgcacagagtcctgcaggtcagggaccccctgctgcaggcgtgtcatgcagccctactccaaccatcgtactgacaggcgacgccactagccctgagggcgagaccgacaagaacctggcaaatcgagtgcactcaccccataaacgcctctctcaccgccatttgaaggtctcaacagcaagcctgacgtcggtggaccctgcgggtcatattatagatctcgtcaacgaccagctgcctgatatcagcatcagtgaagaggataaaaaaaaaaacctagctctcctagaggaagccaagctggtttcagagaggttcctgacacgtagggggcggaagtcaagatcttccccaggggatagtccttctgccgtctctccaaacctgtccccgtctgctagtcccacttcctcaaggagcaacagcctcacagttccaacaccacccggcttggatgtgtgttctgggccccctagtccattaccaggggcacctccccagaagggagatgaggctgacgtttccagccctcatcccggcgagccggagcatatcctgatgaggaaccaaaacctggtaggactgaagcttccagatctctccgaggctgcagaacaggaaaagggtctgccctcagagctgagcccagccattgaggaggaggaatccaagtccggcttggacgtgatgcctaatattagcgacgtcctccttagaaaactgagggtccaccgaagtctcccagggagcgcaccaccactcaccgaaaaagaagtggaaaatgtgtttgtgcagctctccctcgcctttcggaacgattcatatacattggagtctaggattaatcaggctgaaagggagcggaacttgacagaggagaacactgagaaggaattggagaactttaaggcttcaattacatcatctgcatcattgtggcaccattgtgagcacagagaaacgtaccagaaactcctggaggacattgccgtcttgcatagacttgcagcacgactgagcagccgcgcagaggtcgtgggcgccgtgcgccaggagaagcggatgtcaaaggcaacggaagtgatgatgcaatatgtcgagaaccttaagcggacatatgagaaggaccacgctgaacttatggagttcaagaaacttgccaatcaaaactctagcaggagttgcggaccgtccgaggacggcgtaccacgcacggctagatccatgtcactgacccttggcaaaaatatgcccaggagacgggtttcagtagccgtggtgccaaaattcaacgccctgaacctgccaggtcagacacctagctcaagcagcatcccctccctaccggcactttctgaatcacctaatgggaaaggatccctgcccgtcacctccgcactgcccgcgcttctcgaaaacggtaagaccaacggcgaccccgattgcgaggcgagcgcacctgcattaacactgtcctgtctggaggaactttcccaggagaccaaggctcggatggaggaggaagcctactcgaagggattccaagaagggctgaaaaaaacaaaagagcttcaggacctcaaggaggaggaggaggaacagaaatccgaatcgcctgaggagcctgaggaggtcgaggagactgaagaggaagaaaaaggcccacggagcagcaagcttgaggagctggtacattttctccaggtgatgtacccgaagctgtgccaacactggcaggttatatggatgatggccgctgtaatgctcgtcctcaccgttgttctggggctctacaactcctacaattcatgcgctgagcaggctgatggacccctgggtagatccacttgttcagccgctcaacgggacagctggtggagcagcggcctgcagcacgagcagcctacggagcaatag

SEQ ID NO: 82639 - DNA, 2121 bp, Artificial Sequence
  derived and/or modified sequence
atggtgaaggcaccccagtcagaggagagactggcacgcggtggaaaggagaataattccgtgctggcttgcggcgctcaggcttcctggagcatcttcggggctgacgctgctgaagtgcccggaacgcggggacatagtcagcaagaagctgccatgccccatatacctgaggacgaggagcccccaggggaaccacaggccgcacagagtcctgctggtcaagggcctccagccgcaggggtgtcttgtagcccaacacccaccattgtgttgacaggcgacgccacgagtcccgagggcgagaccgataagaacttggccaatcgggttcattccccccacaaacgtctgagccaccgccacctgaaggtgtcaaccgctagtctgacatcagtagacccagcaggccacatcatcgatctggtgaatgatcagcttccagatataagcattagcgaagaggataagaaaaagaacttagcattactggaagaagcaaagctggttagcgagagattccttacccggcgtggccgaaaatccagatcatccccaggtgactccccctcggccgtgagcccaaacctctcgcccagtgctagtccaacctcctctaggtccaattccctcaccgttccgacaccccctggccttgatgtgtgcagcggaccccctagccccctcccaggggcaccgccacagaaaggggatgaggcagacgtctccagccctcatcctggcgagccggaacacatcttgatgaggaaccagaacctggtggggctaaaattgccagacctatcagaggccgctgaacaggaaaagggccttccctcagaattaagccccgcaattgaggaggaagaaagcaagtccggactcgacgtaatgccgaacatcagcgacgttcttcttcgtaagctacgagtgcataggtcactgccaggatcagcaccgccactgacagaaaaagaggtggagaatgtcttcgtgcagttgagcctggcctttcgcaacgattcttatacactggaaagccggataaatcaggcggagcgtgaacgcaacttgactgaagaaaataccgagaaggaacttgaaaactttaaagcaagtattacttctagtgcctctctgtggcaccactgcgagcatagggaaacataccagaagcttctcgaagatattgctgttctccaccgactggcggcacgccttagttccagagctgaggtcgtcggagccgtaaggcaggagaagaggatgagtaaagctactgaagtcatgatgcaatacgtcgaaaatttaaaaaggacttatgaaaaggatcacgccgagctcatggagtttaaaaagctagctaatcagaattcgtctcggtcctgcggcccttcagaggacggagttccacggaccgccagatccatgtctcttacccttggcaagaacatgcccaggagaagagtcagtgttgctgtggtacccaaattcaacgccctcaacctgccaggacagacgccgtccagcagcagcattccaagcctcccggcactctcggagtctcccaacggcaagggctctcttcctgtgacttctgcgctgcccgcactgcttgagaatggtaagaccaatggcgatccagattgcgaggcatccgcgcctgctttaacgctgtcgtgcctggaggagctctcgcaggagacaaaggcacgtatggaagaggaagcatattccaagggcttccaggagggtctcaagaagacaaaagaactgcaagatctgaaggaagaggaggaagagcagaaatcggaatcccccgaagagccagaggaagtggaggagacagaggaggaagagaaaggtcccagatccagcaaattggaggagctcgtgcacttcttgcaggtgatgtatcccaagctgtgccaacattggcaagtgatctggatgatggctgctgtgatgctagtattaacagttgtgcttggattgtataattcatacaattcctgtgccgagcaggcagacggacccctcgggaggagcacatgctcggccgctcagcgagattcctggtggagctcaggattgcaacacgagcaacccacggagcagtag

SEQ ID NO: 82640 - DNA, 2745 bp, Artificial Sequence
  derived and/or modified sequence
atggcaaatgggactttaactcgtcggcaccagaacgggcgtttcgttggggatgccgatctggagcggcagaagttcagtgaccttaaactgaacggcccacaggatcatagtcatttattgtacagcacaatcccccggatgcaagaaccgggacagatcgtcgagacctataccgaggaagatccagagggtgctatgtcagtcgtgtccgtggagactagtgatgatggtacaaccagacggaccgaaacaactgtcaagaaagttgtgaagacggtgacaactcgcactgtgcagccagtggctatgggccccgatggcctgccggtggacgcctctagcgtaagcaacaattacattcaaaccctcgggcgcgactttcgaaaaaacggcaacgggggcccgggaccttacgttggtcaggccggcaccgctacactaccccggaactttcattacccccctgacggctattcacgccactacgaagatggctatcctggagggtcggataattacgggagtttgtctcgagttacacgcatagaggagaggtacaggccctctatggagggatatcgggcaccctctaggcaggacgtgtacggaccgcaaccccaggtccgggtcggagggagctccgtggacctgcaccgatttcacccagagccatacgggctggaagatgatcagaggtcgatgggatatgatgacttagactacgggatgatgtccgattatggtacagccagaagaactggcacacccagtgacccaaggcgccggctcaggagttatgaggatatgattggagaggaggtcccctcagaccaatattattgggctcctctagcccagcatgagcgcggtagcctggcatcactggattccctgcgcaagggcggccccccaccaccgaactggcgacagcctgaattgccagaggttatcgccatgttaggatttagactggacgcagtgaagtcaaacgccgcggcatacctgcagcacctttgttaccgaaacgataaggttaagacagacgtgcgcaagctgaaagggattccggtcctcgtgggcctgctggatcatcctaaaaaagaagtgcacttgggtgcttgcggcgccctaaagaacatctctttcggacgggatcaggataataaaatcgccatcaaaaattgtgatggcgtccctgccctggtgcggctcctcagaaaagcacgcgacatggacctgactgaagtaatcacagggactctgtggaacctgagttctcacgactcaatcaaaatggaaatcgtagatcacgccttacacgcactgaccgacgaggttataattcctcacagcgggtgggaacgcgagcccaatgaagattgtaaaccccggcatattgaatgggagagtgttctcacgaacaccgccgggtgcttgcggaacgtcagctctgaaaggagtgaggcacgcaggaaactgcgtgaatgcgatggtctggtggacgctctgatcttcatagtgcaggccgaaatcggccaaaaggacagcgactcaaagttggtggaaaattgcgtttgcctgctgcgcaacctgtcttaccaggtgcaccgtgaaattccgcaggctgagcgctatcaggaggccgcacctaatgttgctaacaacaccgggccccatgcagcctcttgttttggggccaaaaagggaaaagacgagtggtttagccgtggtaaaaagccaatcgaagaccccgccaatgacactgtggacttccctaaacgtactagtcctgccaggggatatgagctactgttccagcccgaagtcgtgcgaatctatatcagcctgcttaaggaaagcaaaacacccgccattctggaagccagtgccggcgccatacagaacctgtgcgcagggcgatggacctatggacggtatataagatccgccctgaggcaggaaaaagccctgtccgctatcgccgaccttctgactaacgaacacgaacgagtcgtcaaggccgccagtggcgccttgaggaaccttgcggtagatgctcggaataaggaattgatcgggaagcacgcaattcccaatcttgtgaagaatttgccaggaggccagcagaactctagctggaatttctccgaagataccgtgatctccatactaaacacaatcaacgaggtgattgcagagaatctggaagccgccaagaaactccgggagacccaggggatagaaaaattggtcctgattaacaaatctggcaatagaagtgagaaagaggtcagagccgcagcccttgttctgcagacaatctggggctataaggaactgcggaaaccccttgagaaggaggggtggaagaagagcgactttcaggttaacctgaacaacgcatcgcgatcccagagttctcacagctacgacgatagtaccttgcccctgattgaccgaaaccagaagtcagacaaaaaaccagaccgggaagaaatccagatgagcaacatgggctcaaacactaaaagcctggacaacaactacagtacgccgaatgagagaggggaccataatagaaccctcgaccgctcaggcgatctgggggacatggaacccctgaaaggaacaactcccctcatgcaggatgaaggtcaggaaagtctcgaagaggagctcgacgtgctggtgctggacgatgaaggaggccaggtgtcctaccccagcatgcagaagatctag

SEQ ID NO: 82641 - DNA, 2745 bp, Artificial Sequence
  derived and/or modified sequence
atggccaacggcaccctgacccggcggcaccagaatggccgctttgtgggagatgctgacctggagcggcagaagttcagtgacctgaagctgaatggcccccaggaccacagccacctgctgtacagcaccatccccaggatgcaggagcccggccagatcgtggagacctacacagaagaagatcctgagggcgccatgtctgtggtgtctgtggagaccagtgatgatggcaccaccaggagaacagagaccaccgtgaagaaggtggtgaagacagtgaccaccaggacagtgcagcctgtggccatgggcccagatggcctgcctgtggatgccagctctgtgagcaacaactacatccagaccctgggccgggacttcaggaagaatggaaatggaggccctggcccctacgtgggccaggccggcacagccaccctgcccaggaacttccactaccccccagatggctacagccgccactatgaagatggctacccaggcggcagtgacaactacggcagcctgagccgggtgaccagaattgaggagcgctaccggcccagcatggagggctaccgggcccccagccggcaggatgtgtatggcccccagccccaggtgcgggtgggcggcagctctgtggacctgcaccgcttccaccctgagccctacggcctggaggatgaccagaggtccatgggctatgatgacctggactatggcatgatgtctgactatggaacagcccggaggacaggcacccccagcgacccccggcggcggctgcggagctatgaggacatgattggagaggaggtgcccagcgaccagtactactgggcccccctggcccagcacgagcggggcagcctggccagcctggacagcctgaggaaaggaggccccccaccacccaactggaggcagcctgagctgcctgaggtgattgccatgctgggcttccggctggatgctgtgaagagcaatgctgctgcctacctgcagcacctgtgctacagaaatgacaaggtgaagacagatgtgaggaagctgaagggcatccctgtgctggtgggcctgctggaccaccccaagaaggaggtgcacctgggcgcctgtggggccctgaagaacatcagctttggccgggaccaggacaacaagatcgccatcaagaactgtgatggagtgcctgccctggtgcggctgctgaggaaggcccgggacatggacctgacagaggtgatcaccggcaccctgtggaacctgagcagccatgacagcatcaagatggagatcgtggaccacgccctgcacgccctgacagatgaagtcatcatcccccacagcggctgggagcgggagcccaatgaagactgcaagcccaggcacatcgagtgggagagcgtgctgaccaacacagctggctgcctgagaaatgtgtcctctgagaggtctgaggcccggaggaagctgcgggagtgtgatggcctggtggatgccctgatcttcatcgtgcaggccgagatcggccagaaggacagcgacagcaagctggtggagaactgtgtgtgcctgctgaggaacctgagctaccaggtgcaccgggagatcccccaggccgagcgctaccaggaggccgcccccaacgtggccaacaacacaggcccccatgctgccagctgctttggagccaagaagggcaaggatgagtggttcagccggggcaagaagcccattgaagatcctgccaatgacacagtggacttccccaagaggaccagccctgcccggggctatgagctgctcttccagcctgaggtggtgcgcatctacatcagcctgctgaaggagagcaagaccccagccatcctggaggccagcgctggggccatccagaacctgtgtgccggccgctggacctacggccgctacatccgcagcgccctgcggcaggagaaggccctgagcgccatcgctgacctgctgaccaatgaacatgagcgggtggtgaaggccgccagcggggccctgaggaacctggccgtggatgccaggaacaaggagctgattggcaagcacgccatccccaacctggtgaagaacctgcccggcggccagcagaacagctcctggaacttcagcgaggacaccgtcatcagcatcctgaacaccatcaatgaggtgattgctgagaacctggaggccgccaagaagctgcgggagacccagggcatcgagaagctggtgctgatcaacaagagcggcaacagaagtgagaaggaggtgcgggccgccgccctggtgctgcagaccatctggggctacaaggagctgaggaagcccctggagaaggagggctggaagaagagtgacttccaggtgaacctgaacaatgccagccgcagccagagcagccacagctatgatgacagcaccctgcccctgattgacaggaaccagaagagtgacaagaagccagaccgggaggagatccagatgagcaacatgggcagcaacaccaagagcctggacaacaactacagcaccccaaatgaaagaggagaccacaacagaaccctggacagaagtggggacctgggggacatggagcccctgaagggcaccacccccctgatgcaggatgagggccaggagagcctggaggaggagctggatgtgctggtgctggatgatgaaggaggccaggtgtcctaccccagcatgcagaagatctag

SEQ ID NO: 82642 - DNA, 2745 bp, Artificial Sequence
  derived and/or modified sequence
atggccaacggcaccctgacccggcggcaccagaacggccggttcgtcggggatgcggacctggaacgccagaagttttcagaccttaagctgaatgggcctcaggaccattcccatttactgtactcaacgatccctagaatgcaggagcccggacaaatcgtcgaaacctataccgaggaggatcccgagggagctatgagcgtcgtcagcgtggaaacctccgatgacggaacaactaggcgcacggagaccacagtgaagaaagtggtgaagaccgtgacgactcgcacagtccagccagtcgctatgggacctgacggcttacccgttgatgcgtcctcagtgtccaataactatatccaaacccttggccgcgatttccgcaagaacggcaacggcggaccggggccttacgtggggcaggcaggaaccgccacactgcctcgcaattttcactatccgccagatggctactctcgccattacgaagacggctaccctggcggtagcgataactatggatccctgtccagggtgaccaggattgaggaaaggtacaggcctagcatggaaggctaccgggctccgagccgccaggacgtatacggcccgcagcctcaggttagggttgggggatcatcagttgatctgcatcggtttcaccccgagccctacggcctggaggacgatcaacgttccatgggttatgacgatttagactatggcatgatgagcgactatggaaccgctcgtcgaactggtacaccttctgatcccaggcgaagactgcgctcttacgaagacatgataggagaggaggttccatcagatcaatattactgggcacctctggcacagcatgagcggggttccttggccagtctggactctctgcgaaagggtggtccccctccaccaaactggagacagcccgaacttccagaagtcatagccatgcttgggtttcggcttgatgccgtgaaaagcaatgcagctgcatacctccaacatttatgctatcggaacgataaggttaaaacagacgtccgtaagctcaagggaatccccgtgctggtgggcctgctggaccaccctaagaaagaggttcatctcggagcctgcggcgctttgaagaacatcagtttcggtagggaccaggataataagatcgccattaaaaattgcgatggcgtgcccgctcttgtcaggctgctgagaaaagccagagacatggacttgaccgaagtcattacgggtactctgtggaatttgtccagccatgactctataaaaatggagatcgtcgaccatgccctgcatgcattgactgacgaggtaatcatcccccatagcgggtgggaaagagagcccaacgaagattgcaaacctaggcacatcgaatgggagtcagtcctaactaacacagctggatgtttaagaaacgtttccagtgagcgctcagaagcgcgtcgcaagctgagggagtgcgatggacttgttgatgccctcatcttcatcgtgcaggcagagataggccagaaggacagtgattctaagctcgtggaaaattgcgtttgtcttctccgtaatctttcctatcaggtgcaccgagaaattccccaggctgagcggtaccaagaagctgctcctaatgtggccaataatactggccctcacgctgcctcttgcttcggcgccaagaagggcaaggacgagtggttctcccgggggaagaagcccattgaagatcccgcaaacgataccgtcgattttccaaaacgcacaagtccagcacgcggttacgagcttctcttccagcccgaagtggtgcgaatctatatctcactgctcaaagagagcaaaacgcccgctattctcgaagcaagcgcaggggcaatccagaatctgtgcgcggggcggtggacctacgggcggtatatccgatccgctttgcgtcaagagaaggccttgagcgctattgctgatctattgactaacgagcacgaacgggtagtcaaggccgcctcaggcgccctccgcaacctcgctgtggacgcccggaataaagagctcataggcaagcacgccatccccaacctcgtaaaaaatctgcctggtggacaacagaacagctcctggaacttttccgaagacacagttatcagtatcctaaacaccattaatgaagtaatagctgaaaatctggaggccgccaagaaactgcgggagacccagggtatcgaaaaactcgtcctaatcaacaagtcaggcaaccgcagtgagaaagaggtgagggctgccgctctggtgttgcagacgatctggggatataaggagctgagaaagccattggaaaaagaaggatggaaaaagtcagatttccaggtcaaccttaataacgctagtcggtctcagagcagccacagctatgacgattccacgttgcccctgattgacaggaaccagaaatcagacaagaagcccgatcgggaagaaattcagatgtccaacatgggcagtaatacgaaatccctggacaacaactactctacccctaacgagagaggagaccataaccgaaccttggataggtcgggggatcttggcgatatggagcctttgaaaggcactactcctctgatgcaagacgagggccaggaaagcttggaagaggaactggatgtgcttgtcctggacgacgagggcgggcaggtgtcttatcctagtatgcagaagatctag

SEQ ID NO: 82643 - DNA, 2745 bp, Artificial Sequence
  derived and/or modified sequence
atggccaacggcacattgactcgcaggcaccaaaacggccgtttcgtgggggatgccgacctggaacgccagaaattttcagatctgaaactaaacggccctcaggatcattcgcatcttctatactccaccattccccgtatgcaggagcccggacagattgttgagacttacacagaggaggacccagaaggcgcaatgtccgtcgtgtcagtggagacctcagatgacgggacaactcgaaggaccgaaacaactgtgaagaaagtggtcaagaccgtcaccaccagaactgtacagcctgtagctatgggccctgatggcttgcctgttgacgcatcttctgtgagcaataattacatccagacactcggccgtgattttaggaaaaatggaaatggtggtccgggtccttatgttggacaggccggtacagccactctgcctcgcaactttcactacccacccgacgggtatagtagacactatgaggacggctacccaggcggatccgataattatggtagcctgtcacgagtcacgcgtatagaagaacggtacagacccagtatggaaggctaccgggcaccatctagacaagatgtttatgggcctcagccacaggtgagagtggggggatcgtccgtggacttacatcgcttccaccctgagccatacggacttgaagatgaccagcgaagcatgggatatgatgatctggactacggaatgatgagcgattacggcactgccaggcgaactggcacaccctccgatccccgacgtaggctgagatcgtatgaggatatgatcggcgaagaggtgcctagcgaccagtactattgggcccctctcgcacagcatgagcgcggaagtctggcatctcttgactctcttcgcaagggagggcctcctcccccaaattggcgacagccagagctgccagaggtgattgctatgctgggcttcaggctggatgccgtcaagtcgaacgctgcagcgtacctgcagcatctgtgttatagaaacgataaggtcaaaaccgatgttcggaagctgaaaggtatccccgtgcttgttggcctgctggaccaccccaagaaagaagtccatctgggcgcttgcggagcccttaagaatatctcattcggaagggaccaggacaataagatcgctattaaaaattgtgatggcgtgccagcactggtgcggctcctgcggaaggcacgcgatatggatcttaccgaggtcattacgggcacactctggaatctcagctcacacgacagcataaaaatggaaattgttgaccatgctcttcacgcgttaacagacgaagtgatcattccccattcaggttgggaaagagaacctaacgaggattgtaaacctaggcatatcgaatgggagagcgtgttgacaaacactgccggatgcctaaggaatgtttcctccgaacggtccgaagcacgtcgcaaactcagggaatgtgacggcctggtagacgccctaattttcattgtccaggccgagataggccagaaagattctgattctaaattggtggaaaattgcgtgtgcctgctgcggaatcttagttaccaggttcacagggagattccacaggccgaacgataccaggaagctgcacccaacgtggccaacaatacgggacctcatgccgcttcatgcttcggcgcaaagaaaggaaaggatgaatggttcagccgcggtaaaaagccaatagaggatccagccaatgatactgtggatttccccaagcggacgtcacccgcacggggttatgaattactatttcaacctgaagtggtaagaatctatattagcctactcaaagaatcaaaaacccctgcaatcctggaagcctccgccggtgccatccaaaatttatgcgcgggaaggtggacttatgggagatatatccgaagtgccctccgccaggagaaagccttgtccgctattgcggacttgctgacgaacgagcacgagcgcgttgtcaaagccgcatcaggggcactgcggaatctggccgtagatgcaagaaacaaagagctgatcggtaagcacgccatcccaaacctggttaagaatttaccaggcggtcaacagaacagctcctggaattttagcgaagacacggtgatttccatcctaaacacgatcaatgaggtgatcgccgaaaatctggaggcagctaagaaactgcgcgaaacccaaggcatcgagaaactggtgctgattaataaatctggcaatcgttccgaaaaggaggtgcgtgccgcagcgctggtgcttcagacgatatggggctataaggaactccgcaaacctctcgagaaagaaggctggaagaaaagcgactttcaggttaatcttaataacgccagccgatcgcaaagtagccattcttacgatgactccaccctgcccttgattgaccgcaaccaaaaatccgacaagaagccagacagagaggagattcaaatgagcaacatgggaagcaacactaagagtttggataacaactacagcacccccaatgagcggggtgaccataatcgtacattggacagatccggcgacctaggggatatggaacctttgaaaggcactaccccactgatgcaggacgaaggtcaggagagcttggaggaagaacttgatgtgctggtcttagatgacgaaggcggtcaggtgagttacccttccatgcagaaaatttag

SEQ ID NO: 82644 - DNA, 5832 bp, Artificial Sequence
  derived and/or modified sequence
ctgccagatcagtttgtcaccacccaggctcccttgcctttggctgggtgcaacttccattttaggtgttggatctgagggggaaaaaaaagagagagggagagagagagaaagaagagcaggaaagatcccgaaaggaggaagaggtggcgaaaaatcaactgccctgctggatttgtctttctcagcaccttggcgaagccttgggtttctttcttaaaggactgatttttagaactccacatttgagaacggccggtttgtgggcgatgctgaccttgaaagacagaaattttcagatttgaaactcaacggaccccaggatcacagtcaccttctatatagcaccatccccaggatgcaggagccggggcagattgtggagacctacacggaggaggatcctgagggagccatgtctgtagtctctgtggagacctcagatgatgggaccactcggcgcacagagaccacggtcaagaaagtagtgaagactgtgacaacacggacagtacagccagtcgctatgggaccagacgggttgcctgtggatgcttcatcagtttctaacaactatatccagactttgggtcgtgatttccgcaagaatggcaatgggggacctggtccctatgtggggcaagctggcactgctacccttcctaggaacttccactaccctcctgatggttatagtcgccactatgaagatggttatccaggtggcagtgataactatggcagtctgtcccgggtgacccgcattgaggagcggtataggcccagcatggaaggctaccgggcacctagtagacaggatgtgtatgggccccaaccccaggttcgggtaggtgggagcagcgtggatctgcatcgctttcatccagagccttatgggctagaggatgaccagcgtagtatgggctatgatgacctggattatggtatgatgtctgattatggcactgcccgtcggactgggacaccctctgaccctcgtcggcgcctcaggagctatgaagacatgattggtgaggaggtgccatcggatcaatactactgggctcctttggcccagcatgagcgaggaagtttagcaagcttggatagcctgcgcaaaggagggcctccacctcctaattggagacagccagagctgccagaggtgatcgccatgcttggattccgcttggatgctgtcaagtccaatgcagctgcatacctgcaacacttatgctaccgcaatgacaaggtgaagactgacgtgcggaagctcaagggcatcccagtactggtgggattgttagaccatcccaaaaaggaagtgcaccttggagcctgtggagctctcaagaatatctcttttggacgtgaccaggataacaagattgccataaaaaactgtgatggtgtgcctgcccttgtgcgattgcttcgaaaggctcgtgatatggaccttactgaagttattaccggaaccctgtggaatctttcatcccatgactcaatcaaaatggagattgtggaccatgcactgcatgccttgacagatgaagtgatcattcctcattctggttgggagcgggaacctaatgaagactgtaagccacgccacattgagtgggaatcggtgctcaccaacacagctggctgccttaggaatgtaagctcagagaggagtgaagctcgccggaaacttcgggaatgtgatggtttagttgatgccctcattttcattgttcaggctgagattgggcagaaggattcagacagcaagcttgtagagaactgtgtttgccttcttcggaacttatcatatcaagttcaccgggagatcccacaggcagagcgttaccaagaggcagctcccaatgttgccaacaatactgggccacatgctgccagttgctttggggccaagaagggcaaagatgagtggttctccagagggaaaaaacctatagaggatccagcaaacgatacagtggatttccctaaaagaacgagtccagctcgaggctatgagctcttatttcagccagaggtggttcggatatacatctcacttcttaaggagagcaagactcctgccatcctagaagcctcagctggagctatccagaacttgtgtgctgggcgctggacgtatggtcgatacatccgctctgctctgcgtcaagagaaggctctttctgccatagctgacctcctgactaatgaacatgaacgggtggtgaaagctgcatctggagcactgagaaacctggctgtggatgctcgcaacaaagaattaattggtaaacatgctattcctaacttggtaaagaatctgccaggaggacagcagaactcctcttggaatttctctgaggacactgtcatctctattttgaacactatcaacgaggttatcgctgagaacttggaggctgccaaaaagcttcgagagacacagggtattgagaagctggtgttgatcaacaaatcagggaaccgctcagaaaaagaagttcgagcagcagcacttgtattacagacaatctggggatataaggaactgcggaagccactggaaaaagaaggatggaagaaatcagactttcaggtgaatctaaacaatgcttcccgaagccagagcagtcattcatatgatgatagtactctccctctcattgaccggaaccaaaaatcagataagaaacctgatcgggaagaaattcagatgagcaatatgggatcaaacacaaaatcactagataacaactattccacaccaaatgagagaggagaccacaatagaacactggatcgatcgggggatctaggcgacatggagccattgaagggaacaacacccttgatgcaggacgaggggcaggaatctctggaggaagagttggatgtgttggttttggatgatgaggggggccaagtgtcttacccctccatgcagaagatttagcaccactatctccgttccatctgggcttatatgtacttttattttttggtggtgaaattgactgatgattttcctttttcttcgctggactattgtgccaactgccaggctgcctcctgcccttacagccctaagtggctgccttctttccatcaactcccaacttcttcctgtgaagtttaattgtctcaacgcctccccctcccccattccctccatttttctcccaagaaacctgactcaattatttgcatattttgagaaactgctgcagattagttctttttgccagttttccctggaactcctggccttttgtggaggggagggatggagagaataggaatcttcactagaagccgtgggaagaattggaagttacatgctgtatatgcaatgtccagcagtctgataaactgacgattcttaatcaagatttttttcctgatggggaagggacttttattttcttttagagaggggaaagtgtgagctcttcccttattcctaatggctatttttgaagcaaagaaggccagcaacattggcacatgccacctggcaaaggacccttgagtaagtgaaggtctcctaaaactgggattaagaaaccttgctctcctcatctccaaggcagggaccatcaagaacctacagactccatctcttctgcaagcctcatgccaaccctgggctattgctgctgccccttaaacacaggctgtccttaacccacctctcctgccctgtgatatgtctgctgagttggcctggccatttccaagaggctgtagaaaggggagaatgtcaaggaagacttttggtagagaaggagcagaaagatgtgtttttgggaagaagaagacctctaggaggagctagtaggaatgtacatgaagcaattagtctgaaactggcttccccactcccccgtttctccttttcctatccttataggcctgtcccttgcctctgccctggattggttggcaaactaaaggacttgatgtacataactcctgtcccttttcccttacaaggtggggattgcccctggctttgcctcttctttgtgcctttggcctggggtgcatctcctcccgcccttccatgtgcctttctttgcctctgcagtctcatttctcataattttgcaaattatattttgttgctttcttacctactattggccctaaatagcagaaagaagagaagtgaccgagagaacctcagattcttcattgaggattggtatagccatgatttcagtcatagcaagcttttgctcaacagcatatgggtgggattttgcaaaaatcctattctgatgaatctcaaagtaaggctggtaagagaagtgagtggtgtgactcttactccttaggtgcccagaatttaccatcatctctgaaggagttacagggaagtggtctccccaattctcccctccctccagtattgccccctctcactttagcatatattaattagcaggttgggctagagaaatcagctgctatgcgggttgattattattattatttctaatccttttccttatttgccttctactccccttaatctaatctaaaagctctgttccatgcaactggagttccttatccctctcttccccttcccttatatattgaggctatggggtaggagaaaagtgcacaacccaccaccccctttactcgtgcattaaaatttcttatttacccttttcccccttcccatttcttcccactttcatctaccttttctggcaaaaaggagccttttgctctctgtgaccctaagagcacactgcacagggaaaattgccccatccagacctggctccactcttgatctctcttgtcctcttctgctcttttcctggtgctcttttttctcggtggggtgtgggtaatagaacagccgtgggcttttggggacctttaacttttttttctctcttttgtttataaaaaacactaaacattcaattccagagaaccaaaaatcccaccttcccaccgaacactactaaggggcttgtgttctgctccataccttttctcttttctttctgtcttgttaatgcttttaaaaacaaatgagttttttatataaataaagtttttaaagtgtgtatgtggggggtctgtgtcatttcttcacttcaagctgttatttcttccctgctttgcatctttgttacttccttatgtatcagtgtcctttccagagcaaccagaaggaggttataccaggatttattttgagctcagccccaactctttatcaagcaacattcttgttaactatatgtgaaacattttttcttctgaagattcttaaaaattgaatgtggctgaagttgaacatgggagcttattgctaatttagagataggaaactgaagcataaagaattaatgacttactttaattactggaattcttctgcaacatttgacaaaactaaccttgaataaggcccactgtaatacgtagctctcttaaatataacacttaggactagaagattagaaactaccaatcccaactacgtaataggaaaatgtaggatcaaaaggcccatgtatataagtactgaccactgggccataatgttgcttctcaggctatatgcagtcctttagtcagaagtcaataggcctatttattaatattttacagaccatattacctggattaccagggactatctttgctgcagagatcaagggttaagatctatgggaagatacttatttttctgaggtccttatgtcctgtcatataattaaagactcaagagaatttatgtgaaatgctttctgtatgcccaaatctttagattaaaattatatagctgctcct

SEQ ID NO: 82645 - DNA, 2745 bp, Artificial Sequence
  derived and/or modified sequence
atggccaacggcaccctgaccagaagacaccagaacggcagattcgtgggcgacgccgacctggagagacagaagttcagcgacctgaagctgaacggcccccaggaccacagccacctgctgtacagcaccatccccagaatgcaggagcccggccagatcgtggagacctacaccgaggaggaccccgagggcgccatgagcgtggtgagcgtggagaccagcgacgacggcaccaccagaagaaccgagaccaccgtgaagaaggtggtgaagaccgtgaccaccagaaccgtgcagcccgtggccatgggccccgacggcctgcccgtggacgccagcagcgtgagcaacaactacatccagaccctgggcagagacttcagaaagaacggcaacggcggccccggcccctacgtgggccaggccggcaccgccaccctgcccagaaacttccactacccccccgacggctacagcagacactacgaggacggctaccccggcggcagcgacaactacggcagcctgagcagagtgaccagaatcgaggagagatacagacccagcatggagggctacagagcccccagcagacaggacgtgtacggcccccagccccaggtgagagtgggcggcagcagcgtggacctgcacagattccaccccgagccctacggcctggaggacgaccagagaagcatgggctacgacgacctggactacggcatgatgagcgactacggcaccgccagaagaaccggcacccccagcgaccccagaagaagactgagaagctacgaggacatgatcggcgaggaggtgcccagcgaccagtactactgggcccccctggcccagcacgagagaggcagcctggccagcctggacagcctgagaaagggcggcccccccccccccaactggagacagcccgagctgcccgaggtgatcgccatgctgggcttcagactggacgccgtgaagagcaacgccgccgcctacctgcagcacctgtgctacagaaacgacaaggtgaagaccgacgtgagaaagctgaagggcatccccgtgctggtgggcctgctggaccaccccaagaaggaggtgcacctgggcgcctgcggcgccctgaagaacatcagcttcggcagagaccaggacaacaagatcgccatcaagaactgcgacggcgtgcccgccctggtgagactgctgagaaaggccagagacatggacctgaccgaggtgatcaccggcaccctgtggaacctgagcagccacgacagcatcaagatggagatcgtggaccacgccctgcacgccctgaccgacgaggtgatcatcccccacagcggctgggagagagagcccaacgaggactgcaagcccagacacatcgagtgggagagcgtgctgaccaacaccgccggctgcctgagaaacgtgagcagcgagagaagcgaggccagaagaaagctgagagagtgcgacggcctggtggacgccctgatcttcatcgtgcaggccgagatcggccagaaggacagcgacagcaagctggtggagaactgcgtgtgcctgctgagaaacctgagctaccaggtgcacagagagatcccccaggccgagagataccaggaggccgcccccaacgtggccaacaacaccggcccccacgccgccagctgcttcggcgccaagaagggcaaggacgagtggttcagcagaggcaagaagcccatcgaggaccccgccaacgacaccgtggacttccccaagagaaccagccccgccagaggctacgagctgctgttccagcccgaggtggtgagaatctacatcagcctgctgaaggagagcaagacccccgccatcctggaggccagcgccggcgccatccagaacctgtgcgccggcagatggacctacggcagatacatcagaagcgccctgagacaggagaaggccctgagcgccatcgccgacctgctgaccaacgagcacgagagagtggtgaaggccgccagcggcgccctgagaaacctggccgtggacgccagaaacaaggagctgatcggcaagcacgccatccccaacctggtgaagaacctgcccggcggccagcagaacagcagctggaacttcagcgaggacaccgtgatcagcatcctgaacaccatcaacgaggtgatcgccgagaacctggaggccgccaagaagctgagagagacccagggcatcgagaagctggtgctgatcaacaagagcggcaacagaagcgagaaggaggtgagagccgccgccctggtgctgcagaccatctggggctacaaggagctgagaaagcccctggagaaggagggctggaagaagagcgacttccaggtgaacctgaacaacgccagcagaagccagagcagccacagctacgacgacagcaccctgcccctgatcgacagaaaccagaagagcgacaagaagcccgacagagaggagatccagatgagcaacatgggcagcaacaccaagagcctggacaacaactacagcacccccaacgagagaggcgaccacaacagaaccctggacagaagcggcgacctgggcgacatggagcccctgaagggcaccacccccctgatgcaggacgagggccaggagagcctggaggaggagctggacgtgctggtgctggacgacgagggcggccaggtgagctaccccagcatgcagaagatctag

SEQ ID NO: 82646 - protein, 616 aa, Artificial Sequence
  derived and/or modified sequence
MIGEEVPSDQYYWAPLAQHERGSLASLDSLRKGGPPPPNWRQPELPEVIAMLGFRLDAVKSNAAAYLQHLCYRNDKVKTDVRKLKGIPVLVGLLDHPKKEVHLGACGALKNISFGRDQDNKIAIKNCDGVPALVRLLRKARDMDLTEVITGTLWNLSSHDSIKMEIVDHALHALTDEVIIPHSGWEREPNEDCKPRHIEWESVLTNTAGCLRNVSSERSEARRKLRECDGLVDALIFIVQAEIGQKDSDSKLVENCVCLLRNLSYQVHREIPQAERYQEAAPNVANNTGPHAASCFGAKKGKDEWFSRGKKPIEDPANDTVDFPKRTSPARGYELLFQPEVVRIYISLLKESKTPAILEASAGAIQNLCAGRWTYGRYIRSALRQEKALSAIADLLTNEHERVVKAASGALRNLAVDARNKELIGKHAIPNLVKNLPGGQQNSSWNFSEDTVISILNTINEVIAENLEAAKKLRETQGIEKLVLINKSGNRSEKEVRAAALVLQTIWGYKELRKPLEKEGWKKSDFQVNLNNASRSQSSHSYDDSTLPLIDRNQKSDKKPDREEIQMSNMGSNTKSLDNNYSTPNERGDHNRTLDRSGDLGDMEPLKGTTPLMQKI

SEQ ID NO: 82647 - protein, 838 aa, Artificial Sequence
  derived and/or modified sequence
MQEPGQIVETYTEEDPEGAMSVVSVETSDDGTTRRTETTVKKVVKTVTTRTVQPVAMGPDGLPVDASSVSNNYIQTLGRDFRKNGNGGPGPYVGQAGTATLPRNFHYPPDGYSRHYEDGYPGGSDNYGSLSRVTRIEERYRPSMEGYRAPSRQDVYGPQPQVRVGGSSVDLHRFHPEPYGLEDDQRSMGYDDLDYGMMSDYGTARRTGTPSDPRRRLRSYEDMIGEEVPSDQYYWAPLAQHERGSLASLDSLRKGGPPPPNWRQPELPEVIAMLGFRLDAVKSNAAAYLQHLCYRNDKVKTDVRKLKGIPVLVGLLDHPKKEVHLGACGALKNISFGRDQDNKIAIKNCDGVPALVRLLRKARDMDLTEVITGTLWNLSSHDSIKMEIVDHALHALTDEVIIPHSGWEREPNEDCKPRHIEWESVLTNTAGCLRNVSSERSEARRKLRECDGLVDALIFIVQAEIGQKDSDSKLVENCVCLLRNLSYQVHREIPQAERYQEAAPNVANNTGPHAASCFGAKKGKDEWFSRGKKPIEDPANDTVDFPKRTSPARGYELLFQPEVVRIYISLLKESKTPAILEASAGAIQNLCAGRWTYGRYIRSALRQEKALSAIADLLTNEHERVVKAASGALRNLAVDARNKELIGKHAIPNLVKNLPGGQQNSSWNFSEDTVISILNTINEVIAENLEAAKKLRETQGIEKLVLINKSGNRSEKEVRAAALVLQTIWGYKELRKPLEKEGWKKSDFQVNLNNASRSQSSHSYDDSTLPLIDRNQKSDKKPDREEIQMSNMGSNTKSLDNNYSTPNERGDHNRTLDRSGDLGDMEPLKGTTPLMQKI

SEQ ID NO: 82648 - protein, 885 aa, Artificial Sequence
  derived and/or modified sequence
MANGTLTRRHQNGRFVGDADLERQKFSDLKLNGPQDHSHLLYSTIPRMQEPGQIVETYTEEDPEGAMSVVSVETSDDGTTRRTETTVKKVVKTVTTRTVQPVAMGPDGLPVDASSVSNNYIQTLGRDFRKNGNGGPGPYVGQAGTATLPRNFHYPPDGYSRHYEDGYPGGSDNYGSLSRVTRIEERYRPSMEGYRAPSRQDVYGPQPQVRVGGSSVDLHRFHPEPYGLEDDQRSMGYDDLDYGMMSDYGTARRTGTPSDPRRRLRSYEDMIGEEVPSDQYYWAPLAQHERGSLASLDSLRKGGPPPPNWRQPELPEVIAMLGFRLDAVKSNAAAYLQHLCYRNDKVKTDVRKLKGIPVLVGLLDHPKKEVHLGACGALKNISFGRDQDNKIAIKNCDGVPALVRLLRKARDMDLTEVITGTLWNLSSHDSIKMEIVDHALHALTDEVIIPHSGWEREPNEDCKPRHIEWESVLTNTAGCLRNVSSERSEARRKLRECDGLVDALIFIVQAEIGQKDSDSKLVENCVCLLRNLSYQVHREIPQAERYQEAAPNVANNTGPHAASCFGAKKGKDEWFSRGKKPIEDPANDTVDFPKRTSPARGYELLFQPEVVRIYISLLKESKTPAILEASAGAIQNLCAGRWTYGRYIRSALRQEKALSAIADLLTNEHERVVKAASGALRNLAVDARNKELIGKHAIPNLVKNLPGGQQNSSWNFSEDTVISILNTINEVIAENLEAAKKLRETQGIEKLVLINKSGNRSEKEVRAAALVLQTIWGYKELRKPLEKEGWKKSDFQVNLNNASRSQSSHSYDDSTLPLIDRNQKSDKKPDREEIQMSNMGSNTKSLDNNYSTPNERGDHNRTLDRSGDLGDMEPLKGTTPLMQKI

SEQ ID NO: 82649 - DNA, 2817 bp, Artificial Sequence
  derived and/or modified sequence
atggacgacagcgaggtggaaagtaccgcttctattttagccagtgtcaaggagcaggaggcacagtttgagaagttgaccagggcacttgaagaagaaaggagacacgttagcgcacaattggaacgcgtgagagtcagcccccaagacgcaaacccactgatggccaacggaacactgacgcggcgccaccagaatggacggttcgtgggcgacgctgacctggagaggcagaagttttcagatctcaagctcaacgggccgcaggatcatagccacctgctgtacagtacaattccacggatgcaagagcctggtcaaatcgtagagacgtatacagaggaggacccagagggagccatgtccgtggtctcggtggagacttcggatgatgggaccaccaggaggaccgaaacaacggtgaagaaggttgtgaagacagtcacgaccaggaccgtccagccagtcgcgatgggacccgatgggctccccgtggacgcttctagtgtgtctaacaattacattcagacactgggcagagactttagaaagaacggtaacggcgggcctggaccatacgtagggcaagctggcacagccactttgccgcggaattttcactatccgcccgacgggtactccaggcattatgaagacgggtaccctggcggatcagataattatgggagcctctccagagttacgcggatcgaggagagataccgccccagcatggaggggtatagagccccaagtcgacaggatgtttatggcccccagccacaagttagggtgggtggatcatcggtggatctgcataggtttcacccggaaccttacggcctcgaagacgatcagcgatccatgggatacgacgatctcgactacggaatgatgagtgactatgggaccgcccggagaaccggaacaccttcagatcccagaagacggttgcggtcttacgaggacatgataggagaagaggttccaagcgaccagtactactgggcccccctggcgcagcatgagagaggcagccttgcatcactggattccttgagaaagggcgggccgccacctcctaactggcggcagcccgagctgccggaggtcatagcaatgctcggctttagactcgatgccgtgaagtcaaacgccgctgcctacctgcaacatctgtgctatcgcaacgacaaggttaaaaccgacgtgaggaagctaaaggggattcccgtactagtgggcctcctcgaccacccaaagaaggaagtgcaccttggagcctgcggagcgctgaaaaatatctcttttggccgtgatcaagacaataaaatcgctattaagaattgcgatggcgtgccagctctggtccggttgctccgcaaagcgagagatatggatcttacagaggtcatcaccggcacattgtggaatctcagctcgcacgattcaatcaagatggaaatcgtcgatcatgcattacatgctctgacagacgaggtgataatcccacacagcggttgggagagggagcccaatgaagattgtaagccgcgccatatcgaatgggaaagtgtactgacgaataccgccgggtgtctgcgtaacgtctcatctgaacgctccgaggcacgcaggaagctacgcgagtgcgacgggttagtcgatgcactcatcttcatcgtgcaggccgagatcggccagaaagactctgattcgaaactggtcgaaaattgcgtgtgcttactgcggaatctgagctaccaggtgcatcgggaaatccctcaggcggaacgctatcaggaggccgctcctaatgtcgcgaataatactgggccccatgccgcaagttgttttggggcgaaaaaagggaaggacgagtggttctcgagaggcaagaaaccgattgaggaccctgcaaacgacaccgtggactttccaaaacgtacctcacccgccagaggttatgagcttctgttccaacccgaggtggtacggatttacatcagtctcctgaaagagtctaaaacccccgctattttggaagccagcgccggggcaatccagaacctgtgtgccgggcggtggacatacggccgctatattcgatccgcattgcggcaggaaaaggccctttctgctattgccgatctactcaccaatgagcacgagcgtgtcgtcaaggctgcatctggcgccctgcgcaacctcgccgtggacgccagaaacaaagaactgatcggcaagcacgctattccaaacctcgttaagaacctcccaggtggccagcaaaacagttcttggaatttcagcgaggacacagtcatttctattctgaacacaattaatgaggtaattgcggagaacttggaggcagccaagaagttaagggaaactcaaggtattgagaaattagtgctaattaataaatccgggaacaggagcgaaaaggaagtgcgtgccgccgccttagttctgcagacaatttgggggtataaagagctgcggaagccactggagaaggaaggatggaaaaaatccgattttcaggttaacctgaataatgcgtcccgctcacagtctagccattcctacgatgactccacactgccgctcatcgatcgtaatcagaagtcagacaagaagcctgacagagaggagatccaaatgtctaatatggggagcaatacgaagtccctggataacaactatagcactccgaacgagaggggcgaccataaccggactttggatcgctctggagacctcggcgacatggaacctctgaagggaacaactcctctgatgaaaatctag

SEQ ID NO: 82650 - DNA, 1851 bp, Artificial Sequence
  derived and/or modified sequence
atgatcggagaggaggtgccctccgaccagtattactgggcccccctcgcccaacatgagcgaggttctctcgcttctcttgactctctgcgaaagggtggaccacctcccccgaattggcgacagccagaattaccggaagttatcgccatgctcggttttaggcttgacgccgtgaaatccaatgccgccgcttacctacagcacttgtgttacagaaacgacaaagtgaaaaccgacgtcagaaagctgaaggggatcccagtactggtcggactcctggatcaccccaagaaggaagtacatctgggcgcctgcggagcactgaaaaacatctctttcgggcgcgaccaagataacaaaatcgcaattaagaactgtgacggagtccccgcgcttgtgagacttctgcggaaagccagagacatggatctcaccgaggtgatcaccggaactctgtggaacttgagctcccatgacagcattaaaatggaaattgtcgaccacgctctgcatgcccttacggacgaggttattatcccacattctgggtgggagcgagagcctaatgaggactgtaaaccgcggcatattgaatgggagtctgtactcactaatactgcagggtgcctgcgaaacgtatccagtgaacgttccgaagcaaggaggaaactaagggagtgcgatggcctagttgatgctcttatttttattgtgcaggccgagataggtcaaaaggactccgactcaaagctggtcgagaattgtgtgtgtctcctgcgcaaccttagttaccaagtccatagagagatcccacaggcagagagatatcaggaggccgcacccaatgtggctaataacactgggccccacgctgcctcgtgcttcggggcaaaaaagggaaaagacgagtggttctctcgcggcaagaaaccaatcgaggaccctgccaatgataccgtggatttcccaaagcggaccagccccgccagaggctacgaactcctgtttcaaccagaggtggtccggatctatatttccctgcttaaggagtcaaagacaccagctatcctagaagccagcgcaggcgccattcagaatctgtgtgccggacgctggacctacggaagatatattagatcagccttgaggcaggagaaggcgctgtcagcaatcgccgatttattgaccaacgagcacgaaagagtggtcaaagcagcatcaggagctttgcgtaatttggcagtcgatgctcggaacaaagaactgattggtaagcatgccatcccaaaccttgtgaagaatctgccaggcgggcagcagaactccagttggaatttcagcgaggatacagtgatctcaattctgaataccattaacgaggtaatcgctgagaacctagaggctgccaagaagcttcgcgagacgcagggaattgagaagctcgtgcttatcaacaagtctgggaatcgaagtgaaaaagaggtgcgtgcggctgctctcgtccttcagacaatttggggttacaaggagttacggaagccgcttgagaaggaaggttggaaaaagtcggacttccaggtgaatttgaataacgcatcccgttcgcaaagcagccactcctatgatgatagcacactgcctctgattgatcgcaatcaaaagtctgataagaaacctgatcgggaggaaatccagatgagtaatatgggatccaataccaaatcgctagataataactattccacacccaatgagagaggagatcacaaccggaccctggatcgctcgggggacttgggggacatggagcccctcaagggaactacccccctaatgcaaaaaatctag

SEQ ID NO: 82651 - DNA, 2517 bp, Artificial Sequence
  derived and/or modified sequence
atgcaagagccaggacagatcgtcgaaacatataccgaagaagaccctgagggagctatgtccgtcgtgtccgtggaaacctctgatgatggtacaacgcgccgcactgagaccacagtcaagaaagttgtcaaaaccgtgacaacaaggactgttcaaccagtggccatgggaccagacggtttaccagtggatgcttcgagcgtgtctaacaactacatacagactctggggagggactttcgtaagaacgggaacgggggtccaggaccttacgtggggcaggcagggactgccactttgccacggaacttccattacccaccagatggatattccagacactatgaagacgggtaccctggcggttcagataattatggatctctaagcagagtaactaggatagaagagcgctatcggccgagtatggagggttacagggcaccatcccggcaggatgtatatggaccgcagccccaagtgcgggtcgggggatcctcggtggacttgcaccggttccaccccgaaccatacggtctggaagacgaccaacgtagtatgggttacgatgatctcgattacggcatgatgtccgactatggcacagcccgcagaactggcactccttctgatcctagacggaggctgcggtcctacgaggatatgataggcgaagaggttcctagcgaccagtactactgggctccacttgcccagcatgaacgggggtcgttagcctcactcgattccctgaggaaggggggccctccaccccctaattggagacagcctgaactaccagaagtgatagcaatgttggggttcaggttagacgcagtaaaatccaacgcagcagcatacttgcaacacttgtgttacaggaatgataaggtaaagactgatgtccggaagttgaaagggatcccagtcctggttggtctcttagaccatcccaagaaggaagtgcacctcggagcgtgtggcgccctgaagaatatatcatttggacgggatcaggacaacaagatcgccatcaaaaactgtgatggcgtaccagctctggttagactgctcaggaaggccagagacatggacctcaccgaagtcattacaggcactctttggaacctgtcaagtcatgactcaatcaagatggaaatcgttgaccacgccctccatgccctcacggacgaagttatcatcccgcacagcgggtgggaacgcgagccaaacgaagactgcaaaccaagacatatcgaatgggagtctgtactcacaaacacagcaggatgtctgaggaatgtctcgagcgaacgatcagaggctcgcagaaagcttagggaatgcgatggcctggtggatgcactcatctttatcgtacaggccgagatcggacagaaggactcggacagtaaactcgtcgaaaattgcgtctgtttgctgagaaacctgtcctaccaggttcatagggagataccacaggctgagcgttatcaggaagctgcacctaatgttgctaacaacacgggcccacacgccgcctcttgttttggtgcgaagaaaggaaaagacgaatggttttccagaggtaaaaaacctatagaggaccccgcaaatgacacagttgactttccaaaacgcaccagtccagctcgcggttacgaattgctcttccagcccgaagtagtgcgcatctacatttccctgctaaaggaatccaaaactccagcaattctcgaagcttccgcaggagccatacaaaacctctgtgcggggcgttggacatacggtaggtacatccggtccgccctgagacaagaaaaagctctgtctgcaatcgccgatctgctgacaaatgagcatgagagagtggtaaaagcagcgtccggcgcactacgcaacctcgccgtggatgcccggaataaggagctcatagggaaacatgctataccaaatttggttaaaaatttacctggtgggcagcagaattctagttggaatttcagcgaggacaccgttatttctattctcaacaccataaacgaagttatagcggaaaacctcgaggctgcaaaaaagttacgggaaacccaggggatagagaagctggtgcttatcaacaagagcggcaatcggagcgagaaagaggtaagagcagcagcgcttgtgctgcagacaatctgggggtataaagagctccgcaaacccctcgaaaaggagggttggaagaaatctgatttccaggtgaatctcaacaatgcttctaggagtcaatctagccattcttatgatgacagcacactaccgctgattgataggaatcagaaatcagataagaagcccgaccgagaggagatccagatgtctaatatgggctccaacactaagtcactagacaacaactactctacccctaatgaacgcggggaccataatagaacgctcgatcggagcggcgatcttggggacatggagccactgaaagggaccactcccctgatgcaaaaaatctag

SEQ ID NO: 82652 - DNA, 2658 bp, Artificial Sequence
  derived and/or modified sequence
atggccaacgggactctgaccagaagacaccaaaacggaaggtttgtaggggacgctgaccttgagaggcaaaagtttagcgatttaaagctcaacggaccccaggaccactcacacctgttgtatagcacaattccaagaatgcaggagcccggacagatcgtggaaacctacacagaagaggacccagagggagcgatgagcgttgtgtctgtggaaacttctgacgacggcactaccagaagaactgagacaacagtgaaaaaggtggtaaagacagtcacgacaagaactgtgcagcctgttgccatgggccctgacggcctgcctgttgacgcttcctctgtaagcaataattacatacagactctgggtagggatttcagaaagaacggtaatgggggccccgggccttacgtgggccaggccggaaccgctaccctgccgagaaattttcactacccccctgatggatatagcaggcactatgaggacggctaccccggcggctcagacaattacggatctctgtcgcgtgtaaccagaattgaggaaagatacagaccctctatggaggggtaccgtgcccctagccggcaagatgtctacggcccacagcctcaggtgcgcgtgggaggtagtagcgtcgatcttcaccggttccacccagagccctacggtttagaagacgaccagcgaagtatgggatacgatgacctggactacggaatgatgagtgattacggcacggctcgtcgtacaggaactccctccgaccctaggagacgtttgcgctcttacgaagacatgatcggtgaagaagtccctagtgatcagtactattgggctcccctcgctcagcacgagcgaggaagcctcgcaagccttgatagcctgcggaaggggggcccgcctccacctaattggaggcagcccgaactgcctgaagtgattgccatgctagggttcagactcgatgctgtgaagtcaaacgcagcagcctacttgcaacatctctgctacaggaacgataaggttaaaacagacgtgaggaagttgaagggaatccccgtgctcgtggggttgctcgaccacccaaaaaaggaggtacacctgggggcctgtggagctctgaagaacatatcattcgggcgggatcaggacaacaaaattgcgataaaaaattgcgatggtgtccctgctttagtgcgcctgcttcggaaagctcgagatatggacctgaccgaagtaatcaccggaactctttggaatctgagctctcacgatagcatcaaaatggaaattgttgatcatgcattgcatgccctgaccgatgaagtaataatccctcattcgggctgggagagggaaccgaacgaggactgtaagccacgccatattgaatgggagtccgtgctcacaaacactgcagggtgtctgaggaatgtatcatcagaaaggtccgaagcccggcgtaagctgagagaatgcgacggtctcgtggacgctctgatttttattgtccaggccgagatcggtcagaaagatagcgattctaagttggtggaaaactgtgtctgcctgctccggaatctctcctatcaggtccatcgggaaattccccaggccgagaggtaccaagaggctgcacctaatgtcgccaataacacaggcccgcacgctgccagttgttttggggccaaaaaggggaaagatgagtggttctctcggggaaagaaaccaatagaagacccagcaaatgatactgtggacttccccaaaagaacgtcacctgcacgtggatacgaattattgttccagcccgaagtcgtgcgcatatacatctcactgctgaaggagagtaagacccctgcaatactggaggcgagtgcaggggctattcagaacctttgcgccgggcgctggacttatggtaggtacatccgttcggccttgcggcaggagaaagcactttcagccatcgccgatttgctgactaacgaacatgagagggttgtcaaggcagcctccggagcactaagaaacttggcggtcgacgcacggaataaggagctgattgggaaacatgctattccgaacctggtcaaaaaccttccgggaggacaacagaatagctcatggaatttttctgaagacactgttatcagtatactgaacacaatcaacgaggtcattgcagagaatctagaagctgcgaaaaaattgagggaaacacagggaatcgagaagttggtgctgattaataagtcgggaaacagatctgagaaggaggtccgcgcagctgccctggtgctgcagactatttggggctataaggaactgcgcaagcctttggaaaaagaaggatggaaaaaaagtgacttccaagttaatctgaataatgcctccaggtctcaaagcagccatagttatgatgatagcacactgccattgatcgatcgcaaccaaaaatctgacaaaaagccagatcgagaagaaatacagatgtccaatatgggctcaaacacaaaatcattagataataactacagcactccaaacgagcgaggagatcacaaccggaccctggatcgctcgggtgatctgggtgatatggaaccattaaagggaactacgccacttatgcagaaaatatag

SEQ ID NO: 82653 - DNA, 2817 bp, Artificial Sequence
  derived and/or modified sequence
atggatgacagcgaggtggagagcacagccagcatcctggcctctgtgaaggagcaggaggcccagtttgagaagctgacccgggccctggaggaggagcggcggcacgtgtctgcccagctggagcgggtgcgggtgagcccccaggatgccaaccccctgatggccaacggcaccctgacccggcggcaccagaatggccgctttgtgggagatgctgacctggagcggcagaagttcagtgacctgaagctgaatggcccccaggaccacagccacctgctgtacagcaccatccccaggatgcaggagcccggccagatcgtggagacctacacagaagaagatcctgagggcgccatgtctgtggtgtctgtggagaccagtgatgatggcaccaccaggagaacagagaccaccgtgaagaaggtggtgaagacagtgaccaccaggacagtgcagcctgtggccatgggcccagatggcctgcctgtggatgccagctctgtgagcaacaactacatccagaccctgggccgggacttcaggaagaatggaaatggaggccctggcccctacgtgggccaggccggcacagccaccctgcccaggaacttccactaccccccagatggctacagccgccactatgaagatggctacccaggcggcagtgacaactacggcagcctgagccgggtgaccagaattgaggagcgctaccggcccagcatggagggctaccgggcccccagccggcaggatgtgtatggcccccagccccaggtgcgggtgggcggcagctctgtggacctgcaccgcttccaccctgagccctacggcctggaggatgaccagaggtccatgggctatgatgacctggactatggcatgatgtctgactatggaacagcccggaggacaggcacccccagcgacccccggcggcggctgcggagctatgaggacatgattggagaggaggtgcccagcgaccagtactactgggcccccctggcccagcacgagcggggcagcctggccagcctggacagcctgaggaaaggaggccccccaccacccaactggaggcagcctgagctgcctgaggtgattgccatgctgggcttccggctggatgctgtgaagagcaatgctgctgcctacctgcagcacctgtgctacagaaatgacaaggtgaagacagatgtgaggaagctgaagggcatccctgtgctggtgggcctgctggaccaccccaagaaggaggtgcacctgggcgcctgtggggccctgaagaacatcagctttggccgggaccaggacaacaagatcgccatcaagaactgtgatggagtgcctgccctggtgcggctgctgaggaaggcccgggacatggacctgacagaggtgatcaccggcaccctgtggaacctgagcagccatgacagcatcaagatggagatcgtggaccacgccctgcacgccctgacagatgaagtcatcatcccccacagcggctgggagcgggagcccaatgaagactgcaagcccaggcacatcgagtgggagagcgtgctgaccaacacagctggctgcctgagaaatgtgtcctctgagaggtctgaggcccggaggaagctgcgggagtgtgatggcctggtggatgccctgatcttcatcgtgcaggccgagatcggccagaaggacagcgacagcaagctggtggagaactgtgtgtgcctgctgaggaacctgagctaccaggtgcaccgggagatcccccaggccgagcgctaccaggaggccgcccccaacgtggccaacaacacaggcccccatgctgccagctgctttggagccaagaagggcaaggatgagtggttcagccggggcaagaagcccattgaagatcctgccaatgacacagtggacttccccaagaggaccagccctgcccggggctatgagctgctcttccagcctgaggtggtgcgcatctacatcagcctgctgaaggagagcaagaccccagccatcctggaggccagcgctggggccatccagaacctgtgtgccggccgctggacctacggccgctacatccgcagcgccctgcggcaggagaaggccctgagcgccatcgctgacctgctgaccaatgaacatgagcgggtggtgaaggccgccagcggggccctgaggaacctggccgtggatgccaggaacaaggagctgattggcaagcacgccatccccaacctggtgaagaacctgcccggcggccagcagaacagctcctggaacttcagcgaggacaccgtcatcagcatcctgaacaccatcaatgaggtgattgctgagaacctggaggccgccaagaagctgcgggagacccagggcatcgagaagctggtgctgatcaacaagagcggcaacagaagtgagaaggaggtgcgggccgccgccctggtgctgcagaccatctggggctacaaggagctgaggaagcccctggagaaggagggctggaagaagagtgacttccaggtgaacctgaacaatgccagccgcagccagagcagccacagctatgatgacagcaccctgcccctgattgacaggaaccagaagagtgacaagaagccagaccgggaggagatccagatgagcaacatgggcagcaacaccaagagcctggacaacaactacagcaccccaaatgaaagaggagaccacaacagaaccctggacagaagtggggacctgggggacatggagcccctgaagggcaccacccccctgatgaagatctag

SEQ ID NO: 82654 - DNA, 1851 bp, Artificial Sequence
  derived and/or modified sequence
atgattggagaggaggtgcccagcgaccagtactactgggcccccctggcccagcacgagcggggcagcctggccagcctggacagcctgaggaagggcggccccccaccacccaactggaggcagcctgagctgcctgaggtgattgccatgctgggcttccggctggatgctgtgaagagcaatgctgctgcctacctgcagcacctgtgctacagaaatgacaaggtgaagacagatgtgaggaagctgaagggcatccctgtgctggtgggcctgctggaccaccccaagaaggaggtgcacctgggcgcctgtggggccctgaagaacatcagctttggccgggaccaggacaacaagatcgccatcaagaactgtgatggagtgcctgccctggtgcggctgctgaggaaggcccgggacatggacctgacagaggtgatcaccggcaccctgtggaacctgagcagccatgacagcatcaagatggagatcgtggaccacgccctgcacgccctgacagatgaggtgatcatcccccacagcggctgggagcgggagcccaatgaagactgcaagcccaggcacatcgagtgggagagcgtgctgaccaacacagctggctgcctgagaaatgtgagcagcgagaggtctgaggcccggaggaagctgagagaatgtgatggcctggtggatgccctgatcttcatcgtgcaggccgagatcggccagaaggacagcgacagcaagctggtggagaactgtgtgtgcctgctgaggaacctgagctaccaggtgcaccgggagatcccccaggccgagcgctaccaggaggccgccccaaatgtggccaacaacacaggcccccacgccgccagctgcttcggggccaagaagggcaaggatgagtggttcagccggggcaagaagcccatcgaggaccctgccaatgacacagtggacttccccaagaggaccagccctgcccggggctatgagctgctcttccagcctgaggtggtgcgcatctacatcagcctgctgaaggagagcaagaccccagccatcctggaggccagcgctggggccatccagaacctgtgtgccggccgctggacctacggccgctacatccgcagcgccctgcggcaggagaaggccctgagcgccatcgctgacctgctgaccaatgagcacgagcgggtggtgaaggccgccagcggggccctgaggaacctggccgtggatgccaggaacaaggagctgattggcaagcacgccatccccaacctggtgaagaacctgcccggcggccagcagaacagctcctggaacttctctgaagatactgtcatcagcatcctgaacaccatcaatgaggtgattgctgagaacctggaggccgccaagaagctgcgggagacccagggcatcgagaagctggtgctgatcaacaagagcggcaacagaagtgagaaggaggtgcgggctgctgccctggtgctgcagaccatctggggctacaaggagctgaggaagcccctggagaaggagggctggaagaagagtgacttccaggtgaacctgaacaatgccagccgcagccagagcagccacagctatgatgacagcaccctgcccctgattgacaggaaccagaagagtgacaagaagccagaccgggaggagatccagatgagcaacatgggcagcaacaccaagagcctggacaacaactacagcaccccaaatgaaagaggagaccacaacagaaccctggacagaagtggggacctgggggacatggagcccctgaagggcaccacccccctgatgcagaagatctag

SEQ ID NO: 82655 - DNA, 2517 bp, Artificial Sequence
  derived and/or modified sequence
atgcaggagcccggccagatcgtggagacctacacagaggaggaccctgagggcgccatgtctgtggtgtctgtggagaccagtgatgatggcaccaccaggagaacagagaccaccgtgaagaaggtggtgaagacagtgaccaccaggacagtgcagcctgtggccatgggcccagatggcctgcctgtggatgccagctctgtgagcaacaactacatccagaccctgggccgggacttcaggaagaatggaaatggaggccctggcccctacgtgggccaggccggcacagccaccctgcccaggaacttccactaccccccagatggctacagccgccactatgaagatggctacccaggcggcagtgacaactacggcagcctgagccgggtgacccgcatcgaggagcgctaccggcccagcatggagggctaccgggcccccagccggcaggatgtgtatggcccccagccccaggtgcgggtgggcggcagctctgtggacctgcaccgcttccaccctgagccctacggcctggaggatgaccagaggtccatgggctatgatgacctggactatggcatgatgtctgactatggaacagccaggagaacaggcacccccagcgacccccggcggcggctgcggagctatgaggacatgattggagaggaggtgcccagcgaccagtactactgggcccccctggcccagcacgagcggggcagcctggccagcctggacagcctgaggaagggcggccccccaccacccaactggaggcagcctgagctgcctgaggtgattgccatgctgggcttccggctggatgctgtgaagagcaatgctgctgcctacctgcagcacctgtgctacagaaatgacaaggtgaagacagatgtgaggaagctgaagggcatccctgtgctggtgggcctgctggaccaccccaagaaggaggtgcacctgggcgcctgtggggccctgaagaacatcagctttggccgggaccaggacaacaagatcgccatcaagaactgtgatggagtgcctgccctggtgcggctgctgaggaaggcccgggacatggacctgacagaggtgatcaccggcaccctgtggaacctgagcagccatgacagcatcaagatggagatcgtggaccacgccctgcacgccctgacagatgaggtgatcatcccccacagcggctgggagcgggagcccaatgaagactgcaagcccaggcacatcgagtgggagagcgtgctgaccaacacagctggctgcctgagaaatgtgagcagcgagaggtctgaggcccggaggaagctgagagaatgtgatggcctggtggatgccctgatcttcatcgtgcaggccgagatcggccagaaggacagcgacagcaagctggtggagaactgtgtgtgcctgctgaggaacctgagctaccaggtgcaccgggagatcccccaggccgagcgctaccaggaggccgccccaaatgtggccaacaacacaggcccccacgccgccagctgcttcggggccaagaagggcaaggatgagtggttcagccggggcaagaagcccatcgaggaccctgccaatgacacagtggacttccccaagaggaccagccctgcccggggctatgagctgctcttccagcctgaggtggtgcgcatctacatcagcctgctgaaggagagcaagaccccagccatcctggaggccagcgctggggccatccagaacctgtgtgccggccgctggacctacggccgctacatccgcagcgccctgcggcaggagaaggccctgagcgccatcgctgacctgctgaccaatgagcacgagcgggtggtgaaggccgccagcggggccctgaggaacctggccgtggatgccaggaacaaggagctgattggcaagcacgccatccccaacctggtgaagaacctgcccggcggccagcagaacagctcctggaacttctctgaagatactgtcatcagcatcctgaacaccatcaatgaggtgattgctgagaacctggaggccgccaagaagctgcgggagacccagggcatcgagaagctggtgctgatcaacaagagcggcaacagaagtgagaaggaggtgcgggctgctgccctggtgctgcagaccatctggggctacaaggagctgaggaagcccctggagaaggagggctggaagaagagtgacttccaggtgaacctgaacaatgccagccgcagccagagcagccacagctatgatgacagcaccctgcccctgattgacaggaaccagaagagtgacaagaagccagaccgggaggagatccagatgagcaacatgggcagcaacaccaagagcctggacaacaactacagcaccccaaatgaaagaggagaccacaacagaaccctggacagaagtggggacctgggggacatggagcccctgaagggcaccacccccctgatgcagaagatctag

SEQ ID NO: 82656 - DNA, 2658 bp, Artificial Sequence
  derived and/or modified sequence
atggccaacggcaccctgacccggcggcaccagaatggccgctttgtgggagatgctgacctggagcggcagaagttcagtgacctgaagctgaatggcccccaggaccacagccacctgctgtacagcaccatccccaggatgcaggagcccggccagatcgtggagacctacacagaagaagatcctgagggcgccatgtctgtggtgtctgtggagaccagtgatgatggcaccaccaggagaacagagaccaccgtgaagaaggtggtgaagacagtgaccaccaggacagtgcagcctgtggccatgggcccagatggcctgcctgtggatgccagctctgtgagcaacaactacatccagaccctgggccgggacttcaggaagaatggaaatggaggccctggcccctacgtgggccaggccggcacagccaccctgcccaggaacttccactaccccccagatggctacagccgccactatgaagatggctacccaggcggcagtgacaactacggcagcctgagccgggtgaccagaattgaggagcgctaccggcccagcatggagggctaccgggcccccagccggcaggatgtgtatggcccccagccccaggtgcgggtgggcggcagctctgtggacctgcaccgcttccaccctgagccctacggcctggaggatgaccagaggtccatgggctatgatgacctggactatggcatgatgtctgactatggaacagcccggaggacaggcacccccagcgacccccggcggcggctgcggagctatgaggacatgattggagaggaggtgcccagcgaccagtactactgggcccccctggcccagcacgagcggggcagcctggccagcctggacagcctgaggaaaggaggccccccaccacccaactggaggcagcctgagctgcctgaggtgattgccatgctgggcttccggctggatgctgtgaagagcaatgctgctgcctacctgcagcacctgtgctacagaaatgacaaggtgaagacagatgtgaggaagctgaagggcatccctgtgctggtgggcctgctggaccaccccaagaaggaggtgcacctgggcgcctgtggggccctgaagaacatcagctttggccgggaccaggacaacaagatcgccatcaagaactgtgatggagtgcctgccctggtgcggctgctgaggaaggcccgggacatggacctgacagaggtgatcaccggcaccctgtggaacctgagcagccatgacagcatcaagatggagatcgtggaccacgccctgcacgccctgacagatgaagtcatcatcccccacagcggctgggagcgggagcccaatgaagactgcaagcccaggcacatcgagtgggagagcgtgctgaccaacacagctggctgcctgagaaatgtgtcctctgagaggtctgaggcccggaggaagctgcgggagtgtgatggcctggtggatgccctgatcttcatcgtgcaggccgagatcggccagaaggacagcgacagcaagctggtggagaactgtgtgtgcctgctgaggaacctgagctaccaggtgcaccgggagatcccccaggccgagcgctaccaggaggccgcccccaacgtggccaacaacacaggcccccatgctgccagctgctttggagccaagaagggcaaggatgagtggttcagccggggcaagaagcccattgaagatcctgccaatgacacagtggacttccccaagaggaccagccctgcccggggctatgagctgctcttccagcctgaggtggtgcgcatctacatcagcctgctgaaggagagcaagaccccagccatcctggaggccagcgctggggccatccagaacctgtgtgccggccgctggacctacggccgctacatccgcagcgccctgcggcaggagaaggccctgagcgccatcgctgacctgctgaccaatgaacatgagcgggtggtgaaggccgccagcggggccctgaggaacctggccgtggatgccaggaacaaggagctgattggcaagcacgccatccccaacctggtgaagaacctgcccggcggccagcagaacagctcctggaacttcagcgaggacaccgtcatcagcatcctgaacaccatcaatgaggtgattgctgagaacctggaggccgccaagaagctgcgggagacccagggcatcgagaagctggtgctgatcaacaagagcggcaacagaagtgagaaggaggtgcgggccgccgccctggtgctgcagaccatctggggctacaaggagctgaggaagcccctggagaaggagggctggaagaagagtgacttccaggtgaacctgaacaatgccagccgcagccagagcagccacagctatgatgacagcaccctgcccctgattgacaggaaccagaagagtgacaagaagccagaccgggaggagatccagatgagcaacatgggcagcaacaccaagagcctggacaacaactacagcaccccaaatgaaagaggagaccacaacagaaccctggacagaagtggggacctgggggacatggagcccctgaagggcaccacccccctgatgcagaagatctag

SEQ ID NO: 82657 - DNA, 2817 bp, Artificial Sequence
  derived and/or modified sequence
atggacgacagcgaggtggagagcaccgccagcatcctggccagcgttaaggaacaagaagcccagtttgaaaagctgacacgcgccttagaggaggaacgtcgtcacgtaagcgcgcaactcgaacgtgtcagggtgtctcctcaggatgcaaatccactcatggccaatggaactctaactcgccgccatcagaatgggagattcgtgggtgacgctgatttagaaagacagaaattttccgacttaaagctaaatggcccccaggatcatagccatctgctgtattcaacaatccctcgaatgcaggaacctggccagattgtcgagacatatacagaggaggaccctgaaggggcgatgtccgttgtgtctgtggagacatctgacgatgggaccactagacggacagaaaccaccgtgaaaaaagttgttaaaactgtgactacccggaccgtccagcctgtcgcaatgggccccgacggactccctgtagacgcttcttccgtttcaaacaattacatccaaaccctcggacgggacttccgaaagaatggcaacggaggtccagggccgtatgtgggtcaggcggggaccgctacattacctagaaactttcattatccgccggacggctactctcgtcattacgaagacggataccctggcggatcagataactatggttctctctcgcgggtgacaaggatagaagagagatatagacccagcatggaggggtatcgggctccatctcgccaggatgtttatggccctcagccccaggtgagggtgggtggttcaagcgttgacttacatcgcttccaccccgagccctatgggctggaagatgaccagcgctccatgggatacgacgacctggactacggcatgatgtcagattatggaacggccagacggacaggtacaccttctgaccctcggcgtaggctgagatcctacgaggatatgatcggggaagaggtcccctcggaccagtattactgggccccccttgcgcagcacgagagagggtcattggccagcctcgactctttgcggaagggaggcccgcctccccccaattggcgccagccagagctgccagaggttatcgcgatgcttggctttcggctggacgcagtcaagagcaatgctgcagcctacctgcaacacctgtgctacaggaacgataaagtgaaaaccgacgtgagaaaactgaaggggatcccagtgctcgttgggttgctcgaccaccccaaaaaggaggtacaccttggtgcctgcggggcccttaagaatatcagctttggacgagaccaggacaataagatcgctatcaagaactgtgacggggtgcccgctctcgtgaggctactcaggaaggctcgcgacatggatctaacagaggtgattactgggacgctgtggaatctgtcaagccacgattccatcaaaatggagattgtggaccatgccttgcatgccctgacggatgaagttattatccctcatagtgggtgggagagggagcctaacgaagattgtaagccaagacacattgaatgggagtcggtgctgacgaacaccgcgggctgtttgcggaatgtcagtagcgaacggtcggaagcccggcgaaagctccgtgagtgtgacggcctggtggacgctctgatcttcattgttcaagccgagattgggcaaaaagactcagattcaaaactggtggagaattgcgtctgcctgcttcgcaacttgagttatcaggtgcacagggaaatcccccaggctgagcggtatcaagaggctgcgcctaacgttgccaacaatacgggacctcatgccgcaagttgttttggagctaaaaaaggcaaggatgaatggttcagcagaggaaagaagcccattgaagaccccgccaatgacacagtggacttccccaagaggactagccccgcaaggggctatgaactgttattccagcccgaagttgtgcgaatttacatctccttactcaaggaaagtaagacacctgccatcctggaggcgtctgccggagctattcagaacctgtgcgcaggacgctggacatacggtagatacattcgctctgcgcttagacaggaaaaagccctttccgccattgcagacctcctgacaaacgagcatgaaagagtggtcaaagctgcctccggggcactgcggaatctcgctgtagatgctcgaaacaaggagctgattggaaagcacgcaatccctaatctggttaaaaacttgccaggagggcagcagaatagcagctggaatttctctgaagataccgttatctcgatactgaacaccattaatgaggtgatagctgagaatctggaggctgcaaaaaaactcagagagacccaaggtattgagaagttggtgctgatcaacaagtcggggaatcggtctgagaaggaggtcagagccgcagcccttgtgctgcagaccatctggggctataaagaactgcggaagcccctcgaaaaagaggggtggaaaaaatccgattttcaagtgaatctgaataatgctagccgctctcagtcgtctcacagttatgatgatagcacactgcccctcatagatcggaaccaaaaatctgataagaaacccgacagagaagagatccagatgtcaaacatgggctcaaacaccaagtctttggataacaactactctactcccaacgaacgcggagatcacaaccggacactggaccggagcggagatctcggcgacatggaacccttaaaggggacgacaccactaatgaagatctag

SEQ ID NO: 82658 - DNA, 1851 bp, Artificial Sequence
  derived and/or modified sequence
atgatcggcgaggaggtgcccagcgaccagtactactgggcccccttggcccagcacgagagaggaagtctggctagcctggattcgttgcggaaaggagggcctcctcctcctaattggcgacaaccagaactaccagaagtaatagcaatgctcggcttcaggcttgatgctgtgaaatccaatgccgctgcttatttgcaacatctgtgctacaggaacgacaaggtaaagaccgacgtgcggaaactcaaagggattcctgtcctggtaggactacttgatcacccgaaaaaggaggttcacttgggcgcctgtggagcactcaaaaatataagcttcggacgggaccaggataataaaatcgcgattaaaaattgtgacggcgtaccagctctggtcagattgcttcggaaagcccgagacatggatctaactgaggttatcactgggacattgtggaatctgtctagtcatgacagcataaagatggaaatcgtggatcacgccctacacgctcttactgatgaagtaattatccctcattccggctgggagagggagcctaacgaggactgtaagcctaggcatatcgaatgggaaagcgtattgaccaacactgctggttgtctaagaaatgtttcttctgagagaagcgaagctcgccgtaagctgcgagagtgtgatggcctcgtagatgcccttatattcatcgtccaggccgaaattgggcaaaaggattctgattctaaactcgtcgaaaattgcgtatgtcttctgcgcaacctctcttaccaggtgcatcgtgaaattccccaggccgaaaggtatcaagaggcagcacctaacgtggctaataacactggtcctcacgcggcttcctgcttcggggcaaagaaggggaaggatgaatggttttcacgaggcaagaagcctattgaggacccagccaacgataccgtggactttccaaagaggacatcacctgctcgggggtacgagttgttgttccagccagaagtcgtcaggatatacattagtctcttgaaggagagtaagactcctgccattctggaagcctccgccggtgccatccaaaatctctgcgccggtcggtggacatatggccgatatatcagaagcgctctgcgtcaggagaaagcactcagcgcaatagcagatctcctgacgaatgaacatgaacgcgtggttaaagccgcttcaggtgccttgagaaacttagccgtggatgccagaaacaaagaactaatcggtaaacacgctatacccaacctggtgaagaacctgcccgggggccagcagaactcttcctggaacttctcagaggataccgtgatctcaattttaaatacaatcaatgaggtgatcgcagaaaacttagaggccgccaaaaaactccgcgagacgcagggtatcgaaaagcttgtcctgatcaacaagtctggaaatcggtcagaaaaggaagtccgcgcagccgcattagtgttgcagaccatttggggttacaaggaactccgaaaaccactggagaaagagggctggaaaaagtccgatttccaggtgaacctcaacaatgccagtcgatcccaaagtagccattcttacgatgactccacgctgccactcatcgacaggaaccagaagtctgacaagaagcccgaccgcgaggagatacaaatgtctaatatgggctccaacaccaagagtctggacaacaactattcaacccctaacgagcgtggagaccataaccgaaccctcgacaggtcaggtgacctgggagacatggaacctctgaagggtaccacgcctcttatgcagaaaatttag

SEQ ID NO: 82659 - DNA, 2517 bp, Artificial Sequence
  derived and/or modified sequence
atgcaggagcccggccagatcgtggagacctacaccgaggaggaccctgaaggggctatgtcagtcgtatcggtggaaacctcagatgacggaacgaccaggaggacggagacaaccgtgaagaaagtagtgaagactgtcaccacacgcactgtgcagccggtcgctatggggcctgatggcctcccagtggatgccagtagtgtatcaaacaactatattcagacgctgggccgggacttcaggaagaacggcaacggtggacctggaccctatgtgggtcaggctgggacagccacattacccagaaatttccattaccctccagacgggtacagccgacattatgaagacgggtacccaggtgggtccgacaattacggaagcctctcacgcgtcacccgcatagaggaacgctatagaccttctatggagggctatagagctccgtctcgtcaggatgtctatggtccacagccacaagtgagggtaggtgggtcatccgtcgatctacatagattccatcctgagccttacggattggaggacgaccagaggtctatgggctatgatgacctcgactacggtatgatgtccgactacggtaccgccaggagaaccgggacaccgtctgatccaagacggcgtctgaggtcttatgaggacatgatcggcgaggaggtgccatcagatcagtattattgggcacctctggcccagcacgaaaggggtagtttggcttccttggactcactgcgaaagggaggccccccccctcctaattggcgacaaccagagctgcctgaggtgatagcaatgctggggttcagattagacgctgttaagtccaatgccgcggcttacctgcagcatctgtgttatcgcaacgataaagtgaagaccgacgtccgcaagttgaaggggatccccgtgctggtgggtctcctcgatcaccctaaaaaggaagtgcacctgggggcttgtggcgcacttaaaaatatctcctttgggcgggaccaggacaataagatcgcaattaagaactgcgatggagttcccgctcttgtgcgcctcttacgaaaggctcgagacatggaccttactgaagtgatcaccggaactctctggaacctgtcttcccatgactccatcaagatggaaatagtcgaccacgccctccatgcacttacagacgaggtaattataccacatagcggttgggaacgcgaaccaaatgaagactgcaaacctaggcatattgaatgggaaagcgttcttactaatactgcaggttgtctgcgtaatgtttcaagcgagaggagtgaggcaaggcggaagctgagggagtgcgatggattggtcgacgcccttattttcatcgtacaggctgaaatcggccagaaggattcagactccaaactagtcgagaactgtgtgtgccttctcaggaacctcagttatcaggtccacagagagattccacaggcggagcggtatcaggaagctgcacccaatgtcgccaacaataccggtccgcatgccgcctcatgcttcggagccaagaagggcaaagacgaatggttctcccggggcaagaagccgatcgaagaccctgctaatgacactgttgactttcccaaaaggacttcccccgctcgaggatatgagctgctgttccagcccgaggttgtgcggatatacatcagtctgctgaaagaaagcaaaaccccagccattctggaggcctctgcaggcgccattcaaaacctctgcgcgggccgttggacctacggtcgctatattagaagcgccctgagacaggaaaaggccctgagcgctatcgccgatctgctcaccaacgagcacgagagggtcgttaaggcagcttctggtgcccttagaaacctggccgtggatgcccggaataaggaattgatagggaaacatgctatccctaatttggtgaagaatctgcctgggggccaacaaaatagcagctggaacttcagcgaagatactgtgatctcgattctcaatactattaacgaggtcattgctgaaaacctcgaggctgccaagaagctgcgggagacacaagggatagagaaacttgttctcatcaacaagagcggcaatcgtagtgagaaggaagttcgagccgccgctctggttctgcagacaatctggggttacaaagagctccggaaaccactcgagaaagagggttggaaaaaaagcgactttcaagttaacctcaacaacgctagccgctcgcaatcatctcacagttatgatgactcaactcttcccttgatcgatcgcaaccagaagtccgataaaaagcccgaccgcgaggaaatacagatgtcaaacatgggttctaacactaagtccttggacaacaactatagtacaccaaacgagcgcggtgatcataatcgcacactggatcggtctggcgacctgggcgatatggagccactgaaaggtactactcctcttatgcagaaaatctag

SEQ ID NO: 82660 - DNA, 2658 bp, Artificial Sequence
  derived and/or modified sequence
atggccaacggcaccctgacccggcggcaccagaacggccggttcgtaggggatgccgatttggagagacagaaattcagcgacttgaaactgaatggacctcaagaccactcacaccttctgtattcaactatacccaggatgcaagagccaggccagatcgtggaaacatacacagaggaggatccagaaggggctatgagcgtagtcagtgtggagacttctgacgatggcactacccgacgcacggagacaaccgtcaaaaaggttgtgaaaaccgtcacgacacgaactgtgcaaccagttgccatgggaccagatgggttaccagtggacgcctctagcgttagtaacaattatatacagactcttggacgtgacttccggaagaacgggaacggtggacctgggccgtacgtaggccaagccggaaccgcaactttgccaaggaacttccattatccaccagacggatactctcgccactacgaggacggctacccaggaggctccgacaactatggtagcttgagccgagtaacccggatcgaggagcgataccggccttccatggagggctatagagccccatccagacaggatgtgtacggtcctcagccccaggtgagagtcggcggaagctctgtcgacctgcacagattccatccagaaccatatggcctcgaggatgatcaacgcagtatggggtacgatgaccttgactacggtatgatgagtgactacgggaccgcaaggaggactgggactccgtctgaccctaggcgccgcctccggtcatacgaagatatgattggagaggaagttccttcagatcagtattattgggctccactggctcaacatgagcgcgggagcctagcatcactagacagtctacgcaaagggggtcctccccctcctaactggcggcagcccgagttgcccgaagttatagcgatgctggggttcaggctggacgcagtaaagtcaaacgctgctgcgtacctgcagcacctgtgttaccgcaacgacaaggtgaagaccgacgtgcggaaactgaaaggcatcccagttctggtggggctgttggatcatcccaaaaaggaagtccatttgggggcctgcggagctctgaagaatatttcatttggtcgcgaccaggacaacaaaatagccatcaagaattgtgacggagtacccgctctggtgcgacttctgcggaaagccagagacatggatctgactgaggtaattacaggtacgctgtggaatttgtcttctcacgacagcataaagatggaaattgtggaccatgcgctccatgccctgacagatgaggtgataattccacacagcgggtgggaacgcgagcccaatgaagactgtaagcctagacacatagagtgggagagcgttttgacaaacacagctggctgcctgagaaatgtgtcctccgagagatctgaggctcggagaaagctgagggaatgcgatgggttggtcgacgccttgattttcatcgtacaggccgagataggccagaaggattccgattctaaactcgtggagaactgcgtgtgcctcctaaggaatctgtcttaccaagtccacagggaaatccctcaggcagaacgatatcaggaagcggctccaaacgtggccaataataccggtcctcacgcagcaagctgttttggagccaaaaagggaaaggacgagtggttctcacgtgggaagaagccaattgaggaccccgcaaacgatacagtcgactttcctaaacggacgtccccggcccgcggttatgaactgctatttcagcctgaggtggtcagaatttatatctccctgttaaaggagtcaaaaaccccagcaatactggaagccagcgcgggcgcaattcaaaatctctgtgccggccggtggacttatggccgatatatccggtctgcactgaggcaggagaaagctctctctgcaatcgcagatctcctaacaaacgagcacgagcgggttgtcaaggccgcatcaggggccttgcggaacctcgccgtggacgctagaaataaggagctgatcggtaagcatgccatccctaacctggtcaaaaacctccccggaggccaacagaacagttcttggaatttctccgaggacaccgttatctctatcctgaacaccataaacgaggtgattgcagagaacctcgaagcagcaaagaaactgagggagacccaagggatcgagaagctagtactgatcaacaagagtggcaaccggtccgagaaggaggtcagggcagcagcccttgttctgcaaaccatttggggatataaagagctgaggaagcccctagaaaaggaaggctggaagaagagcgatttccaggtgaatctgaataatgctagccggagtcagtcctcccactcctatgatgactccactctgcctcttatcgacaggaatcagaagtcagataagaaaccagatagggaggaaatccagatgtctaatatggggtccaacacaaaatccctggacaataactatagcacccctaacgagcgaggggaccataacagaactttggaccggtctggtgatctgggcgacatggagcccctcaaaggcaccactcccttgatgcaaaagatctag

SEQ ID NO: 82661 - DNA, 2817 bp, Artificial Sequence
  derived and/or modified sequence
atggacgacagcgaagtggagtccactgcgtccatccttgcctccgtgaaagaacaagaggctcagttcgagaagctcacccgcgcactggaggaggagcgtaggcatgtatccgcccagttggaaagggttagagtgagcccccaagacgctaaccccctcatggccaatggcacactcactcgcagacatcagaacgggcgtttcgttggggacgcagatctcgaacggcagaagttttccgacttaaagctgaacggtccgcaggatcatagccatctcctatacagcactatcccaaggatgcaagagccaggccagattgtggagacatacacggaggaggacccggagggcgcaatgtcggtggtaagcgtggaaacatctgacgatggtacaactcgcagaacggagacgaccgtcaaaaaagtagtaaaaacggtgactacacggactgtccagcccgtggcaatgggacccgatggattgcctgtggacgcctcatccgtgtctaacaattatattcagactcttggtagggatttccgaaagaatgggaacggaggaccgggtccctatgttgggcaggccggtaccgcaactctgcctagaaattttcactacccacccgacggctattcccgacactatgaggatggctatcctggtggttctgataattatggttccctttctcgcgtcacccgcatcgaagaacgctatagaccgtccatggaagggtacagggccccttccaggcaggacgtttacgggccacagccgcaggttagagtgggaggctcatcggtggatctgcaccggttccacccagagccttacggcctcgaggacgatcagcgtagcatgggatacgacgaccttgattatggtatgatgagtgactacggcactgcacggaggacaggcactccatcagaccccagacgcagattaagatcctacgaagacatgatcggagaggaggtcccgtctgaccaatactattgggcacctctggctcaacacgagcggggaagcctggcaagtttggattcccttaggaagggaggaccgcctccccctaattggagacagccagaactccccgaagtgattgctatgttgggatttcgacttgacgccgtaaaaagcaacgcagctgcatacctgcagcacctgtgctaccgcaatgataaggtgaagactgacgttcgaaagctgaaaggtatcccagtgctggtcggactgcttgaccaccccaagaaggaggtccacctgggggcttgtggggcacttaagaacattagctttggtcgcgaccaagataacaaaatagctatcaagaattgcgatggagttcctgctctggtaaggctccttcggaaagctcgggatatggatctcactgaggtaattaccggtactctgtggaatctctccagtcatgatagcattaagatggaaatagtagatcacgccctgcatgcgttaacggacgaagtaatcattccacacagcggatgggagcgcgagcccaacgaggactgtaaacccaggcacatcgaatgggagtccgtactgactaataccgcaggatgcttacgcaacgtaagctccgaaaggagcgaggcgagaagaaaactgcgggaatgtgacgggctggttgatgctcttatatttattgtacaagccgagattgggcaaaaggattcagattccaaactagttgagaactgtgtgtgcttactgcgaaatctgagttatcaagttcatcgggaaatccctcaagctgagagataccaggaggccgcacctaacgttgccaataacaccggaccccacgcggcatcttgcttcggagcaaagaaaggcaaagacgagtggttcagtcgtggcaaaaagccaatcgaagaccccgcaaacgatacagtcgatttccccaaacggacttctcccgcaaggggttacgaactcctctttcagccagaagtggtgcggatctacatttcactcttaaaagagtccaaaactcccgcaatccttgaagcttcggccggtgcgatccagaacctttgcgccggaaggtggacgtacgggagatacatccggtctgcgttaaggcaggaaaaagcgctgtctgcaattgcggacttgctgactaatgagcacgagagggtggtgaaagccgcttccggcgctttgaggaacctcgcagtagacgcgagaaacaaggaactaattgggaaacacgctatccccaatttagtgaagaacctgcccggaggccagcagaacagtagttggaacttctcagaggatacggtgattagcatactgaatacaatcaatgaagtaatagccgagaacctggaggctgccaaaaagttaagagagacgcaaggaatcgagaaattggtgctaatcaataaaagtggaaaccgctcagagaaggaagtgcgcgctgctgctctcgtgttgcagacaatttggggatataaggagctgcgtaagcctctggagaaggaaggttggaagaaatctgatttccaggttaatctgaacaacgcaagtcggtcccagagttcacacagctacgatgatagtactttacccttgatcgacaggaatcagaagagcgataaaaaacccgacagggaagagatacagatgagcaatatgggatccaacacaaagagcctagacaataattactccacaccaaatgaaaggggcgatcataaccggaccctcgatcgttccggcgatctgggtgatatggaaccattgaagggcacaacaccattgatgaagatctag

SEQ ID NO: 82662 - DNA, 1851 bp, Artificial Sequence
  derived and/or modified sequence
atgatcggagaagaagtgcctagcgaccagtactactgggccccactggcccagcatgaaaggggtagcttggcctcgttagactcactgagaaaagggggaccccctcctcctaactggcgccagcctgagctacccgaagtcatcgccatgctggggttccgcctcgacgccgttaagtcaaacgcagctgcttatctgcagcatctgtgctacagaaacgataaagttaagaccgacgtgagaaagttaaaaggcataccagtgctggtcgggctgctggaccaccctaagaaggaggtccatttaggggcttgtggagccctgaagaacatcagcttcggtcgtgatcaagacaataagatcgctattaagaattgcgatggagtgcctgcactcgtgcgcctcctgcgcaaagctcgggacatggacctgacagaggttatcacaggaacactatggaatctgtccagtcacgatagcattaagatggaaattgttgaccacgcactgcatgcactcacagacgaggtgataatccctcactctggctgggaacgggaacctaatgaagattgtaagccacgccacattgagtgggagtccgtcctaacaaatacagccggatgtctgcgtaatgtgagtagcgaaaggtctgaagcccgtcggaagttaagagaatgcgatgggttggtggatgctcttatctttattgtacaggccgaaattggccagaaggacagtgactccaagctcgtcgagaattgtgtttgcctgctgcgtaatctgagctaccaggtccatcgtgagatcccccaagcagagcgttaccaggaggcagcccctaatgtggcgaacaatacagggcctcacgccgcaagttgctttggtgctaagaaaggcaaggatgagtggttctcaaggggaaagaaaccaatcgaggatcccgctaacgacaccgtcgattttcccaagcgcacctctccagctcggggatatgaactcctgttccagccagaggtggtccggatctacatttccctgctcaaggaatcaaaaaccccagccatcctcgaggcaagcgccggtgcgatccagaacctgtgtgctgggagatggacgtatgggcgatatatccgatctgccctcaggcaggagaaggccctttccgccatcgccgacctcttaacaaatgaacacgagcgcgtcgtgaaggctgcctccggcgcactgcggaatctcgctgttgacgcacgtaacaaagaactcattggcaagcatgcaattccaaacttagtcaaaaatctccccggtggccagcagaattcttcatggaacttctccgaagatacagtcataagcattcttaatactatcaacgaagttatagctgagaatctggaagccgctaaaaagctgagggaaacacaggggatagaaaaactcgtgctgattaacaaatctgggaacaggagtgaaaaagaggtccgtgccgctgccttggtgcttcagacgatttggggatacaaagagctcagaaaaccactggaaaaggagggctggaagaaatctgattttcaggtgaacttgaataatgcatctcgctctcagagctcccactcctatgacgactctacacttcccctcattgatcggaaccagaagtctgacaagaaaccagatagggaagaaatacagatgtctaatatgggatccaatactaaatccttggacaataattatagtaccccaaatgagcgtggtgaccataatcggactttggatcgaagtggcgatttgggggacatggagcccttgaaaggcactacgccactgatgcagaagatctag

SEQ ID NO: 82663 - DNA, 2517 bp, Artificial Sequence
  derived and/or modified sequence
atgcaggaaccaggccaaattgtcgagacatacacagaagaagatcctgagggggctatgtcagtggtaagcgtcgagactagtgacgatggcaccacacgtcgaacagagactactgtcaaaaaagtcgtaaagacagtaacaacgaggaccgtgcagccagtggccatgggccctgatggactgcccgtagacgcttccagtgtttccaacaattacattcaaaccctgggtcgtgactttagaaaaaacggcaatgggggacctggcccatatgtggggcaggctggcaccgcaacactgcccaggaatttccattaccctccagatggttactcaagacactacgaagatggctatcccggaggcagcgataactatggcagtttgtccagagtgactcggattgaggaaagatatcgccctagcatggagggttacagagccccatcaaggcaagacgtctacggacctcaacctcaggtacgagtgggagggagctcggttgacctgcaccgctttcacccggagccctacgggctggaagatgatcagcgctctatgggatacgatgatttggactatggtatgatgtcggattatggtacagctagacgaaccggtacccctagcgatccacgcaggagattacggagttacgaggatatgatcggtgaggaagtcccctccgaccagtactactgggctcctctggctcaacatgaacgcggatctttagcatctctggattccttgagaaagggtgggcctccgcctcccaactggagacagcccgaactgccagaagtaatcgccatgttggggttccgactggatgccgtgaagtcaaatgccgctgcttatctccagcatctctgctatcgaaacgataaagtgaaaactgatgtaaggaagcttaagggaatccctgtcctggtagggctgttggatcaccccaagaaggaggtacatctgggcgcatgtggggcactgaaaaatattagcttcgggcgagaccaggacaacaagattgctatcaagaactgcgatggggtacctgcactggtgaggctattgagaaaggctcgcgacatggatctgacggaggtgatcacggggaccctctggaatctctcctcccacgactccataaaaatggagattgttgatcacgccttacacgccctgaccgacgaggtcatcattcctcattcaggctgggagcgggaacccaacgaggattgtaaaccacgccatatagagtgggagtctgtcctgacaaacactgccggatgcctgcggaatgtgtcgagcgagagaagtgaggctcggagaaaactgcgggaatgtgacgggctcgtggacgcattgattttcattgtccaggccgagattggccagaaggattcagattcaaagttagtcgagaactgcgtttgtctgttgcgtaacctctcatatcaggtgcaccgcgaaatacctcaggccgagcggtatcaagaagccgctccaaatgtggccaataacacaggacctcatgctgcctcttgcttcggcgcaaaaaaggggaaggacgaatggttttctagagggaagaagccgatcgaagatcctgccaacgacacagtggatttccccaagaggacaagcccggctaggggctacgagctgctgtttcaaccagaggtcgtaagaatttatatatccctgctcaaagagagtaagactccggcaatcctagaggcaagtgcaggagctatacagaatttgtgtgccggtcgctggacatacggcagatacatccggtccgccttgcgccaggagaaagccctctccgccatcgcagaccttcttacgaatgagcatgagagagtggtgaaagcagccagtggagcattgcggaacctcgccgtggacgcgaggaacaaggaattaatcggaaaacacgctattcccaatttggtgaaaaacctacccggtggccagcagaactcttcatggaactttagcgaggacacagtcatttcgatcctcaacaccataaacgaagtgatcgccgagaatttggaggccgctaaaaaattacgtgagacacagggcatcgagaaactggtcctgatcaacaaaagtgggaacaggtcagagaaggaagtgagggccgcagcacttgtcttgcagacaatttgggggtataaagagctgcgcaaaccactcgaaaaagaaggttggaaaaaatccgattttcaagtaaacctgaacaacgcctctcgctcacaatcatctcacagttacgacgactcaaccctacctctcattgacagaaaccagaagtctgacaagaagcccgatcgggaggagatccagatgtctaatatgggtagcaataccaagtctctcgacaacaactatagcacaccaaacgagagaggcgaccacaatcgcactctggaccggtcaggcgatctcggggatatggagcccttgaaaggcactacgcccctgatgcaaaagatctag

SEQ ID NO: 82664 - DNA, 2658 bp, Artificial Sequence
  derived and/or modified sequence
atggctaatggaactctgacccggaggcaccagaatggcagattcgtgggagacgccgaccttgagaggcagaaattcagcgatcttaaactgaacggaccacaggaccattcacatctgttgtatagtacaatcccacgtatgcaagagccgggtcagatcgtcgaaacttacactgaagaggatcctgagggcgcaatgtccgtcgtgagtgtggagacctcagacgatgggacaacccgcaggactgagacaacggtcaagaaagttgtgaaaactgtaactaccaggaccgtgcaacccgtggctatggggccagatggcctacctgttgatgcctctagcgtgtcaaacaactacatacagacgcttgggagagacttccgaaaaaatggaaacggagggcctggaccctacgttggccaggcgggaaccgctacactgcctcgtaacttccactaccctcccgacgggtattctcggcattacgaggacggttatcctggcggaagcgacaactatggaagcttgtctagggtaacacggatagaggagaggtatcgccctagtatggaggggtacagggctccttctcggcaggatgtgtatggtccccagcctcaggtgcgggttggaggctcgtctgtcgacctgcacaggtttcacccggagccatacggcctggaagatgaccagcgatccatgggatacgacgacttagactatgggatgatgagtgattacggcactgcccgaaggaccggcacaccttccgaccctcgcagacgtcttcgcagctatgaagatatgatcggtgaggaggtcccgtccgatcaatattattgggcgcctctagctcaacacgaaagagggtctctggcaagcctggatagtctgcggaaaggcggacctcctccacctaactggcgacagcctgagctcccagaagttatagcgatgttgggattcaggctggacgccgttaagtctaacgctgcggcttacctccaacacttatgttacaggaacgataaagttaagaccgatgtccgtaaacttaaagggatccccgtgctcgtggggctgctggatcatccgaagaaggaggttcacttgggtgcctgcggggctctcaaaaacatctccttcgggagggaccaggataataagatcgcaatcaaaaattgtgacggtgttccagcccttgtaaggctcctgcggaaagccagggacatggatttgacggaggtgattactggtacactctggaatctttccagtcatgattctattaagatggagattgtcgatcacgccctgcatgcactgaccgatgaggtaatcatcccacacagtggctgggaacgggagccaaacgaggactgcaaaccaaggcacatcgagtgggaaagtgttttaaccaacactgccggatgtctcagaaatgtctcgtctgaacggtctgaggccaggagaaaactgagagagtgcgacggcttggttgatgccctgatctttatcgtccaggctgagatcggacaaaaagattccgatagcaaattggtggagaactgcgtgtgtctactgaggaacctcagctaccaggtgcaccgagaaataccccaggcagaaaggtaccaggaagccgcacccaacgtggcaaataatacaggtccacacgccgcaagttgctttggtgccaaaaagggaaaagacgaatggttctcccggggaaagaagcccatcgaagaccctgcaaatgacactgtggacttccctaagcgcacatcccctgccagagggtacgaattactctttcagccagaggttgtcagaatctacataagcctgctaaaggaaagcaagactcctgcaattctggaagcatctgccggagctattcagaacctctgtgccggacgatggacttacggacgatacatcaggtcagccctaagacaggaaaaggctctttctgccatagccgacctcctaacaaatgaacacgagcgcgttgtcaaagcagcctcaggtgccttgcggaacctggccgttgacgctcgcaacaaagagctgataggcaaacatgcaatcccgaacctggtcaaaaacctgcctggaggccagcagaatagttcttggaatttcagcgaggatacagtcatcagtatcctcaatactatcaacgaagtaatcgctgagaacctggaggccgcaaaaaagttgagggaaactcagggcatcgagaagctcgtcctcataaataaaagtgggaaccggtctgagaaagaggttcgagcagctgctctcgttctccagacgatatgggggtataaggaattacgtaaacccctcgagaaggagggctggaaaaagagcgattttcaagttaacctgaacaatgcctcccggtctcagagcagtcattcttacgacgactctactctcccgctgatcgacagaaaccagaaatccgacaaaaagcccgatcgggaggagatacagatgagtaacatgggctctaacacaaaatctttagataacaattacagtacccccaacgagcgcggagaccacaacaggacattagaccgtagtggcgatttaggggacatggaacctttgaaaggaacaacaccccttatgcagaagatttag

SEQ ID NO: 82665 - DNA, 5188 bp, Artificial Sequence
  derived and/or modified sequence
gagggctgagggaagatggctgggctgcaagaggcagggggatgggcccgtcagggaggaattcttgtgaaagccgtcgtctgcctcagcacttgatgaaaacacaccgaaaaagaggctctctccttcctgcttcctccttgctgtggtggctgggatgcttcttccatgattttttgaatctagactgggctgttctctgtgttaaaccaatcagttgcgaccttctcttaacagtgtgaagtgagggggtctctctccctccttctccttcctctgtgattcaccttcctttttaccctgccctgcggcggctccgccccttaccttcatggacgactcagaggtggagtcgaccgccagcatcttggcctctgtgaaggaacaagaggcccagtttgagaagctgacccgggcgctggaggaggaacggcgccacgtctcggcgcagctggaacgcgtccgggtctcaccacaagatgccaacccactcatggccaacggcacactcacccgccggcatcagaacggccggtttgtgggcgatgctgaccttgaaagacagaaattttcagatttgaaactcaacggaccccaggatcacagtcaccttctatatagcaccatccccaggatgcaggagccggggcagattgtggagacctacacggaggaggatcctgagggagccatgtctgtagtctctgtggagacctcagatgatgggaccactcggcgcacagagaccacggtcaagaaagtagtgaagactgtgacaacacggacagtacagccagtcgctatgggaccagacgggttgcctgtggatgcttcatcagtttctaacaactatatccagactttgggtcgtgatttccgcaagaatggcaatgggggacctggtccctatgtggggcaagctggcactgctacccttcctaggaacttccactaccctcctgatggttatagtcgccactatgaagatggttatccaggtggcagtgataactatggcagtctgtcccgggtgacccgcattgaggagcggtataggcccagcatggaaggctaccgggcacctagtagacaggatgtgtatgggccccaaccccaggttcgggtaggtgggagcagcgtggatctgcatcgctttcatccagagccttatgggctagaggatgaccagcgtagtatgggctatgatgacctggattatggtatgatgtctgattatggcactgcccgtcggactgggacaccctctgaccctcgtcggcgcctcaggagctatgaagacatgattggtgaggaggtgccatcggatcaatactactgggctcctttggcccagcatgagcgaggaagtttagcaagcttggatagcctgcgcaaaggagggcctccacctcctaattggagacagccagagctgccagaggtgatcgccatgcttggattccgcttggatgctgtcaagtccaatgcagctgcatacctgcaacacttatgctaccgcaatgacaaggtgaagactgacgtgcggaagctcaagggcatcccagtactggtgggattgttagaccatcccaaaaaggaagtgcaccttggagcctgtggagctctcaagaatatctcttttggacgtgaccaggataacaagattgccataaaaaactgtgatggtgtgcctgcccttgtgcgattgcttcgaaaggctcgtgatatggaccttactgaagttattaccggaaccctgtggaatctttcatcccatgactcaatcaaaatggagattgtggaccatgcactgcatgccttgacagatgaagtgatcattcctcattctggttgggagcgggaacctaatgaagactgtaagccacgccacattgagtgggaatcggtgctcaccaacacagctggctgccttaggaatgtaagctcagagaggagtgaagctcgccggaaacttcgggaatgtgatggtttagttgatgccctcattttcattgttcaggctgagattgggcagaaggattcagacagcaagcttgtagagaactgtgtttgccttcttcggaacttatcatatcaagttcaccgggagatcccacaggcagagcgttaccaagaggcagctcccaatgttgccaacaatactgggccacatgctgccagttgctttggggccaagaagggcaaagatgagtggttctccagagggaaaaaacctatagaggatccagcaaacgatacagtggatttccctaaaagaacgagtccagctcgaggctatgagctcttatttcagccagaggtggttcggatatacatctcacttcttaaggagagcaagactcctgccatcctagaagcctcagctggagctatccagaacttgtgtgctgggcgctggacgtatggtcgatacatccgctctgctctgcgtcaagagaaggctctttctgccatagctgacctcctgactaatgaacatgaacgggtggtgaaagctgcatctggagcactgagaaacctggctgtggatgctcgcaacaaagaattaattggtaaacatgctattcctaacttggtaaagaatctgccaggaggacagcagaactcctcttggaatttctctgaggacactgtcatctctattttgaacactatcaacgaggttatcgctgagaacttggaggctgccaaaaagcttcgagagacacagggtattgagaagctggtgttgatcaacaaatcagggaaccgctcagaaaaagaagttcgagcagcagcacttgtattacagacaatctggggatataaggaactgcggaagccactggaaaaagaaggatggaagaaatcagactttcaggtgaatctaaacaatgcttcccgaagccagagcagtcattcatatgatgatagtactctccctctcattgaccggaaccaaaaatcagataagaaacctgatcgggaagaaattcagatgagcaatatgggatcaaacacaaaatcactagataacaactattccacaccaaatgagagaggagaccacaatagaacactggatcgatcgggggatctaggcgacatggagccattgaagggaacaacacccttgatgaagatttagcaccactatctccgttccatctgggcttatatgtacttttattttttggtggtgaaattgactgatgattttcctttttcttcgctggactattgtgccaactgccaggctgcctcctgcccttacagccctaagtggctgccttctttccatcaactcccaacttcttcctgtgaagtttaattgtctcaacgcctccccctcccccattccctccatttttctcccaagaaacctgactcaattatttgcatattttgagaaactgctgcagattagttctttttgccagttttccctggaactcctggccttttgtggaggggagggatggagagaataggaatcttcactagaagccgtgggaagaattggaagttacatgctgtatatgcaatgtccagcagtctgataaactgacgattcttaatcaagatttttttcctgatggggaagggacttttattttcttttagagaggggaaagtgtgagctcttcccttattcctaatggctatttttgaagcaaagaaggccagcaacattggcacatgccacctggcaaaggacccttgagtaagtgaaggtctcctaaaactgggattaagaaaccttgctctcctcatctccaaggcagggaccatcaagaacctacagactccatctcttctgcaagcctcatgccaaccctgggctattgctgctgccccttaaacacaggctgtccttaacccacctctcctgccctgtgatatgtctgctgagttggcctggccatttccaagaggctgtagaaaggggagaatgtcaaggaagacttttggtagagaaggagcagaaagatgtgtttttgggaagaagaagacctctaggaggagctagtaggaatgtacatgaagcaattagtctgaaactggcttccccactcccccgtttctccttttcctatccttataggcctgtcccttgcctctgccctggattggttggcaaactaaaggacttgatgtacataactcctgtcccttttcccttacaaggtggggattgcccctggctttgcctcttctttgtgcctttggcctggggtgcatctcctcccgcccttccatgtgcctttctttgcctctgcagtctcatttctcataattttgcaaattatattttgttgctttcttacctactattggccctaaatagcagaaagaagagaagtgaccgagagaacctcagattcttcattgaggattggtatagccatgatttcagtcatagcaagcttttgctcaacagcatatgggtgggattttgcaaaaatcctattctgatgaatctcaaagtaaggctggtaagagaagtgagtggtgtgactcttactccttaggtgcccagaatttaccatcatctctgaaggagttacagggaagtggtctccccaattctcccctccctccagtattgccccctctcactttagcatatattaattagcaggttgggctagagaaatcagctgctatgcgggttgattattattattatttctaatccttttccttatttgccttctactccccttaatctaatctaaaagctctgttccatgcaactggagttccttatccctctcttccccttcccatttcttcccactttcatctaccttttctggcaaaaaggagccttttgctctctgtgaccctaagagcacactgcacagggaaaattgccccatccagacctggctccactcttgatctctcttgtcctcttctgctcttttcctggtgctcttttttctcggtggggtgtgggtaatagaacagccgtgggcttttggggacctttaacttttttttctctcttttgtttataaaaaacactaaacattcaattccagagaaccaaaaatcccaccttcccaccgaacactactaaggggcttgtgttctgctccataccttttctcttttctttctgtcttgttaatgcttttaaaaacaaatgagttttttatataaataaagtttttaaagtgtg

SEQ ID NO: 82666 - DNA, 4984 bp, Artificial Sequence
  derived and/or modified sequence
ctgccagatcagtttgtcaccacccaggctcccttgcctttggctgggtgcaacttccattttaggtgttggatctgagggggaaaaaaaagagagagggagagagagagaaagaagagcaggaaagatcccgaaaggaggaagaggtggcgaaaaatcaactgccctgctggatttgtctttctcagcaccttggcgaagccttgggtttctttcttaaaggactgatttttagaactccacatttgaggagctatgaagacatgattggtgaggaggtgccatcggatcaatactactgggctcctttggcccagcatgagcgaggaagtttagcaagcttggatagcctgcgcaaaggagggcctccacctcctaattggagacagccagagctgccagaggtgatcgccatgcttggattccgcttggatgctgtcaagtccaatgcagctgcatacctgcaacacttatgctaccgcaatgacaaggtgaagactgacgtgcggaagctcaagggcatcccagtactggtgggattgttagaccatcccaaaaaggaagtgcaccttggagcctgtggagctctcaagaatatctcttttggacgtgaccaggataacaagattgccataaaaaactgtgatggtgtgcctgcccttgtgcgattgcttcgaaaggctcgtgatatggaccttactgaagttattaccggaaccctgtggaatctttcatcccatgactcaatcaaaatggagattgtggaccatgcactgcatgccttgacagatgaagtgatcattcctcattctggttgggagcgggaacctaatgaagactgtaagccacgccacattgagtgggaatcggtgctcaccaacacagctggctgccttaggaatgtaagctcagagaggagtgaagctcgccggaaacttcgggaatgtgatggtttagttgatgccctcattttcattgttcaggctgagattgggcagaaggattcagacagcaagcttgtagagaactgtgtttgccttcttcggaacttatcatatcaagttcaccgggagatcccacaggcagagcgttaccaagaggcagctcccaatgttgccaacaatactgggccacatgctgccagttgctttggggccaagaagggcaaagatgagtggttctccagagggaaaaaacctatagaggatccagcaaacgatacagtggatttccctaaaagaacgagtccagctcgaggctatgagctcttatttcagccagaggtggttcggatatacatctcacttcttaaggagagcaagactcctgccatcctagaagcctcagctggagctatccagaacttgtgtgctgggcgctggacgtatggtcgatacatccgctctgctctgcgtcaagagaaggctctttctgccatagctgacctcctgactaatgaacatgaacgggtggtgaaagctgcatctggagcactgagaaacctggctgtggatgctcgcaacaaagaattaattggtaaacatgctattcctaacttggtaaagaatctgccaggaggacagcagaactcctcttggaatttctctgaggacactgtcatctctattttgaacactatcaacgaggttatcgctgagaacttggaggctgccaaaaagcttcgagagacacagggtattgagaagctggtgttgatcaacaaatcagggaaccgctcagaaaaagaagttcgagcagcagcacttgtattacagacaatctggggatataaggaactgcggaagccactggaaaaagaaggatggaagaaatcagactttcaggtgaatctaaacaatgcttcccgaagccagagcagtcattcatatgatgatagtactctccctctcattgaccggaaccaaaaatcagataagaaacctgatcgggaagaaattcagatgagcaatatgggatcaaacacaaaatcactagataacaactattccacaccaaatgagagaggagaccacaatagaacactggatcgatcgggggatctaggcgacatggagccattgaagggaacaacacccttgatgcagaagatttagcaccactatctccgttccatctgggcttatatgtacttttattttttggtggtgaaattgactgatgattttcctttttcttcgctggactattgtgccaactgccaggctgcctcctgcccttacagccctaagtggctgccttctttccatcaactcccaacttcttcctgtgaagtttaattgtctcaacgcctccccctcccccattccctccatttttctcccaagaaacctgactcaattatttgcatattttgagaaactgctgcagattagttctttttgccagttttccctggaactcctggccttttgtggaggggagggatggagagaataggaatcttcactagaagccgtgggaagaattggaagttacatgctgtatatgcaatgtccagcagtctgataaactgacgattcttaatcaagatttttttcctgatggggaagggacttttattttcttttagagaggggaaagtgtgagctcttcccttattcctaatggctatttttgaagcaaagaaggccagcaacattggcacatgccacctggcaaaggacccttgagtaagtgaaggtctcctaaaactgggattaagaaaccttgctctcctcatctccaaggcagggaccatcaagaacctacagactccatctcttctgcaagcctcatgccaaccctgggctattgctgctgccccttaaacacaggctgtccttaacccacctctcctgccctgtgatatgtctgctgagttggcctggccatttccaagaggctgtagaaaggggagaatgtcaaggaagacttttggtagagaaggagcagaaagatgtgtttttgggaagaagaagacctctaggaggagctagtaggaatgtacatgaagcaattagtctgaaactggcttccccactcccccgtttctccttttcctatccttataggcctgtcccttgcctctgccctggattggttggcaaactaaaggacttgatgtacataactcctgtcccttttcccttacaaggtggggattgcccctggctttgcctcttctttgtgcctttggcctggggtgcatctcctcccgcccttccatgtgcctttctttgcctctgcagtctcatttctcataattttgcaaattatattttgttgctttcttacctactattggccctaaatagcagaaagaagagaagtgaccgagagaacctcagattcttcattgaggattggtatagccatgatttcagtcatagcaagcttttgctcaacagcatatgggtgggattttgcaaaaatcctattctgatgaatctcaaagtaaggctggtaagagaagtgagtggtgtgactcttactccttaggtgcccagaatttaccatcatctctgaaggagttacagggaagtggtctccccaattctcccctccctccagtattgccccctctcactttagcatatattaattagcaggttgggctagagaaatcagctgctatgcgggttgattattattattatttctaatccttttccttatttgccttctactccccttaatctaatctaaaagctctgttccatgcaactggagttccttatccctctcttccccttcccttatatattgaggctatggggtaggagaaaagtgcacaacccaccaccccctttactcgtgcattaaaatttcttatttacccttttcccccttcccatttcttcccactttcatctaccttttctggcaaaaaggagccttttgctctctgtgaccctaagagcacactgcacagggaaaattgccccatccagacctggctccactcttgatctctcttgtcctcttctgctcttttcctggtgctcttttttctcggtggggtgtgggtaatagaacagccgtgggcttttggggacctttaacttttttttctctcttttgtttataaaaaacactaaacattcaattccagagaaccaaaaatcccaccttcccaccgaacactactaaggggcttgtgttctgctccataccttttctcttttctttctgtcttgttaatgcttttaaaaacaaatgagttttttatataaataaagtttttaaagtgtgtatgtggggggtctgtgtcatttcttcacttcaagctgttatttcttccctgctttgcatctttgttacttccttatgtatcagtgtcctttccagagcaaccagaaggaggttataccaggatttattttgagctcagccccaactctttatcaagcaacattcttgttaactatatgtgaaacattttttcttctgaagattcttaaaaattgaatgtggctgaagttgaacatgggagcttattgctaatttagagataggaaactgaagcataaagaattaatgacttactttaattactggaattcttctgcaacatttgacaaaactaaccttgaataaggcccactgtaatacgtagctctcttaaatataacacttaggactagaagattagaaactaccaatcccaactacgtaataggaaaatgtaggatcaaaaggcccatgtatataagtactgaccactgggccataatgttgcttctcaggctatatgcagtcctttagtcagaagtcaataggcctatttattaatattttacagaccatattacctggattaccagggactatctttgctgcagagatcaagggttaagatctatgggaagatacttatttttctgaggtccttatgtcctgtcatataattaaagactcaagagaatttatgtgaaatgctttctgtatgcccaaatctttagattaaaattatatagctgctcct

SEQ ID NO: 82667 - DNA, 5745 bp, Artificial Sequence
  derived and/or modified sequence
ctgccagatcagtttgtcaccacccaggctcccttgcctttggctgggtgcaacttccattttaggtgttggatctgagggggaaaaaaaagagagagggagagagagagaaagaagagcaggaaagatcccgaaaggaggaagaggtggcgaaaaatcaactgccctgctggatttgtctttctcagcaccttggcgaagccttgggtttctttcttaaaggactgatttttagaactccacatttgagaacggccggtttgtgggcgatgctgaccttgaaagacagaaattttcagatttgaaactcaacggaccccaggatcacagtcaccttctatatagcaccatccccaggatgcaggagccggggcagattgtggagacctacacggaggaggatcctgagggagccatgtctgtagtctctgtggagacctcagatgatgggaccactcggcgcacagagaccacggtcaagaaagtagtgaagactgtgacaacacggacagtacagccagtcgctatgggaccagacgggttgcctgtggatgcttcatcagtttctaacaactatatccagactttgggtcgtgatttccgcaagaatggcaatgggggacctggtccctatgtggggcaagctggcactgctacccttcctaggaacttccactaccctcctgatggttatagtcgccactatgaagatggttatccaggtggcagtgataactatggcagtctgtcccgggtgacccgcattgaggagcggtataggcccagcatggaaggctaccgggcacctagtagacaggatgtgtatgggccccaaccccaggttcgggtaggtgggagcagcgtggatctgcatcgctttcatccagagccttatgggctagaggatgaccagcgtagtatgggctatgatgacctggattatggtatgatgtctgattatggcactgcccgtcggactgggacaccctctgaccctcgtcggcgcctcaggagctatgaagacatgattggtgaggaggtgccatcggatcaatactactgggctcctttggcccagcatgagcgaggaagtttagcaagcttggatagcctgcgcaaaggagggcctccacctcctaattggagacagccagagctgccagaggtgatcgccatgcttggattccgcttggatgctgtcaagtccaatgcagctgcatacctgcaacacttatgctaccgcaatgacaaggtgaagactgacgtgcggaagctcaagggcatcccagtactggtgggattgttagaccatcccaaaaaggaagtgcaccttggagcctgtggagctctcaagaatatctcttttggacgtgaccaggataacaagattgccataaaaaactgtgatggtgtgcctgcccttgtgcgattgcttcgaaaggctcgtgatatggaccttactgaagttattaccggaaccctgtggaatctttcatcccatgactcaatcaaaatggagattgtggaccatgcactgcatgccttgacagatgaagtgatcattcctcattctggttgggagcgggaacctaatgaagactgtaagccacgccacattgagtgggaatcggtgctcaccaacacagctggctgccttaggaatgtaagctcagagaggagtgaagctcgccggaaacttcgggaatgtgatggtttagttgatgccctcattttcattgttcaggctgagattgggcagaaggattcagacagcaagcttgtagagaactgtgtttgccttcttcggaacttatcatatcaagttcaccgggagatcccacaggcagagcgttaccaagaggcagctcccaatgttgccaacaatactgggccacatgctgccagttgctttggggccaagaagggcaaagatgagtggttctccagagggaaaaaacctatagaggatccagcaaacgatacagtggatttccctaaaagaacgagtccagctcgaggctatgagctcttatttcagccagaggtggttcggatatacatctcacttcttaaggagagcaagactcctgccatcctagaagcctcagctggagctatccagaacttgtgtgctgggcgctggacgtatggtcgatacatccgctctgctctgcgtcaagagaaggctctttctgccatagctgacctcctgactaatgaacatgaacgggtggtgaaagctgcatctggagcactgagaaacctggctgtggatgctcgcaacaaagaattaattggtaaacatgctattcctaacttggtaaagaatctgccaggaggacagcagaactcctcttggaatttctctgaggacactgtcatctctattttgaacactatcaacgaggttatcgctgagaacttggaggctgccaaaaagcttcgagagacacagggtattgagaagctggtgttgatcaacaaatcagggaaccgctcagaaaaagaagttcgagcagcagcacttgtattacagacaatctggggatataaggaactgcggaagccactggaaaaagaaggatggaagaaatcagactttcaggtgaatctaaacaatgcttcccgaagccagagcagtcattcatatgatgatagtactctccctctcattgaccggaaccaaaaatcagataagaaacctgatcgggaagaaattcagatgagcaatatgggatcaaacacaaaatcactagataacaactattccacaccaaatgagagaggagaccacaatagaacactggatcgatcgggggatctaggcgacatggagccattgaagggaacaacacccttgatgcagaagatttagcaccactatctccgttccatctgggcttatatgtacttttattttttggtggtgaaattgactgatgattttcctttttcttcgctggactattgtgccaactgccaggctgcctcctgcccttacagccctaagtggctgccttctttccatcaactcccaacttcttcctgtgaagtttaattgtctcaacgcctccccctcccccattccctccatttttctcccaagaaacctgactcaattatttgcatattttgagaaactgctgcagattagttctttttgccagttttccctggaactcctggccttttgtggaggggagggatggagagaataggaatcttcactagaagccgtgggaagaattggaagttacatgctgtatatgcaatgtccagcagtctgataaactgacgattcttaatcaagatttttttcctgatggggaagggacttttattttcttttagagaggggaaagtgtgagctcttcccttattcctaatggctatttttgaagcaaagaaggccagcaacattggcacatgccacctggcaaaggacccttgagtaagtgaaggtctcctaaaactgggattaagaaaccttgctctcctcatctccaaggcagggaccatcaagaacctacagactccatctcttctgcaagcctcatgccaaccctgggctattgctgctgccccttaaacacaggctgtccttaacccacctctcctgccctgtgatatgtctgctgagttggcctggccatttccaagaggctgtagaaaggggagaatgtcaaggaagacttttggtagagaaggagcagaaagatgtgtttttgggaagaagaagacctctaggaggagctagtaggaatgtacatgaagcaattagtctgaaactggcttccccactcccccgtttctccttttcctatccttataggcctgtcccttgcctctgccctggattggttggcaaactaaaggacttgatgtacataactcctgtcccttttcccttacaaggtggggattgcccctggctttgcctcttctttgtgcctttggcctggggtgcatctcctcccgcccttccatgtgcctttctttgcctctgcagtctcatttctcataattttgcaaattatattttgttgctttcttacctactattggccctaaatagcagaaagaagagaagtgaccgagagaacctcagattcttcattgaggattggtatagccatgatttcagtcatagcaagcttttgctcaacagcatatgggtgggattttgcaaaaatcctattctgatgaatctcaaagtaaggctggtaagagaagtgagtggtgtgactcttactccttaggtgcccagaatttaccatcatctctgaaggagttacagggaagtggtctccccaattctcccctccctccagtattgccccctctcactttagcatatattaattagcaggttgggctagagaaatcagctgctatgcgggttgattattattattatttctaatccttttccttatttgccttctactccccttaatctaatctaaaagctctgttccatgcaactggagttccttatccctctcttccccttcccttatatattgaggctatggggtaggagaaaagtgcacaacccaccaccccctttactcgtgcattaaaatttcttatttacccttttcccccttcccatttcttcccactttcatctaccttttctggcaaaaaggagccttttgctctctgtgaccctaagagcacactgcacagggaaaattgccccatccagacctggctccactcttgatctctcttgtcctcttctgctcttttcctggtgctcttttttctcggtggggtgtgggtaatagaacagccgtgggcttttggggacctttaacttttttttctctcttttgtttataaaaaacactaaacattcaattccagagaaccaaaaatcccaccttcccaccgaacactactaaggggcttgtgttctgctccataccttttctcttttctttctgtcttgttaatgcttttaaaaacaaatgagttttttatataaataaagtttttaaagtgtgtatgtggggggtctgtgtcatttcttcacttcaagctgttatttcttccctgctttgcatctttgttacttccttatgtatcagtgtcctttccagagcaaccagaaggaggttataccaggatttattttgagctcagccccaactctttatcaagcaacattcttgttaactatatgtgaaacattttttcttctgaagattcttaaaaattgaatgtggctgaagttgaacatgggagcttattgctaatttagagataggaaactgaagcataaagaattaatgacttactttaattactggaattcttctgcaacatttgacaaaactaaccttgaataaggcccactgtaatacgtagctctcttaaatataacacttaggactagaagattagaaactaccaatcccaactacgtaataggaaaatgtaggatcaaaaggcccatgtatataagtactgaccactgggccataatgttgcttctcaggctatatgcagtcctttagtcagaagtcaataggcctatttattaatattttacagaccatattacctggattaccagggactatctttgctgcagagatcaagggttaagatctatgggaagatacttatttttctgaggtccttatgtcctgtcatataattaaagactcaagagaatttatgtgaaatgctttctgtatgcccaaatctttagattaaaattatatagctgctcct

SEQ ID NO: 82668 - DNA, 5925 bp, Artificial Sequence
  derived and/or modified sequence
ctgccagatcagtttgtcaccacccaggctcccttgcctttggctgggtgcaacttccattttaggtgttggatctgagggggaaaaaaaagagagagggagagagagagaaagaagagcaggaaagatcccgaaaggaggaagaggtggcgaaaaatcaactgccctgctggatttgtctttctcagcaccttggcgaagccttgggtttctttcttaaaggactgatttttagaactccacatttgaggtggagtcgaccgccagcatcttggcctctgtgaaggaacaagaggcccagtttgagaagctgacccgggcgctggaggaggaacggcgccacgtctcggcgcagctggaacgcgtccgggtctcaccacaagatgccaacccactcatggccaacggcacactcacccgccggcatcagaacggccggtttgtgggcgatgctgaccttgaaagacagaaattttcagatttgaaactcaacggaccccaggatcacagtcaccttctatatagcaccatccccaggatgcaggagccggggcagattgtggagacctacacggaggaggatcctgagggagccatgtctgtagtctctgtggagacctcagatgatgggaccactcggcgcacagagaccacggtcaagaaagtagtgaagactgtgacaacacggacagtacagccagtcgctatgggaccagacgggttgcctgtggatgcttcatcagtttctaacaactatatccagactttgggtcgtgatttccgcaagaatggcaatgggggacctggtccctatgtggggcaagctggcactgctacccttcctaggaacttccactaccctcctgatggttatagtcgccactatgaagatggttatccaggtggcagtgataactatggcagtctgtcccgggtgacccgcattgaggagcggtataggcccagcatggaaggctaccgggcacctagtagacaggatgtgtatgggccccaaccccaggttcgggtaggtgggagcagcgtggatctgcatcgctttcatccagagccttatgggctagaggatgaccagcgtagtatgggctatgatgacctggattatggtatgatgtctgattatggcactgcccgtcggactgggacaccctctgaccctcgtcggcgcctcaggagctatgaagacatgattggtgaggaggtgccatcggatcaatactactgggctcctttggcccagcatgagcgaggaagtttagcaagcttggatagcctgcgcaaaggagggcctccacctcctaattggagacagccagagctgccagaggtgatcgccatgcttggattccgcttggatgctgtcaagtccaatgcagctgcatacctgcaacacttatgctaccgcaatgacaaggtgaagactgacgtgcggaagctcaagggcatcccagtactggtgggattgttagaccatcccaaaaaggaagtgcaccttggagcctgtggagctctcaagaatatctcttttggacgtgaccaggataacaagattgccataaaaaactgtgatggtgtgcctgcccttgtgcgattgcttcgaaaggctcgtgatatggaccttactgaagttattaccggaaccctgtggaatctttcatcccatgactcaatcaaaatggagattgtggaccatgcactgcatgccttgacagatgaagtgatcattcctcattctggttgggagcgggaacctaatgaagactgtaagccacgccacattgagtgggaatcggtgctcaccaacacagctggctgccttaggaatgtaagctcagagaggagtgaagctcgccggaaacttcgggaatgtgatggtttagttgatgccctcattttcattgttcaggctgagattgggcagaaggattcagacagcaagcttgtagagaactgtgtttgccttcttcggaacttatcatatcaagttcaccgggagatcccacaggcagagcgttaccaagaggcagctcccaatgttgccaacaatactgggccacatgctgccagttgctttggggccaagaagggcaaagatgagtggttctccagagggaaaaaacctatagaggatccagcaaacgatacagtggatttccctaaaagaacgagtccagctcgaggctatgagctcttatttcagccagaggtggttcggatatacatctcacttcttaaggagagcaagactcctgccatcctagaagcctcagctggagctatccagaacttgtgtgctgggcgctggacgtatggtcgatacatccgctctgctctgcgtcaagagaaggctctttctgccatagctgacctcctgactaatgaacatgaacgggtggtgaaagctgcatctggagcactgagaaacctggctgtggatgctcgcaacaaagaattaattggtaaacatgctattcctaacttggtaaagaatctgccaggaggacagcagaactcctcttggaatttctctgaggacactgtcatctctattttgaacactatcaacgaggttatcgctgagaacttggaggctgccaaaaagcttcgagagacacagggtattgagaagctggtgttgatcaacaaatcagggaaccgctcagaaaaagaagttcgagcagcagcacttgtattacagacaatctggggatataaggaactgcggaagccactggaaaaagaaggatggaagaaatcagactttcaggtgaatctaaacaatgcttcccgaagccagagcagtcattcatatgatgatagtactctccctctcattgaccggaaccaaaaatcagataagaaacctgatcgggaagaaattcagatgagcaatatgggatcaaacacaaaatcactagataacaactattccacaccaaatgagagaggagaccacaatagaacactggatcgatcgggggatctaggcgacatggagccattgaagggaacaacacccttgatgcagaagatttagcaccactatctccgttccatctgggcttatatgtacttttattttttggtggtgaaattgactgatgattttcctttttcttcgctggactattgtgccaactgccaggctgcctcctgcccttacagccctaagtggctgccttctttccatcaactcccaacttcttcctgtgaagtttaattgtctcaacgcctccccctcccccattccctccatttttctcccaagaaacctgactcaattatttgcatattttgagaaactgctgcagattagttctttttgccagttttccctggaactcctggccttttgtggaggggagggatggagagaataggaatcttcactagaagccgtgggaagaattggaagttacatgctgtatatgcaatgtccagcagtctgataaactgacgattcttaatcaagatttttttcctgatggggaagggacttttattttcttttagagaggggaaagtgtgagctcttcccttattcctaatggctatttttgaagcaaagaaggccagcaacattggcacatgccacctggcaaaggacccttgagtaagtgaaggtctcctaaaactgggattaagaaaccttgctctcctcatctccaaggcagggaccatcaagaacctacagactccatctcttctgcaagcctcatgccaaccctgggctattgctgctgccccttaaacacaggctgtccttaacccacctctcctgccctgtgatatgtctgctgagttggcctggccatttccaagaggctgtagaaaggggagaatgtcaaggaagacttttggtagagaaggagcagaaagatgtgtttttgggaagaagaagacctctaggaggagctagtaggaatgtacatgaagcaattagtctgaaactggcttccccactcccccgtttctccttttcctatccttataggcctgtcccttgcctctgccctggattggttggcaaactaaaggacttgatgtacataactcctgtcccttttcccttacaaggtggggattgcccctggctttgcctcttctttgtgcctttggcctggggtgcatctcctcccgcccttccatgtgcctttctttgcctctgcagtctcatttctcataattttgcaaattatattttgttgctttcttacctactattggccctaaatagcagaaagaagagaagtgaccgagagaacctcagattcttcattgaggattggtatagccatgatttcagtcatagcaagcttttgctcaacagcatatgggtgggattttgcaaaaatcctattctgatgaatctcaaagtaaggctggtaagagaagtgagtggtgtgactcttactccttaggtgcccagaatttaccatcatctctgaaggagttacagggaagtggtctccccaattctcccctccctccagtattgccccctctcactttagcatatattaattagcaggttgggctagagaaatcagctgctatgcgggttgattattattattatttctaatccttttccttatttgccttctactccccttaatctaatctaaaagctctgttccatgcaactggagttccttatccctctcttccccttcccttatatattgaggctatggggtaggagaaaagtgcacaacccaccaccccctttactcgtgcattaaaatttcttatttacccttttcccccttcccatttcttcccactttcatctaccttttctggcaaaaaggagccttttgctctctgtgaccctaagagcacactgcacagggaaaattgccccatccagacctggctccactcttgatctctcttgtcctcttctgctcttttcctggtgctcttttttctcggtggggtgtgggtaatagaacagccgtgggcttttggggacctttaacttttttttctctcttttgtttataaaaaacactaaacattcaattccagagaaccaaaaatcccaccttcccaccgaacactactaaggggcttgtgttctgctccataccttttctcttttctttctgtcttgttaatgcttttaaaaacaaatgagttttttatataaataaagtttttaaagtgtgtatgtggggggtctgtgtcatttcttcacttcaagctgttatttcttccctgctttgcatctttgttacttccttatgtatcagtgtcctttccagagcaaccagaaggaggttataccaggatttattttgagctcagccccaactctttatcaagcaacattcttgttaactatatgtgaaacattttttcttctgaagattcttaaaaattgaatgtggctgaagttgaacatgggagcttattgctaatttagagataggaaactgaagcataaagaattaatgacttactttaattactggaattcttctgcaacatttgacaaaactaaccttgaataaggcccactgtaatacgtagctctcttaaatataacacttaggactagaagattagaaactaccaatcccaactacgtaataggaaaatgtaggatcaaaaggcccatgtatataagtactgaccactgggccataatgttgcttctcaggctatatgcagtcctttagtcagaagtcaataggcctatttattaatattttacagaccatattacctggattaccagggactatctttgctgcagagatcaagggttaagatctatgggaagatacttatttttctgaggtccttatgtcctgtcatataattaaagactcaagagaatttatgtgaaatgctttctgtatgcccaaatctttagattaaaattatatagctgctcct

SEQ ID NO: 82669 - DNA, 2817 bp, Artificial Sequence
  derived and/or modified sequence
atggacgacagcgaggtggagagcaccgccagcatcctggccagcgtgaaggagcaggaggcccagttcgagaagctgaccagagccctggaggaggagagaagacacgtgagcgcccagctggagagagtgagagtgagcccccaggacgccaaccccctgatggccaacggcaccctgaccagaagacaccagaacggcagattcgtgggcgacgccgacctggagagacagaagttcagcgacctgaagctgaacggcccccaggaccacagccacctgctgtacagcaccatccccagaatgcaggagcccggccagatcgtggagacctacaccgaggaggaccccgagggcgccatgagcgtggtgagcgtggagaccagcgacgacggcaccaccagaagaaccgagaccaccgtgaagaaggtggtgaagaccgtgaccaccagaaccgtgcagcccgtggccatgggccccgacggcctgcccgtggacgccagcagcgtgagcaacaactacatccagaccctgggcagagacttcagaaagaacggcaacggcggccccggcccctacgtgggccaggccggcaccgccaccctgcccagaaacttccactacccccccgacggctacagcagacactacgaggacggctaccccggcggcagcgacaactacggcagcctgagcagagtgaccagaatcgaggagagatacagacccagcatggagggctacagagcccccagcagacaggacgtgtacggcccccagccccaggtgagagtgggcggcagcagcgtggacctgcacagattccaccccgagccctacggcctggaggacgaccagagaagcatgggctacgacgacctggactacggcatgatgagcgactacggcaccgccagaagaaccggcacccccagcgaccccagaagaagactgagaagctacgaggacatgatcggcgaggaggtgcccagcgaccagtactactgggcccccctggcccagcacgagagaggcagcctggccagcctggacagcctgagaaagggcggcccccccccccccaactggagacagcccgagctgcccgaggtgatcgccatgctgggcttcagactggacgccgtgaagagcaacgccgccgcctacctgcagcacctgtgctacagaaacgacaaggtgaagaccgacgtgagaaagctgaagggcatccccgtgctggtgggcctgctggaccaccccaagaaggaggtgcacctgggcgcctgcggcgccctgaagaacatcagcttcggcagagaccaggacaacaagatcgccatcaagaactgcgacggcgtgcccgccctggtgagactgctgagaaaggccagagacatggacctgaccgaggtgatcaccggcaccctgtggaacctgagcagccacgacagcatcaagatggagatcgtggaccacgccctgcacgccctgaccgacgaggtgatcatcccccacagcggctgggagagagagcccaacgaggactgcaagcccagacacatcgagtgggagagcgtgctgaccaacaccgccggctgcctgagaaacgtgagcagcgagagaagcgaggccagaagaaagctgagagagtgcgacggcctggtggacgccctgatcttcatcgtgcaggccgagatcggccagaaggacagcgacagcaagctggtggagaactgcgtgtgcctgctgagaaacctgagctaccaggtgcacagagagatcccccaggccgagagataccaggaggccgcccccaacgtggccaacaacaccggcccccacgccgccagctgcttcggcgccaagaagggcaaggacgagtggttcagcagaggcaagaagcccatcgaggaccccgccaacgacaccgtggacttccccaagagaaccagccccgccagaggctacgagctgctgttccagcccgaggtggtgagaatctacatcagcctgctgaaggagagcaagacccccgccatcctggaggccagcgccggcgccatccagaacctgtgcgccggcagatggacctacggcagatacatcagaagcgccctgagacaggagaaggccctgagcgccatcgccgacctgctgaccaacgagcacgagagagtggtgaaggccgccagcggcgccctgagaaacctggccgtggacgccagaaacaaggagctgatcggcaagcacgccatccccaacctggtgaagaacctgcccggcggccagcagaacagcagctggaacttcagcgaggacaccgtgatcagcatcctgaacaccatcaacgaggtgatcgccgagaacctggaggccgccaagaagctgagagagacccagggcatcgagaagctggtgctgatcaacaagagcggcaacagaagcgagaaggaggtgagagccgccgccctggtgctgcagaccatctggggctacaaggagctgagaaagcccctggagaaggagggctggaagaagagcgacttccaggtgaacctgaacaacgccagcagaagccagagcagccacagctacgacgacagcaccctgcccctgatcgacagaaaccagaagagcgacaagaagcccgacagagaggagatccagatgagcaacatgggcagcaacaccaagagcctggacaacaactacagcacccccaacgagagaggcgaccacaacagaaccctggacagaagcggcgacctgggcgacatggagcccctgaagggcaccacccccctgatgaagatctag

SEQ ID NO: 82670 - DNA, 1851 bp, Artificial Sequence
  derived and/or modified sequence
atgatcggcgaggaggtgcccagcgaccagtactactgggcccccctggcccagcacgagagaggcagcctggccagcctggacagcctgagaaagggcggcccccccccccccaactggagacagcccgagctgcccgaggtgatcgccatgctgggcttcagactggacgccgtgaagagcaacgccgccgcctacctgcagcacctgtgctacagaaacgacaaggtgaagaccgacgtgagaaagctgaagggcatccccgtgctggtgggcctgctggaccaccccaagaaggaggtgcacctgggcgcctgcggcgccctgaagaacatcagcttcggcagagaccaggacaacaagatcgccatcaagaactgcgacggcgtgcccgccctggtgagactgctgagaaaggccagagacatggacctgaccgaggtgatcaccggcaccctgtggaacctgagcagccacgacagcatcaagatggagatcgtggaccacgccctgcacgccctgaccgacgaggtgatcatcccccacagcggctgggagagagagcccaacgaggactgcaagcccagacacatcgagtgggagagcgtgctgaccaacaccgccggctgcctgagaaacgtgagcagcgagagaagcgaggccagaagaaagctgagagagtgcgacggcctggtggacgccctgatcttcatcgtgcaggccgagatcggccagaaggacagcgacagcaagctggtggagaactgcgtgtgcctgctgagaaacctgagctaccaggtgcacagagagatcccccaggccgagagataccaggaggccgcccccaacgtggccaacaacaccggcccccacgccgccagctgcttcggcgccaagaagggcaaggacgagtggttcagcagaggcaagaagcccatcgaggaccccgccaacgacaccgtggacttccccaagagaaccagccccgccagaggctacgagctgctgttccagcccgaggtggtgagaatctacatcagcctgctgaaggagagcaagacccccgccatcctggaggccagcgccggcgccatccagaacctgtgcgccggcagatggacctacggcagatacatcagaagcgccctgagacaggagaaggccctgagcgccatcgccgacctgctgaccaacgagcacgagagagtggtgaaggccgccagcggcgccctgagaaacctggccgtggacgccagaaacaaggagctgatcggcaagcacgccatccccaacctggtgaagaacctgcccggcggccagcagaacagcagctggaacttcagcgaggacaccgtgatcagcatcctgaacaccatcaacgaggtgatcgccgagaacctggaggccgccaagaagctgagagagacccagggcatcgagaagctggtgctgatcaacaagagcggcaacagaagcgagaaggaggtgagagccgccgccctggtgctgcagaccatctggggctacaaggagctgagaaagcccctggagaaggagggctggaagaagagcgacttccaggtgaacctgaacaacgccagcagaagccagagcagccacagctacgacgacagcaccctgcccctgatcgacagaaaccagaagagcgacaagaagcccgacagagaggagatccagatgagcaacatgggcagcaacaccaagagcctggacaacaactacagcacccccaacgagagaggcgaccacaacagaaccctggacagaagcggcgacctgggcgacatggagcccctgaagggcaccacccccctgatgcagaagatctag

SEQ ID NO: 82671 - DNA, 2517 bp, Artificial Sequence
  derived and/or modified sequence
atgcaggagcccggccagatcgtggagacctacaccgaggaggaccccgagggcgccatgagcgtggtgagcgtggagaccagcgacgacggcaccaccagaagaaccgagaccaccgtgaagaaggtggtgaagaccgtgaccaccagaaccgtgcagcccgtggccatgggccccgacggcctgcccgtggacgccagcagcgtgagcaacaactacatccagaccctgggcagagacttcagaaagaacggcaacggcggccccggcccctacgtgggccaggccggcaccgccaccctgcccagaaacttccactacccccccgacggctacagcagacactacgaggacggctaccccggcggcagcgacaactacggcagcctgagcagagtgaccagaatcgaggagagatacagacccagcatggagggctacagagcccccagcagacaggacgtgtacggcccccagccccaggtgagagtgggcggcagcagcgtggacctgcacagattccaccccgagccctacggcctggaggacgaccagagaagcatgggctacgacgacctggactacggcatgatgagcgactacggcaccgccagaagaaccggcacccccagcgaccccagaagaagactgagaagctacgaggacatgatcggcgaggaggtgcccagcgaccagtactactgggcccccctggcccagcacgagagaggcagcctggccagcctggacagcctgagaaagggcggcccccccccccccaactggagacagcccgagctgcccgaggtgatcgccatgctgggcttcagactggacgccgtgaagagcaacgccgccgcctacctgcagcacctgtgctacagaaacgacaaggtgaagaccgacgtgagaaagctgaagggcatccccgtgctggtgggcctgctggaccaccccaagaaggaggtgcacctgggcgcctgcggcgccctgaagaacatcagcttcggcagagaccaggacaacaagatcgccatcaagaactgcgacggcgtgcccgccctggtgagactgctgagaaaggccagagacatggacctgaccgaggtgatcaccggcaccctgtggaacctgagcagccacgacagcatcaagatggagatcgtggaccacgccctgcacgccctgaccgacgaggtgatcatcccccacagcggctgggagagagagcccaacgaggactgcaagcccagacacatcgagtgggagagcgtgctgaccaacaccgccggctgcctgagaaacgtgagcagcgagagaagcgaggccagaagaaagctgagagagtgcgacggcctggtggacgccctgatcttcatcgtgcaggccgagatcggccagaaggacagcgacagcaagctggtggagaactgcgtgtgcctgctgagaaacctgagctaccaggtgcacagagagatcccccaggccgagagataccaggaggccgcccccaacgtggccaacaacaccggcccccacgccgccagctgcttcggcgccaagaagggcaaggacgagtggttcagcagaggcaagaagcccatcgaggaccccgccaacgacaccgtggacttccccaagagaaccagccccgccagaggctacgagctgctgttccagcccgaggtggtgagaatctacatcagcctgctgaaggagagcaagacccccgccatcctggaggccagcgccggcgccatccagaacctgtgcgccggcagatggacctacggcagatacatcagaagcgccctgagacaggagaaggccctgagcgccatcgccgacctgctgaccaacgagcacgagagagtggtgaaggccgccagcggcgccctgagaaacctggccgtggacgccagaaacaaggagctgatcggcaagcacgccatccccaacctggtgaagaacctgcccggcggccagcagaacagcagctggaacttcagcgaggacaccgtgatcagcatcctgaacaccatcaacgaggtgatcgccgagaacctggaggccgccaagaagctgagagagacccagggcatcgagaagctggtgctgatcaacaagagcggcaacagaagcgagaaggaggtgagagccgccgccctggtgctgcagaccatctggggctacaaggagctgagaaagcccctggagaaggagggctggaagaagagcgacttccaggtgaacctgaacaacgccagcagaagccagagcagccacagctacgacgacagcaccctgcccctgatcgacagaaaccagaagagcgacaagaagcccgacagagaggagatccagatgagcaacatgggcagcaacaccaagagcctggacaacaactacagcacccccaacgagagaggcgaccacaacagaaccctggacagaagcggcgacctgggcgacatggagcccctgaagggcaccacccccctgatgcagaagatctag

SEQ ID NO: 82672 - DNA, 2658 bp, Artificial Sequence
  derived and/or modified sequence
atggccaacggcaccctgaccagaagacaccagaacggcagattcgtgggcgacgccgacctggagagacagaagttcagcgacctgaagctgaacggcccccaggaccacagccacctgctgtacagcaccatccccagaatgcaggagcccggccagatcgtggagacctacaccgaggaggaccccgagggcgccatgagcgtggtgagcgtggagaccagcgacgacggcaccaccagaagaaccgagaccaccgtgaagaaggtggtgaagaccgtgaccaccagaaccgtgcagcccgtggccatgggccccgacggcctgcccgtggacgccagcagcgtgagcaacaactacatccagaccctgggcagagacttcagaaagaacggcaacggcggccccggcccctacgtgggccaggccggcaccgccaccctgcccagaaacttccactacccccccgacggctacagcagacactacgaggacggctaccccggcggcagcgacaactacggcagcctgagcagagtgaccagaatcgaggagagatacagacccagcatggagggctacagagcccccagcagacaggacgtgtacggcccccagccccaggtgagagtgggcggcagcagcgtggacctgcacagattccaccccgagccctacggcctggaggacgaccagagaagcatgggctacgacgacctggactacggcatgatgagcgactacggcaccgccagaagaaccggcacccccagcgaccccagaagaagactgagaagctacgaggacatgatcggcgaggaggtgcccagcgaccagtactactgggcccccctggcccagcacgagagaggcagcctggccagcctggacagcctgagaaagggcggcccccccccccccaactggagacagcccgagctgcccgaggtgatcgccatgctgggcttcagactggacgccgtgaagagcaacgccgccgcctacctgcagcacctgtgctacagaaacgacaaggtgaagaccgacgtgagaaagctgaagggcatccccgtgctggtgggcctgctggaccaccccaagaaggaggtgcacctgggcgcctgcggcgccctgaagaacatcagcttcggcagagaccaggacaacaagatcgccatcaagaactgcgacggcgtgcccgccctggtgagactgctgagaaaggccagagacatggacctgaccgaggtgatcaccggcaccctgtggaacctgagcagccacgacagcatcaagatggagatcgtggaccacgccctgcacgccctgaccgacgaggtgatcatcccccacagcggctgggagagagagcccaacgaggactgcaagcccagacacatcgagtgggagagcgtgctgaccaacaccgccggctgcctgagaaacgtgagcagcgagagaagcgaggccagaagaaagctgagagagtgcgacggcctggtggacgccctgatcttcatcgtgcaggccgagatcggccagaaggacagcgacagcaagctggtggagaactgcgtgtgcctgctgagaaacctgagctaccaggtgcacagagagatcccccaggccgagagataccaggaggccgcccccaacgtggccaacaacaccggcccccacgccgccagctgcttcggcgccaagaagggcaaggacgagtggttcagcagaggcaagaagcccatcgaggaccccgccaacgacaccgtggacttccccaagagaaccagccccgccagaggctacgagctgctgttccagcccgaggtggtgagaatctacatcagcctgctgaaggagagcaagacccccgccatcctggaggccagcgccggcgccatccagaacctgtgcgccggcagatggacctacggcagatacatcagaagcgccctgagacaggagaaggccctgagcgccatcgccgacctgctgaccaacgagcacgagagagtggtgaaggccgccagcggcgccctgagaaacctggccgtggacgccagaaacaaggagctgatcggcaagcacgccatccccaacctggtgaagaacctgcccggcggccagcagaacagcagctggaacttcagcgaggacaccgtgatcagcatcctgaacaccatcaacgaggtgatcgccgagaacctggaggccgccaagaagctgagagagacccagggcatcgagaagctggtgctgatcaacaagagcggcaacagaagcgagaaggaggtgagagccgccgccctggtgctgcagaccatctggggctacaaggagctgagaaagcccctggagaaggagggctggaagaagagcgacttccaggtgaacctgaacaacgccagcagaagccagagcagccacagctacgacgacagcaccctgcccctgatcgacagaaaccagaagagcgacaagaagcccgacagagaggagatccagatgagcaacatgggcagcaacaccaagagcctggacaacaactacagcacccccaacgagagaggcgaccacaacagaaccctggacagaagcggcgacctgggcgacatggagcccctgaagggcaccacccccctgatgcagaagatctag

SEQ ID NO: 82673 - DNA, 2727 bp, Artificial Sequence
  derived and/or modified sequence
atggcgaacggcactctgaccagacgccaccagaatggtcgatttgttggtgatgccgacctagagcgacagaagtttagcgatcttaaactgaatggcccacaagatcatagtcatctgctgtacagtacgatcccacggatgcaggaaccaggacaaatcgtggagacgtacacagaagaagaccccgagggtgctatgagcgtggtgtctgtcgagactagcgatgacgggacaaccagacgcactgagactaccgttaaaaaagtcgttaagacagtgaccacccggacagtgcagcccgtcgccatgggcccagatggactccccgtggatgcctccagtgtgtccaacaattatattcagacgctgggaagagattttcgtaagaatggtaatgggggcccaggcccatatgttgggcaagccggtaccgctacactgcctcgtaacttccattacccccctgacggatatagcaggcattacgaagacggttacccaggcggcagcgacaattatgggtctttgtcaagagtgacccggattgaggaacgctaccgcccatcgatggagggctatcgcgcaccatctcgccaagatgtatacggtccacagcctcaggtaagggtgggaggatccagcgtcgatttgcacaggtttcaccctgaaccatatgggctcgaagacgaccagaggtcgatgggatacgatgatctcgattacggtatgatgagcgattacgggaccgctagaaggaccggcacgcctagcgatccacggcgtagactccggtcttatgaggatatgattggtgaggaagtaccctctgaccaatactactgggctccattggcgcaacacgaacggggatctctggcatccctggatagccttcgcaaaggagggcctcctccaccaaattggcgtcagccggaattgcccgaggtgatcgccatgctaggattccgacttgatgccgttaagtcaaatgccgcagcctacttacagcacctgtgctatagaaacgataaggttaaaactgacgtgaggaaactgaaaggcattcccgtgctggtggggctcctcgaccaccctaagaaggaggtccatctcggagcctgcggagctctgaagaatataagctttggccgggatcaggacaacaaaattgccattaagaattgcgatggcgtcccggcactcgtcagacttctccggaaggctcgggatatggacctaaccgaagtgatcaccgggactctgtggaacttatccagccatgacagcatcaaaatggagatcgtggaccatgcactgcacgcccttaccgatgaggttattatcccccactcaggctgggagcgcgagcctaatgaggattgcaagccacgtcacatcgagtgggaatccgtactgacgaataccgctggatgtttgaggaacgtcagttctgagagaagtgaagcccgtcgtaaactccgtgaatgcgatggtttggtcgacgcgctgatattcatagtccaggctgaaatcggacaaaaagactctgatagcaagctggtcgaaaattgtgtttgccttctaagaaatctgagctatcaggtgcatagagaaatcccccaggccgaacgctaccaagaggccgcacctaatgtggccaacaacacagggccacacgccgctagctgctttggcgccaaaaaaggcaagggcaaaaagccaattgaagatcccgccaatgataccgtagactttcccaaacggactagtcccgcacgtggttatgaattgctgtttcagcccgaagtcgtgagaatctatatcagtctgctgaaggaaagtaaaacaccggccattctagaagccagcgccggcgccatacagaacctttgcgcggggcggtggacttacgggcgctatattagatcagctctgagacaagaaaaagccctctcagctatagctgacttgctcaccaatgagcacgagcgagtggtcaaggccgctagtggagccctcaggaacctcgcagtcgatgccagaaacaaagagctcatcgggaaacacgctatcccaaatctggtcaagaacctgccaggaggccaacagaattcctcgtggaattttagcgaagatactgtgatctccattttgaacaccataaacgaggtgatagccgaaaatttagaagccgcaaaaaagttacgcgagactcagggcatcgaaaaattggttctcattaacaagtctggaaacaggagtgagaaggaggtgagggcagcggcattggtgctgcagaccatatggggttacaaagaacttcggaaaccactcgagaaggaggggtggaaaaagagtgatttccaggtcaacctaaacaatgcttcaaggagtcaaagttcacacagctatgatgacagtaccctgccgctgatagatcgtaaccagaagtctgacaaaaaacccgatcgagaggaaatacagatgtcaaacatggggagtaataccaagtcgctcgataataactattctacgcccaacgagaggggggatcataatcgcactcttgacagatctggggacttgggggacatggaacccctgaagggcaccacccctctgatgcaggatgaaggccaggagagtctggaggaggagctggatgtgctcgtgcttgacgacgaggggggccaagtttcttaccccagtatgcaaaaaatctag

SEQ ID NO: 82674 - DNA, 2727 bp, Artificial Sequence
  derived and/or modified sequence
atggccaacggcaccctgacccggcggcaccagaatggccgctttgtgggagatgctgacctggagcggcagaagttcagtgacctgaagctgaatggcccccaggaccacagccacctgctgtacagcaccatccccaggatgcaggagcccggccagatcgtggagacctacacagaagaagatcctgagggcgccatgtctgtggtgtctgtggagaccagtgatgatggcaccaccaggagaacagagaccaccgtgaagaaggtggtgaagacagtgaccaccaggacagtgcagcctgtggccatgggcccagatggcctgcctgtggatgccagctctgtgagcaacaactacatccagaccctgggccgggacttcaggaagaatggaaatggaggccctggcccctacgtgggccaggccggcacagccaccctgcccaggaacttccactaccccccagatggctacagccgccactatgaagatggctacccaggcggcagtgacaactacggcagcctgagccgggtgaccagaattgaggagcgctaccggcccagcatggagggctaccgggcccccagccggcaggatgtgtatggcccccagccccaggtgcgggtgggcggcagctctgtggacctgcaccgcttccaccctgagccctacggcctggaggatgaccagaggtccatgggctatgatgacctggactatggcatgatgtctgactatggaacagcccggaggacaggcacccccagcgacccccggcggcggctgcggagctatgaggacatgattggagaggaggtgcccagcgaccagtactactgggcccccctggcccagcacgagcggggcagcctggccagcctggacagcctgaggaaaggaggccccccaccacccaactggaggcagcctgagctgcctgaggtgattgccatgctgggcttccggctggatgctgtgaagagcaatgctgctgcctacctgcagcacctgtgctacagaaatgacaaggtgaagacagatgtgaggaagctgaagggcatccctgtgctggtgggcctgctggaccaccccaagaaggaggtgcacctgggcgcctgtggggccctgaagaacatcagctttggccgggaccaggacaacaagatcgccatcaagaactgtgatggagtgcctgccctggtgcggctgctgaggaaggcccgggacatggacctgacagaggtgatcaccggcaccctgtggaacctgagcagccatgacagcatcaagatggagatcgtggaccacgccctgcacgccctgacagatgaagtcatcatcccccacagcggctgggagcgggagcccaatgaagactgcaagcccaggcacatcgagtgggagagcgtgctgaccaacacagctggctgcctgagaaatgtgtcctctgagaggtctgaggcccggaggaagctgcgggagtgtgatggcctggtggatgccctgatcttcatcgtgcaggccgagatcggccagaaggacagcgacagcaagctggtggagaactgtgtgtgcctgctgaggaacctgagctaccaggtgcaccgggagatcccccaggccgagcgctaccaggaggccgcccccaacgtggccaacaacacaggcccccatgctgccagctgctttggagccaagaagggcaagggcaagaagcccattgaagatcctgccaatgacacagtggacttccccaagaggaccagccctgcccggggctatgagctgctcttccagcctgaggtggtgcgcatctacatcagcctgctgaaggagagcaagaccccagccatcctggaggccagcgctggggccatccagaacctgtgtgccggccgctggacctacggccgctacatccgcagcgccctgcggcaggagaaggccctgagcgccatcgctgacctgctgaccaatgaacatgagcgggtggtgaaggccgccagcggggccctgaggaacctggccgtggatgccaggaacaaggagctgattggcaagcacgccatccccaacctggtgaagaacctgcccggcggccagcagaacagctcctggaacttcagcgaggacaccgtcatcagcatcctgaacaccatcaatgaggtgattgctgagaacctggaggccgccaagaagctgcgggagacccagggcatcgagaagctggtgctgatcaacaagagcggcaacagaagtgagaaggaggtgcgggccgccgccctggtgctgcagaccatctggggctacaaggagctgaggaagcccctggagaaggagggctggaagaagagtgacttccaggtgaacctgaacaatgccagccgcagccagagcagccacagctatgatgacagcaccctgcccctgattgacaggaaccagaagagtgacaagaagccagaccgggaggagatccagatgagcaacatgggcagcaacaccaagagcctggacaacaactacagcaccccaaatgaaagaggagaccacaacagaaccctggacagaagtggggacctgggggacatggagcccctgaagggcaccacccccctgatgcaggatgagggccaggagagcctggaggaggagctggatgtgctggtgctggatgatgaaggaggccaggtgtcctaccccagcatgcagaagatctag

SEQ ID NO: 82675 - DNA, 2727 bp, Artificial Sequence
  derived and/or modified sequence
atggccaacggcaccctgacccggcggcaccagaacggccggttcgtgggggacgctgatctcgagcggcagaaattctctgatctgaaacttaacggccctcaggatcacagccacttgctgtacagcactattccccggatgcaggaaccgggccagatcgtggagacttacacagaggaggaccccgagggagccatgtccgttgtttcagtcgaaactagtgatgatggaactaccagaagaacagagaccacagtgaagaaggtggtcaagacagtaaccacacggaccgtgcagccagtggctatggggcctgacgggctgccagtcgacgcgtcatctgtatccaataactacatccaaaccctgggcagagactttcggaaaaatggaaacggcggcccaggaccttatgtcgggcaggcgggcaccgctacactgccaagaaacttccattatccccccgatggctactccagacactacgaggacggatatccaggaggatcagacaattacgggagcctctctagagtgacccgcatcgaggagagatacaggccaagcatggaggggtaccgtgctccaagtcgccaggacgtatacggaccgcagccccaggtgcgagtgggtggatcgtcggtagatctgcatcgctttcaccccgagccttatggccttgaagacgaccagcgctctatggggtatgatgatttggactatggaatgatgtcggattacggtaccgcgagacgcacaggcaccccaagtgatccacgaaggcggttacgctcatatgaagacatgattggcgaggaggttccgtctgaccagtattactgggccccgctggcacagcacgaacggggcagtctcgcttccctggactctctgcgcaaggggggccccccccctccaaattggaggcagcctgagcttcccgaagtcattgcaatgttgggctttcgcctggatgctgtaaaaagcaatgcggcagcatacttgcagcacttgtgctaccgcaatgataaagtgaaaacggacgttcgtaagctcaagggcattccagtgctggtgggacttctcgatcaccctaaaaaggaggtccacctcggggcctgcggcgccttaaagaatatttcctttggtcgtgaccaggataacaagatcgccatcaaaaattgtgatggcgtacccgctcttgttcggctacttcggaaagcgagagatatggacctgacagaagtgataacaggtacactgtggaatctctcatctcacgattcaatcaagatggagattgtggatcatgccctccacgccttgactgacgaagtgatcattcctcatagcggctgggagagggaaccaaacgaggattgtaaaccccgccatatcgaatgggagagcgtgttgaccaacactgcaggttgcctgcgcaacgtctcctctgaacggtcagaagcccggagaaaactccgagagtgtgatggattagtggacgctttaatatttatcgttcaggccgaaatcggtcagaaagactcagattccaaactagtggaaaattgcgtgtgtctgctgaggaatttaagttatcaggtgcacagggaaattccacaggcggagcgatatcaggaggctgctcctaatgtcgccaataacactggcccccacgcagcaagctgttttggcgccaagaaggggaaaggtaagaagccaatcgaggatcccgcaaatgacaccgtcgactttccaaaacgcaccagcccagcaagaggctatgagctattgttccaacccgaagtggtacgtatttatattagtctcctgaaggagtctaaaactcctgctattctggaagcaagtgctggggcgatacagaatctgtgcgcaggacgatggacctacggccggtacattcggtctgccctgagacaggagaaagccctgagcgccattgcagacctgttaactaatgaacatgagcgcgtggttaaggctgcaagcggagcccttaggaatttggcagttgatgcacggaacaaagagctcattggaaagcacgcgatacctaatctggttaagaatctgcccggcggtcagcagaacagttcttggaatttttccgaggacaccgtaatctctatcctgaacactataaatgaggtgattgccgaaaaccttgaggctgctaaaaagctgagagagacacagggcattgaaaagctagtgctcattaataaatcgggaaatagatcagaaaaggaagtgcgggctgcagctctcgttctacagaccatttgggggtataaggaactgcggaagcctctcgagaaggagggatggaagaaatccgactttcaggtgaatctcaacaacgcatcaagaagccagtcttctcactcctacgatgactcgaccctgccacttattgatcggaatcagaaatccgacaaaaaacccgacagagaggagatccaaatgtctaacatgggctccaacactaagtcactggataacaattactcgacccctaacgagagaggggaccacaatcgaactctcgaccgttcaggagatctgggggacatggagcctctgaaggggacaacgccattgatgcaggatgaaggacaagagagcctggaagaggaactcgacgtccttgtgctggatgatgaagggggtcaggtgtcctaccccagtatgcagaagatatag

SEQ ID NO: 82676 - DNA, 2727 bp, Artificial Sequence
  derived and/or modified sequence
atggcaaacgggacactgactcggaggcatcaaaatgggcgatttgtcggcgatgctgatttagagcggcaaaaattcagcgacttaaaactgaatggtcctcaggatcattcccatctgctttactcgaccatccccaggatgcaggaacccggacaaatcgtggaaacttataccgaggaggacccagagggggctatgtccgtcgtttccgtggaaacatctgatgatggaaccacccgtaggaccgaaactaccgtgaaaaaggtcgtcaagaccgtaactaccagaacggtccagccggtggcaatgggtccagacggattaccagtcgacgccagctcggtcagtaataattatattcaaacgctcggtagagatttcagaaaaaacggtaacgggggacctgggccatatgtcgggcaggctggcactgcaacgttgcctcggaactttcattatccacctgatggttactcaaggcactatgaagatgggtatccaggcggaagtgataattatgggagtctatcccgtgtaactagaatcgaggaaaggtaccgtccctccatggaaggctatcgggctccgagtagacaggatgtgtacggtccccagcctcaggtgcgggttggaggcagctctgttgatttgcacagatttcaccccgagccctacgggttggaggatgaccagcggagcatgggttacgacgatctcgattacggaatgatgtctgactatggcaccgcacgtagaacaggtaccccctctgaccctagacggagattaagaagctacgaagacatgataggggaggaagtgccttcagatcagtactattgggcgccactggcacagcacgaacgaggaagcttggctagccttgacagtctccgcaaaggcggacctccccctcccaattggcgacagcccgagctgccagaagtaatcgcgatgctggggtttcggcttgacgccgtgaagtccaatgcagccgcatacttacagcatctgtgctatagaaacgacaaagttaagactgatgtgcgaaagctcaaaggcattcctgtcctggtcggtctccttgaccatcccaaaaaggaagtccatctgggagcctgcggcgcactaaagaatatctccttcggaagggatcaagacaataagatcgcgattaaaaactgtgacggagtacccgcactagtgcgcctgcttcgcaaggccagagatatggacctaactgaagtcatcacaggaacactgtggaatctcagcagccatgattccatcaaaatggagattgtggaccatgccctccacgccctcaccgacgaagtcataataccccattcaggatgggaacgggagccaaacgaagattgtaagccacgccacatcgagtgggagtcagtcctcaccaataccgcaggttgtctgagaaacgtctcctctgaaaggtccgaggctagaagaaaactacgtgagtgtgacgggctggtggacgcactcatttttatagtgcaggcagagatcgggcagaaggacagcgatagtaaactggtggagaactgcgtttgccttcttcggaatcttagctatcaggttcacagggaaattccgcaagctgagagatatcaggaggctgctcctaacgtagcgaacaacaccggtccgcacgccgcatcttgctttggagccaaaaagggtaagggtaagaagcccatcgaggatccagcaaacgatacggtggattttcctaagaggacaagtcccgctcgaggatatgaactgctctttcagcctgaagtcgtgaggatttatatctccctgctgaaagagtcgaaaaccccagccatactggaagcctccgccggagcaatccagaatctgtgcgctggacgatggacctacggacggtacattcggagtgcactgaggcaggagaaggctcttagcgcaatcgccgacctgctgaccaacgaacacgagagggttgttaaggccgcttcaggtgcactccggaacctggccgtggacgcgagaaacaaggagctgattgggaaacatgccatcccaaacctggtgaaaaacctccctgggggtcagcagaactcgagttggaacttcagcgaagataccgtgatctccatcctgaacactatcaacgaggtgattgctgagaacctggaagctgccaagaaactccgcgagacacaggggatcgagaagctagtgctaatcaacaaatccggaaaccggtctgagaaagaagtccgagctgctgctctggttttacaaacgatctggggttacaaagagcttaggaaacccctggaaaaggagggttggaaaaagtcggacttccaagttaatctaaacaacgctagccgatcacaaagctctcattcttatgacgacagcactctccctctgatcgatcgcaaccaaaagtctgacaagaagcctgatagagaagagatccagatgagcaacatgggcagtaacacaaagtcactggacaataattatagcacccccaacgaaagaggggaccacaatcgcacccttgatcgaagcggcgatctgggcgacatggaaccactgaagggcacaacccccctgatgcaggacgagggacaagagagcctggaggaggagctagatgtcttagttctggacgacgagggtggacaggtgtcctacccctctatgcagaagatctag

SEQ ID NO: 82677 - DNA, 5814 bp, Artificial Sequence
  derived and/or modified sequence
ctgccagatcagtttgtcaccacccaggctcccttgcctttggctgggtgcaacttccattttaggtgttggatctgagggggaaaaaaaagagagagggagagagagagaaagaagagcaggaaagatcccgaaaggaggaagaggtggcgaaaaatcaactgccctgctggatttgtctttctcagcaccttggcgaagccttgggtttctttcttaaaggactgatttttagaactccacatttgagaacggccggtttgtgggcgatgctgaccttgaaagacagaaattttcagatttgaaactcaacggaccccaggatcacagtcaccttctatatagcaccatccccaggatgcaggagccggggcagattgtggagacctacacggaggaggatcctgagggagccatgtctgtagtctctgtggagacctcagatgatgggaccactcggcgcacagagaccacggtcaagaaagtagtgaagactgtgacaacacggacagtacagccagtcgctatgggaccagacgggttgcctgtggatgcttcatcagtttctaacaactatatccagactttgggtcgtgatttccgcaagaatggcaatgggggacctggtccctatgtggggcaagctggcactgctacccttcctaggaacttccactaccctcctgatggttatagtcgccactatgaagatggttatccaggtggcagtgataactatggcagtctgtcccgggtgacccgcattgaggagcggtataggcccagcatggaaggctaccgggcacctagtagacaggatgtgtatgggccccaaccccaggttcgggtaggtgggagcagcgtggatctgcatcgctttcatccagagccttatgggctagaggatgaccagcgtagtatgggctatgatgacctggattatggtatgatgtctgattatggcactgcccgtcggactgggacaccctctgaccctcgtcggcgcctcaggagctatgaagacatgattggtgaggaggtgccatcggatcaatactactgggctcctttggcccagcatgagcgaggaagtttagcaagcttggatagcctgcgcaaaggagggcctccacctcctaattggagacagccagagctgccagaggtgatcgccatgcttggattccgcttggatgctgtcaagtccaatgcagctgcatacctgcaacacttatgctaccgcaatgacaaggtgaagactgacgtgcggaagctcaagggcatcccagtactggtgggattgttagaccatcccaaaaaggaagtgcaccttggagcctgtggagctctcaagaatatctcttttggacgtgaccaggataacaagattgccataaaaaactgtgatggtgtgcctgcccttgtgcgattgcttcgaaaggctcgtgatatggaccttactgaagttattaccggaaccctgtggaatctttcatcccatgactcaatcaaaatggagattgtggaccatgcactgcatgccttgacagatgaagtgatcattcctcattctggttgggagcgggaacctaatgaagactgtaagccacgccacattgagtgggaatcggtgctcaccaacacagctggctgccttaggaatgtaagctcagagaggagtgaagctcgccggaaacttcgggaatgtgatggtttagttgatgccctcattttcattgttcaggctgagattgggcagaaggattcagacagcaagcttgtagagaactgtgtttgccttcttcggaacttatcatatcaagttcaccgggagatcccacaggcagagcgttaccaagaggcagctcccaatgttgccaacaatactgggccacatgctgccagttgctttggggccaagaagggcaaagggaaaaaacctatagaggatccagcaaacgatacagtggatttccctaaaagaacgagtccagctcgaggctatgagctcttatttcagccagaggtggttcggatatacatctcacttcttaaggagagcaagactcctgccatcctagaagcctcagctggagctatccagaacttgtgtgctgggcgctggacgtatggtcgatacatccgctctgctctgcgtcaagagaaggctctttctgccatagctgacctcctgactaatgaacatgaacgggtggtgaaagctgcatctggagcactgagaaacctggctgtggatgctcgcaacaaagaattaattggtaaacatgctattcctaacttggtaaagaatctgccaggaggacagcagaactcctcttggaatttctctgaggacactgtcatctctattttgaacactatcaacgaggttatcgctgagaacttggaggctgccaaaaagcttcgagagacacagggtattgagaagctggtgttgatcaacaaatcagggaaccgctcagaaaaagaagttcgagcagcagcacttgtattacagacaatctggggatataaggaactgcggaagccactggaaaaagaaggatggaagaaatcagactttcaggtgaatctaaacaatgcttcccgaagccagagcagtcattcatatgatgatagtactctccctctcattgaccggaaccaaaaatcagataagaaacctgatcgggaagaaattcagatgagcaatatgggatcaaacacaaaatcactagataacaactattccacaccaaatgagagaggagaccacaatagaacactggatcgatcgggggatctaggcgacatggagccattgaagggaacaacacccttgatgcaggacgaggggcaggaatctctggaggaagagttggatgtgttggttttggatgatgaggggggccaagtgtcttacccctccatgcagaagatttagcaccactatctccgttccatctgggcttatatgtacttttattttttggtggtgaaattgactgatgattttcctttttcttcgctggactattgtgccaactgccaggctgcctcctgcccttacagccctaagtggctgccttctttccatcaactcccaacttcttcctgtgaagtttaattgtctcaacgcctccccctcccccattccctccatttttctcccaagaaacctgactcaattatttgcatattttgagaaactgctgcagattagttctttttgccagttttccctggaactcctggccttttgtggaggggagggatggagagaataggaatcttcactagaagccgtgggaagaattggaagttacatgctgtatatgcaatgtccagcagtctgataaactgacgattcttaatcaagatttttttcctgatggggaagggacttttattttcttttagagaggggaaagtgtgagctcttcccttattcctaatggctatttttgaagcaaagaaggccagcaacattggcacatgccacctggcaaaggacccttgagtaagtgaaggtctcctaaaactgggattaagaaaccttgctctcctcatctccaaggcagggaccatcaagaacctacagactccatctcttctgcaagcctcatgccaaccctgggctattgctgctgccccttaaacacaggctgtccttaacccacctctcctgccctgtgatatgtctgctgagttggcctggccatttccaagaggctgtagaaaggggagaatgtcaaggaagacttttggtagagaaggagcagaaagatgtgtttttgggaagaagaagacctctaggaggagctagtaggaatgtacatgaagcaattagtctgaaactggcttccccactcccccgtttctccttttcctatccttataggcctgtcccttgcctctgccctggattggttggcaaactaaaggacttgatgtacataactcctgtcccttttcccttacaaggtggggattgcccctggctttgcctcttctttgtgcctttggcctggggtgcatctcctcccgcccttccatgtgcctttctttgcctctgcagtctcatttctcataattttgcaaattatattttgttgctttcttacctactattggccctaaatagcagaaagaagagaagtgaccgagagaacctcagattcttcattgaggattggtatagccatgatttcagtcatagcaagcttttgctcaacagcatatgggtgggattttgcaaaaatcctattctgatgaatctcaaagtaaggctggtaagagaagtgagtggtgtgactcttactccttaggtgcccagaatttaccatcatctctgaaggagttacagggaagtggtctccccaattctcccctccctccagtattgccccctctcactttagcatatattaattagcaggttgggctagagaaatcagctgctatgcgggttgattattattattatttctaatccttttccttatttgccttctactccccttaatctaatctaaaagctctgttccatgcaactggagttccttatccctctcttccccttcccttatatattgaggctatggggtaggagaaaagtgcacaacccaccaccccctttactcgtgcattaaaatttcttatttacccttttcccccttcccatttcttcccactttcatctaccttttctggcaaaaaggagccttttgctctctgtgaccctaagagcacactgcacagggaaaattgccccatccagacctggctccactcttgatctctcttgtcctcttctgctcttttcctggtgctcttttttctcggtggggtgtgggtaatagaacagccgtgggcttttggggacctttaacttttttttctctcttttgtttataaaaaacactaaacattcaattccagagaaccaaaaatcccaccttcccaccgaacactactaaggggcttgtgttctgctccataccttttctcttttctttctgtcttgttaatgcttttaaaaacaaatgagttttttatataaataaagtttttaaagtgtgtatgtggggggtctgtgtcatttcttcacttcaagctgttatttcttccctgctttgcatctttgttacttccttatgtatcagtgtcctttccagagcaaccagaaggaggttataccaggatttattttgagctcagccccaactctttatcaagcaacattcttgttaactatatgtgaaacattttttcttctgaagattcttaaaaattgaatgtggctgaagttgaacatgggagcttattgctaatttagagataggaaactgaagcataaagaattaatgacttactttaattactggaattcttctgcaacatttgacaaaactaaccttgaataaggcccactgtaatacgtagctctcttaaatataacacttaggactagaagattagaaactaccaatcccaactacgtaataggaaaatgtaggatcaaaaggcccatgtatataagtactgaccactgggccataatgttgcttctcaggctatatgcagtcctttagtcagaagtcaataggcctatttattaatattttacagaccatattacctggattaccagggactatctttgctgcagagatcaagggttaagatctatgggaagatacttatttttctgaggtccttatgtcctgtcatataattaaagactcaagagaatttatgtgaaatgctttctgtatgcccaaatctttagattaaaattatatagctgctcct

SEQ ID NO: 82678 - DNA, 2727 bp, Artificial Sequence
  derived and/or modified sequence
atggccaacggcaccctgaccagaagacaccagaacggcagattcgtgggcgacgccgacctggagagacagaagttcagcgacctgaagctgaacggcccccaggaccacagccacctgctgtacagcaccatccccagaatgcaggagcccggccagatcgtggagacctacaccgaggaggaccccgagggcgccatgagcgtggtgagcgtggagaccagcgacgacggcaccaccagaagaaccgagaccaccgtgaagaaggtggtgaagaccgtgaccaccagaaccgtgcagcccgtggccatgggccccgacggcctgcccgtggacgccagcagcgtgagcaacaactacatccagaccctgggcagagacttcagaaagaacggcaacggcggccccggcccctacgtgggccaggccggcaccgccaccctgcccagaaacttccactacccccccgacggctacagcagacactacgaggacggctaccccggcggcagcgacaactacggcagcctgagcagagtgaccagaatcgaggagagatacagacccagcatggagggctacagagcccccagcagacaggacgtgtacggcccccagccccaggtgagagtgggcggcagcagcgtggacctgcacagattccaccccgagccctacggcctggaggacgaccagagaagcatgggctacgacgacctggactacggcatgatgagcgactacggcaccgccagaagaaccggcacccccagcgaccccagaagaagactgagaagctacgaggacatgatcggcgaggaggtgcccagcgaccagtactactgggcccccctggcccagcacgagagaggcagcctggccagcctggacagcctgagaaagggcggcccccccccccccaactggagacagcccgagctgcccgaggtgatcgccatgctgggcttcagactggacgccgtgaagagcaacgccgccgcctacctgcagcacctgtgctacagaaacgacaaggtgaagaccgacgtgagaaagctgaagggcatccccgtgctggtgggcctgctggaccaccccaagaaggaggtgcacctgggcgcctgcggcgccctgaagaacatcagcttcggcagagaccaggacaacaagatcgccatcaagaactgcgacggcgtgcccgccctggtgagactgctgagaaaggccagagacatggacctgaccgaggtgatcaccggcaccctgtggaacctgagcagccacgacagcatcaagatggagatcgtggaccacgccctgcacgccctgaccgacgaggtgatcatcccccacagcggctgggagagagagcccaacgaggactgcaagcccagacacatcgagtgggagagcgtgctgaccaacaccgccggctgcctgagaaacgtgagcagcgagagaagcgaggccagaagaaagctgagagagtgcgacggcctggtggacgccctgatcttcatcgtgcaggccgagatcggccagaaggacagcgacagcaagctggtggagaactgcgtgtgcctgctgagaaacctgagctaccaggtgcacagagagatcccccaggccgagagataccaggaggccgcccccaacgtggccaacaacaccggcccccacgccgccagctgcttcggcgccaagaagggcaagggcaagaagcccatcgaggaccccgccaacgacaccgtggacttccccaagagaaccagccccgccagaggctacgagctgctgttccagcccgaggtggtgagaatctacatcagcctgctgaaggagagcaagacccccgccatcctggaggccagcgccggcgccatccagaacctgtgcgccggcagatggacctacggcagatacatcagaagcgccctgagacaggagaaggccctgagcgccatcgccgacctgctgaccaacgagcacgagagagtggtgaaggccgccagcggcgccctgagaaacctggccgtggacgccagaaacaaggagctgatcggcaagcacgccatccccaacctggtgaagaacctgcccggcggccagcagaacagcagctggaacttcagcgaggacaccgtgatcagcatcctgaacaccatcaacgaggtgatcgccgagaacctggaggccgccaagaagctgagagagacccagggcatcgagaagctggtgctgatcaacaagagcggcaacagaagcgagaaggaggtgagagccgccgccctggtgctgcagaccatctggggctacaaggagctgagaaagcccctggagaaggagggctggaagaagagcgacttccaggtgaacctgaacaacgccagcagaagccagagcagccacagctacgacgacagcaccctgcccctgatcgacagaaaccagaagagcgacaagaagcccgacagagaggagatccagatgagcaacatgggcagcaacaccaagagcctggacaacaactacagcacccccaacgagagaggcgaccacaacagaaccctggacagaagcggcgacctgggcgacatggagcccctgaagggcaccacccccctgatgcaggacgagggccaggagagcctggaggaggagctggacgtgctggtgctggacgacgagggcggccaggtgagctaccccagcatgcagaagatctag

SEQ ID NO: 82679 - DNA, 2664 bp, Artificial Sequence
  derived and/or modified sequence
atggccaacggaacccttacacgtcggcaccagaatgggaggttcgtgggagatgccgaccttgagcgccagaagttttcggacctaaagctaaacgggccccaggatcactctcacctgctgtactcaacaatccctcggatgcaggagcccggccagatcgttgaaacttacactgaggaggatcccgagggcgccatgtctgtcgtctccgtggagaccagcgacgacggaaccacacggaggacagagaccacagtgaagaaggtggtgaagacagtgacgacccggactgtgcagcccgtggcaatgggccctgacgggctgcctgttgatgcctccagcgtgagcaataattatatacagaccttggggagagattttagaaagaacggaaacggtgggccaggaccctacgttggccaagcgggcactgccacactgccccgaaatttccactacccccccgacggttactccaggcactatgaagacggttaccctggagggtcagacaattacggcagtctttcacgagtcaccagaatagaggaacggtatcgcccgtccatggaaggctacagagcacccagccgccaggacgtgtatggcccccagcctcaggtccgtgttggcggatcctcagtggatctgcaccgatttcacccagagccctacggcttggaagatgaccagcgttccatgggctatgacgatcttgattatgggatgatgtccgattacggaacagcccggaggaccggcacacctagcgatccaagacgacgtctgcggtcatacgaagacatgataggagaagaggtccccagcgaccaatactattgggcgcctttggcccaacacgaacgcggaagcctggcaagcctggatagtctaaggaagggagggccgcccccgccaaactggcggcagccagagttgcctgaggtgatcgcgatgctgggcttccgccttgatgccgtgaaaagtaacgcagctgcctacttgcagcacctgtgttacagaaacgacaaggtgaagaccgacgtgaggaaactcaaaggcattcctgtgttggtgggccttctagaccacccaaagaaggaggttcatctcggtgcttgtggggcccttaagaacatttcatttgggagagatcaggacaacaaaatagctataaagaattgtgacggtgtcccggcactcgtacgattgcttcggaaggctcgcgacatggacttaaccgaagtgatcacgggaaccttgtggaatttgtcaagccatgattcaattaagatggagatcgttgaccatgctcttcacgcccttacagatgaagttattattcctcattccggatgggaaagggagcccaacgaggattgcaagcctcggcatatcgagtgggaatctgttttaacaaacacagcaggttgtctcagaaatgtgagttctgagaggagcgaggcaaggcgtaagctgagagagtgtgacggcctcgtggatgcattgattttcatcgtgcaggccgagatcggacagaaagactctgattcgaagctcgtcgaaaattgcgtatgtctcctgcggaacctaagttatcaagttcatcgcgagatccctcaagctgaacgctaccaggaagctgcgccaaatgtggcgaacaataccggcccccacgctgcaagctgttttggtgccaagaaaggaaaggggaaaaagccaattgaggatccagcaaacgacactgttgactttccgaagcgcacctcccccgcacggggttacgaactgcttttccagcctgaagttgtccgcatctatataagcctgctgaaggagtccaaaacccccgcaattctggaagcctcggcgggcgctatccagaacttgtgtgccgggcgctggacatacgggcggtatatccggagcgcgctaaggcaggagaaagccttgtcagccatagcagatctccttacaaatgagcatgagcgcgtggtaaaagctgcgagcggggctctgagaaacctagccgtcgacgcccggaataaggagcttattggcaaacatgcaatcccaaatctggtcaagaacctccctggaggccagcagaactcctcctggaacttctccgaagacacagttatcagtatactcaacacgattaacgaggtcatagccgagaaccttgaggcagccaaaaaactgcgagaaacacaggggatagaaaagctagttctcattaataaaagcgggaatagatccgaaaaagaggtccgggccgctgctctcgtgcttcagactatctggggctataaagagttgaggaagccactggaaaaggagggctggaaaaagtctgatttccaggtcaatctgaacaacgcttcccgatcccagtccagccatagctatgacgacagcaccttgcctctgatagatcgcaaccaaaagtcggataacaactatagcaccccaaatgagagaggcgatcacaatagaacgcttgaccggtcgggcgatttaggagatatggagccactgaaaggaaccacccccctgatgcaggacgagggacaggagtccttggaagaggagttggatgtgctggttttggatgacgagggtggccaggtctcatatcccagtatgcaaaaaatatag

SEQ ID NO: 82680 - DNA, 2523 bp, Artificial Sequence
  derived and/or modified sequence
atgcaggaacccggccaaatcgtggagacctacactgaggaggatcccgagggggccatgtcagtggttagcgtggagacttctgatgatggaacaacaagacgaaccgagactaccgtgaagaaggtggtgaagactgttaccacccggactgtacagccagtcgccatgggtccagacggactgccagtggatgccagcagcgtgtcaaataactatattcagacgctggggagggattttcggaagaacgggaatggaggaccaggtccttatgtcggccaggccggcactgccaccctcccacggaattttcactacccacccgacggatacagccggcactatgaagacggctaccccggcggctcggacaactatggatccctgtcccgcgtcacacgcattgaggaaaggtaccggccgtccatggagggctaccgggccccttcaaggcaggatgtatacgggccacagccacaggtccgggtgggaggatcatctgtagaccttcaccgctttcacccagaaccttacgggctcgaagacgaccaaaggagtatgggctacgacgacttagattacggcatgatgtctgactacggcacagcaagacggacaggaacccctagtgatcctagacgaaggctgcgatcttacgaggatatgataggcgaagaggtgcccagtgatcaatattattgggccccgctcgcccagcacgagagaggaagcctggcaagcttagatagtttgagaaagggcgggcctcctccacctaattggaggcagcctgagctgccagaggtgatcgccatgttaggcttccgccttgatgctgtcaagtctaacgccgccgcctaccttcagcacttgtgttaccgaaatgacaaggtgaaaaccgacgtaagaaaattgaaaggtatcccggttttggtggggctgttggaccacccgaaaaaggaggtgcaccttggcgcgtgcggtgctttgaaaaatattagttttggacgggaccaagacaataaaatcgcaattaagaactgtgatggcgtgcctgccttggtccggttgcttcgtaaagccagggatatggatctaaccgaggtcataacaggcactctctggaatctgagtagccatgactctattaagatggaaattgtcgaccacgccctccatgccctgacagacgaggtgatcatccctcacagcggatgggaacgcgaacctaacgaggattgtaagccacgtcacattgagtgggagagcgtacttaccaatacagcaggttgtctgagaaacgtcagctctgaaaggtcagaggccaggagaaaactaagggaatgcgacgggctcgtagatgcattgatctttatcgtacaggccgaaattggacagaaagatagcgacagcaaattggtggagaactgtgtgtgtctgctgagaaacctctcctaccaagtgcacagagagatcccccaggcagagagatatcaggaggcggctcccaatgtggcaaacaacacagggccccatgccgcctcttgctttggagctaagaagggtaaaggaaaaaaacccatcgaagatccagctaatgatacagtggacttcccaaaacggacctcacctgcacgaggctacgagctgctattccagcctgaggtggtgcgcatatatatctccctgttgaaggagtcgaagactccagcaatccttgaggcatccgcgggagctattcagaatctgtgcgccgggcggtggacctatggccgatatattcgaagtgcactgagacaggagaaagcattatcagccattgcagacctgttgaccaacgaacacgaacgtgtggttaaagcagcatcgggagctcttaggaatttagccgtagacgcacgcaacaaggagttgatcggtaagcacgctatccctaatttagtgaagaacctcccagggggccaacagaattcatcttggaacttcagcgaggacactgtgatctccattctgaacacaatcaatgaggtgatagctgagaatctcgaggccgctaagaaattaagggagacacagggcattgaaaagctggtcctcatcaataagtccggaaacagaagcgagaaagaggtccgcgcagcagccctggtgctgcagacaatctggggttataaagaattacgcaagcctttagagaaggaaggctggaagaaaagtgattttcaggttaacttaaataacgcctctagatctcagagttctcattcttacgacgattcgacactgccgcttatcgatcgcaaccaaaagtcagataacaattactccacaccgaacgagaggggcgaccataatcggacgttagacaggagtggagacctgggggatatggagcctctaaagggaacaacccccctaatgcaggacgaaggtcaggaaagcttggaagaggagctagatgtgctcgtgctggacgatgaaggcggccaggttagctacccatcaatgcaaaaaatatag

SEQ ID NO: 82681 - DNA, 2664 bp, Artificial Sequence
  derived and/or modified sequence
atggccaacggcaccctgacccggcggcaccagaatggccgctttgtgggagatgctgacctggagcggcagaagttcagtgacctgaagctgaatggcccccaggaccacagccacctgctgtacagcaccatccccaggatgcaggagcccggccagatcgtggagacctacacagaagaagatcctgagggcgccatgtctgtggtgtctgtggagaccagtgatgatggcaccaccaggagaacagagaccaccgtgaagaaggtggtgaagacagtgaccaccaggacagtgcagcctgtggccatgggcccagatggcctgcctgtggatgccagctctgtgagcaacaactacatccagaccctgggccgggacttcaggaagaatggaaatggaggccctggcccctacgtgggccaggccggcacagccaccctgcccaggaacttccactaccccccagatggctacagccgccactatgaagatggctacccaggcggcagtgacaactacggcagcctgagccgggtgaccagaattgaggagcgctaccggcccagcatggagggctaccgggcccccagccggcaggatgtgtatggcccccagccccaggtgcgggtgggcggcagctctgtggacctgcaccgcttccaccctgagccctacggcctggaggatgaccagaggtccatgggctatgatgacctggactatggcatgatgtctgactatggaacagcccggaggacaggcacccccagcgacccccggcggcggctgcggagctatgaggacatgattggagaggaggtgcccagcgaccagtactactgggcccccctggcccagcacgagcggggcagcctggccagcctggacagcctgaggaaaggaggccccccaccacccaactggaggcagcctgagctgcctgaggtgattgccatgctgggcttccggctggatgctgtgaagagcaatgctgctgcctacctgcagcacctgtgctacagaaatgacaaggtgaagacagatgtgaggaagctgaagggcatccctgtgctggtgggcctgctggaccaccccaagaaggaggtgcacctgggcgcctgtggggccctgaagaacatcagctttggccgggaccaggacaacaagatcgccatcaagaactgtgatggagtgcctgccctggtgcggctgctgaggaaggcccgggacatggacctgacagaggtgatcaccggcaccctgtggaacctgagcagccatgacagcatcaagatggagatcgtggaccacgccctgcacgccctgacagatgaagtcatcatcccccacagcggctgggagcgggagcccaatgaagactgcaagcccaggcacatcgagtgggagagcgtgctgaccaacacagctggctgcctgagaaatgtgtcctctgagaggtctgaggcccggaggaagctgcgggagtgtgatggcctggtggatgccctgatcttcatcgtgcaggccgagatcggccagaaggacagcgacagcaagctggtggagaactgtgtgtgcctgctgaggaacctgagctaccaggtgcaccgggagatcccccaggccgagcgctaccaggaggccgcccccaacgtggccaacaacacaggcccccatgctgccagctgctttggagccaagaagggcaagggcaagaagcccattgaagatcctgccaatgacacagtggacttccccaagaggaccagccctgcccggggctatgagctgctcttccagcctgaggtggtgcgcatctacatcagcctgctgaaggagagcaagaccccagccatcctggaggccagcgctggggccatccagaacctgtgtgccggccgctggacctacggccgctacatccgcagcgccctgcggcaggagaaggccctgagcgccatcgctgacctgctgaccaatgaacatgagcgggtggtgaaggccgccagcggggccctgaggaacctggccgtggatgccaggaacaaggagctgattggcaagcacgccatccccaacctggtgaagaacctgcccggcggccagcagaacagctcctggaacttcagcgaggacaccgtcatcagcatcctgaacaccatcaatgaggtgattgctgagaacctggaggccgccaagaagctgcgggagacccagggcatcgagaagctggtgctgatcaacaagagcggcaacagaagtgagaaggaggtgcgggccgccgccctggtgctgcagaccatctggggctacaaggagctgaggaagcccctggagaaggagggctggaagaagagtgacttccaggtgaacctgaacaatgccagccgcagccagagcagccacagctatgatgacagcaccctgcccctgattgacaggaaccagaagagtgacaacaactacagcaccccaaatgaaagaggagaccacaacagaaccctggacagaagtggggacctgggggacatggagcccctgaagggcaccacccccctgatgcaggatgagggccaggagagcctggaggaggagctggatgtgctggtgctggatgatgagggcggccaggtgtcctaccccagcatgcagaagatctag

SEQ ID NO: 82682 - DNA, 2523 bp, Artificial Sequence
  derived and/or modified sequence
atgcaggagcccggccagatcgtggagacctacacagaggaggaccctgagggcgccatgtctgtggtgtctgtggagaccagtgatgatggcaccaccaggagaacagagaccaccgtgaagaaggtggtgaagacagtgaccaccaggacagtgcagcctgtggccatgggcccagatggcctgcctgtggatgccagctctgtgagcaacaactacatccagaccctgggccgggacttcaggaagaatggaaatggaggccctggcccctacgtgggccaggccggcacagccaccctgcccaggaacttccactaccccccagatggctacagccgccactatgaagatggctacccaggcggcagtgacaactacggcagcctgagccgggtgacccgcatcgaggagcgctaccggcccagcatggagggctaccgggcccccagccggcaggatgtgtatggcccccagccccaggtgcgggtgggcggcagctctgtggacctgcaccgcttccaccctgagccctacggcctggaggatgaccagaggtccatgggctatgatgacctggactatggcatgatgtctgactatggaacagccaggagaacaggcacccccagcgacccccggcggcggctgcggagctatgaggacatgattggagaggaggtgcccagcgaccagtactactgggcccccctggcccagcacgagcggggcagcctggccagcctggacagcctgaggaagggcggccccccaccacccaactggaggcagcctgagctgcctgaggtgattgccatgctgggcttccggctggatgctgtgaagagcaatgctgctgcctacctgcagcacctgtgctacagaaatgacaaggtgaagacagatgtgaggaagctgaagggcatccctgtgctggtgggcctgctggaccaccccaagaaggaggtgcacctgggcgcctgtggggccctgaagaacatcagctttggccgggaccaggacaacaagatcgccatcaagaactgtgatggagtgcctgccctggtgcggctgctgaggaaggcccgggacatggacctgacagaggtgatcaccggcaccctgtggaacctgagcagccatgacagcatcaagatggagatcgtggaccacgccctgcacgccctgacagatgaggtgatcatcccccacagcggctgggagcgggagcccaatgaagactgcaagcccaggcacatcgagtgggagagcgtgctgaccaacacagctggctgcctgagaaatgtgagcagcgagaggtctgaggcccggaggaagctgagagaatgtgatggcctggtggatgccctgatcttcatcgtgcaggccgagatcggccagaaggacagcgacagcaagctggtggagaactgtgtgtgcctgctgaggaacctgagctaccaggtgcaccgggagatcccccaggccgagcgctaccaggaggccgccccaaatgtggccaacaacacaggcccccacgccgccagctgcttcggggccaagaagggcaagggcaagaagcccatcgaggaccctgccaatgacacagtggacttccccaagaggaccagccctgcccggggctatgagctgctcttccagcctgaggtggtgcgcatctacatcagcctgctgaaggagagcaagaccccagccatcctggaggccagcgctggggccatccagaacctgtgtgccggccgctggacctacggccgctacatccgcagcgccctgcggcaggagaaggccctgagcgccatcgctgacctgctgaccaatgagcacgagcgggtggtgaaggccgccagcggggccctgaggaacctggccgtggatgccaggaacaaggagctgattggcaagcacgccatccccaacctggtgaagaacctgcccggcggccagcagaacagctcctggaacttctctgaagatactgtcatcagcatcctgaacaccatcaatgaggtgattgctgagaacctggaggccgccaagaagctgcgggagacccagggcatcgagaagctggtgctgatcaacaagagcggcaacagaagtgagaaggaggtgcgggctgctgccctggtgctgcagaccatctggggctacaaggagctgaggaagcccctggagaaggagggctggaagaagagtgacttccaggtgaacctgaacaatgccagccgcagccagagcagccacagctatgatgacagcaccctgcccctgattgacaggaaccagaagagtgacaacaactacagcaccccaaatgaaagaggagaccacaacagaaccctggacagaagtggggacctgggggacatggagcccctgaagggcaccacccccctgatgcaggatgagggccaggagagcctggaggaggagctggatgtgctggtgctggatgatgaaggaggccaggtgtcctaccccagcatgcagaagatctag

SEQ ID NO: 82683 - DNA, 2664 bp, Artificial Sequence
  derived and/or modified sequence
atggccaacggcaccctgacccggcggcaccagaacggccggttcgtgggcgacgcagaccttgagagacagaagttttcagatctcaagcttaatgggcctcaagatcactcacacctcctctacagtaccatacctagaatgcaagagcctggccagattgtcgagacgtatacagaagaggatccagaaggagccatgtctgtggtttccgttgagacctccgatgatgggaccacccgcaggacagagaccaccgttaaaaaggtcgtgaagactgtcacaacccgtactgttcagccggttgccatgggcccagatggccttccagtggatgcctcctccgttagcaataactacatccagacactgggaagagatttccgaaaaaacggaaatgggggtcccgggccctatgtgggacaggcagggacagctacgcttccccgcaacttccattatccccctgacgggtactctcggcactacgaagatggatatcccggaggatctgataattacggctccctgagtcgagttacccggatagaagaacgctataggcctagtatggagggttacagagccccctcacgccaggatgtgtatggacctcaaccacaagtgcgcgtgggcggaagctccgtagacctacatagattccatcccgagccctacggcctggaagatgaccagcgctccatgggatatgacgatctggactacggtatgatgtctgattacgggacggctagacgcaccggtaccccttctgatcccagacgcaggttgcggtcctacgaggacatgatcggcgaggaagttccctctgatcagtattattgggcccctttggcccagcatgaaaggggatctctggccagtttagattcgctgagaaaaggtggacctcctccccctaactggaggcagcctgaactgccagaggtgattgcaatgctgggcttcaggctcgatgccgtgaagtcaaacgccgccgcctacctgcagcatctatgctaccggaacgacaaggtcaagaccgatgtgagaaaactcaagggaattcctgtgctcgtgggactgcttgatcacccaaaaaaggaggtccatctgggggcctgcggagcgctgaagaacatctcattcggccgggatcaggacaacaagattgccatcaagaactgcgatggcgtgcccgcactggtgagattactgcggaaagcgcgggacatggacctgacagaggtgatcaccggcacgctctggaatctttcatcccatgattccattaaaatggagatcgtggaccacgcactccatgcactcacggatgaggtcattattccccacagcggatgggaacgggaaccaaacgaagattgtaagccacgccatattgagtgggaaagtgtgcttacaaacacagcggggtgcctgcgcaacgtgtcaagcgagcgcagcgaggccagacgcaaactgcgagagtgtgacggcctcgtggacgccttaatatttatcgtgcaagccgaaattgggcagaaggactctgattccaagttggtggagaattgtgtttgcctgctgagaaatctctcataccaagttcatagggaaatcccccaggccgagcgttaccaggaggccgcccctaacgtggccaataataccggtccgcacgcagcatcatgttttggagcaaagaaagggaagggcaaaaaacccatcgaggatccagcaaatgataccgtggattttccgaaacgaactagtccagctagggggtacgaactcctatttcaaccagaggtcgttcggatctatatttcccttctaaaagaaagcaaaacacccgcaatcctcgaggcaagcgcaggggcaattcagaacctttgcgcaggacggtggacatacggacgctatatccggtcggcattaagacaagaaaaagctctgagcgcgatcgccgacctgttgactaacgagcacgagcgggttgtcaaagccgcctctggggcactccgcaatttggcagttgacgctcgcaacaaggagctaatagggaagcacgctatccctaatttggtgaaaaatctccctgggggacaacaaaatagctcttggaactttagcgaagatactgtgatttctatactgaatactatcaacgaggtgatcgctgagaacttagaggccgccaaaaagctgcgcgagacgcagggcatcgaaaaactcgtattgatcaataaatccgggaatagaagcgagaaagaggtgcgggcagctgcgttggtgctgcagaccatctggggttacaaggaactcaggaagccgctcgagaaggaggggtggaaaaagtccgattttcaagtgaacctcaacaacgccagccgtagccagtcgagccacagctacgacgattcgaccctcccgctgatcgaccgcaaccagaagtctgacaataattactctacacctaacgagagaggcgaccacaaccgcacccttgatagatcaggggaccttggggatatggagcctttgaagggaactacccccctcatgcaggatgaaggtcaggagtcactggaggaagaactggatgtcctcgtactggatgatgaaggcggtcaggtgtcctatccctctatgcaaaaaatttag

SEQ ID NO: 82684 - DNA, 2523 bp, Artificial Sequence
  derived and/or modified sequence
atgcaggagcccggccagatcgtggagacctacaccgaggaggacccagagggtgccatgagtgtggtgtcagtagagacctctgacgatggtaccaccagaaggaccgagaccacagttaagaaggtggtgaagacagtcacaacaagaaccgttcagcctgtcgcaatgggtccagacggacttccagtggacgcatcaagtgtgtcaaataattacattcagacattaggcagagattttcgaaagaacggcaatggcggacccggcccctacgtgggccaggctggaactgccaccttgcctaggaattttcactacccccctgacgggtacagtcggcactatgaggatggttatcccgggggttcagataattacggatctctcagtagagtgactagaatcgaggagcgctaccgtccttctatggaaggataccgggccccttcgcgtcaagacgtttatggaccacagccgcaggtacgggtgggggggagttcagttgatctgcaccgttttcatcctgagccgtacgggctcgaggacgaccagaggtccatgggatacgacgatctggactatggtatgatgtccgactacggcacagcccgcaggaccggcacacccagtgatccacgacggcgcctgaggtcctacgaagatatgataggtgaggaggtgccttctgaccagtattactgggcacctctggctcaacacgagagggggtccctagctagtttggactcgttgaggaaagggggtcctcccccaccaaactggagacagcccgaactgcctgaggtcatcgcgatgcttggctttcgattggacgccgttaaatctaatgcagcagcctatctgcagcacctgtgctaccggaatgataaggtcaagacagacgttcggaagctgaagggaatcccagtattggtcggtctcctcgatcaccctaagaaggaggtgcacctgggtgcatgcggcgccctgaagaacatctccttcggcagggatcaagataataagatcgccatcaagaattgtgacggggtccccgccctcgtgcgcctgctgaggaaagcccgtgatatggacctcacagaggtcattacaggcacactgtggaatctgagttcccacgacagcatcaagatggagatcgtggatcatgctctgcacgccttgaccgacgaagtgataattccacattccggctgggaacgagagccgaacgaggactgcaagcccaggcatatagaatgggaatccgttctgacgaatacagcgggatgtctgcggaatgtcagcagtgagagaagcgaagccaggaggaagcttcgtgagtgcgacggcttagtcgatgcactgatatttattgttcaagctgagataggccagaaggatagtgattccaaactcgtggagaattgtgtttgtctgctgcgtaacctgtcatatcaggtgcacagagaaatccctcaagccgaacggtaccaggaagctgctccgaatgtggcaaacaacacaggtccacacgccgcctcttgcttcggcgccaagaaaggtaagggcaagaagcctatcgaggatcctgctaacgacacagtcgacttccccaagaggactagtccagctagagggtatgaactgctgtttcagccagaagtggtgcggatttatatttccctcctgaaagagtccaagacgccggctatcctggaggcctctgccggagccatacagaatttgtgtgccggacggtggacctatggtcgctacatccggagcgcacttagacaggagaaggctctgtccgctatcgcagacttgctgactaatgaacacgagagagtcgtcaaggccgcatcgggggcccttagaaacctggccgtggacgctaggaataaagagctcatcggcaagcacgctattccaaatctagtgaaaaatctccccggcggacagcagaacagctcttggaatttcagtgaagacacagtcatatcgattttaaacaccattaatgaggtcattgccgaaaacctggaagccgccaagaagctgcgggagacgcagggcattgaaaaattggttctcattaataaatccggcaacagaagtgaaaaagaggtgagggccgctgctctagtgctgcaaaccatatgggggtacaaagaactgcgtaagccgttagagaaagaaggatggaaaaagtcggatttccaggtcaacctaaacaacgcatcgcgctctcagtcaagccacagctatgacgatagcacgctcccattgattgatcggaatcagaaaagcgataataactactctaccccaaatgagagaggagaccataacaggacactggatagaagcggcgacctaggcgatatggaacctttaaaaggcacaacacccctgatgcaggatgaagggcaggagtccctggaagaagagctagatgtcttagtactggatgatgaggggggtcaggtgtcataccccagcatgcagaaaatctag

SEQ ID NO: 82685 - DNA, 2664 bp, Artificial Sequence
  derived and/or modified sequence
atggccaatgggaccctaactcggagacatcagaacggacggttcgttggggacgcagatctggagcgccaaaagttctccgacttaaaattgaacggaccacaggaccactcacacttgctctactccactattcctaggatgcaggagcccggacagatcgtggaaacttataccgaggaggaccctgagggcgctatgagcgtggtctctgtggagacatcagacgatggcacaactcgccgaactgagaccaccgtgaagaaagttgtgaaaactgtaaccactagaaccgtccagccggttgccatgggcccagatggtctccctgtggatgcctcatcagtgtctaacaactacatccagaccctgggccgtgactttaggaagaacgggaatggagggcctgggccatacgtcggccaggcaggtactgccaccctgccaaggaacttccactaccctcccgacgggtattcccgccactacgaggacggatatccagggggatccgacaattatggctcactctcaagagtaacaaggatcgaggagcgttaccggccaagtatggaaggctacagagctccaagcaggcaggatgtgtatggaccccagccacaggtcagagtgggcggatcatctgttgacctacaccgcttccaccccgagccctacgggcttgaggacgaccaacggagtatgggttacgatgaccttgactacgggatgatgagcgactatggaaccgcacgcagaactgggactcccagcgatccgaggaggcgcttacgcagttacgaagatatgattggggaggaagtgccctccgaccaatactactgggccccactcgcccagcacgagaggggaagcctcgctagccttgactcgctgcggaaggggggaccccctccccctaattggcgccagcccgagctgccggaggttattgctatgctcggtttccggttagacgctgtgaagtctaatgcagctgcctacctacagcacctgtgctatcgcaacgacaaagtcaaaacggatgtgagaaagctgaagggtatccctgtgctcgtcggattattggatcacccaaaaaaggaagtccatctgggcgcttgtggagctcttaagaatatatccttcggacgagatcaggacaacaaaatcgcaatcaaaaattgcgacggagtgccagccttggtgagactgctgaggaaggccagggatatggatctgacggaagtgataaccggcaccctgtggaacctcagtagccatgattcgatcaagatggagatcgtggatcacgccctacacgctctgactgacgaggtcatcataccccattctggctgggagagggaacctaacgaggattgcaaacctaggcatatcgaatgggagagcgtgcttacaaacaccgcaggttgcctgagaaacgtcagttcagagcgctcagaggcccgtagaaaactgcgcgagtgtgatggattggtggatgcgctgatattcattgttcaggccgagattggccagaaagactcagattcgaagttggtggagaactgcgtgtgcttactgcgaaaccttagctatcaggttcaccgagaaattcctcaggccgagaggtaccaggaggccgctcctaatgtggcgaataatactggtccgcacgcggcaagctgcttcggcgctaaaaagggcaaagggaagaagccgatcgaagatcctgccaatgacaccgttgactttcctaagcgcacctctcccgcacggggatacgaattgctgttccaacccgaagtcgtgcggatatatatttctttattgaaagaaagtaaaacaccagcgatcttggaggccagcgcaggagcgattcaaaacttgtgcgccggacgctggacatatggtcgttatatccggtcagcactacggcaggaaaaagcattatcagccatagccgacctgctcacaaacgaacatgagagagtggtgaaagcagcctccggcgctctccgcaacctagcagtagatgctcggaacaaggagttgatcggtaagcacgctattcctaatttggtcaagaacctgcctggcggtcaacagaacagctcttggaatttttccgaggacaccgtaatcagtatccttaacaccattaacgaggtaattgcagagaatctggaagccgctaaaaagttacgggaaacccaggggatcgaaaagttggttctcattaacaaatcaggcaatagatcagaaaaagaggtgagagccgctgcacttgttctccagaccatctggggatacaaagagctgaggaagccgctggagaaagagggttggaagaagtccgatttccaggtcaatctgaataatgctagccggagccaaagctcacactcttatgatgattctactctccctctcattgatagaaaccagaagagcgataacaattactccacgcctaacgagagaggggatcacaacaggactctggatagatcgggcgatttaggcgatatggagcctctgaaaggcactacccccctgatgcaggatgaggggcaggagtccctcgaagaagaactggacgttctcgtgctcgatgatgagggcggacaggtgtcctatccatctatgcagaaaatttag

SEQ ID NO: 82686 - DNA, 2523 bp, Artificial Sequence
  derived and/or modified sequence
atgcaggagcctgggcaaatcgtagagacctacactgaggaagatccagagggcgctatgagcgtggtgagcgtggagaccagcgacgacgggacgacaaggcgaacagagacaactgtcaaaaaagtggtgaaaaccgtgactacaaggaccgtgcaaccagttgccatgggtccggatggattgcccgtggacgctagttcggtgagcaataattatatccagaccctcggacgagactttcgcaaaaatggcaacggtggtccaggtccctacgtggggcaagccggtaccgctactctaccaagaaacttccactatcctcccgatgggtattccaggcattatgaggacgggtacccagggggatcagacaactatggatcattgtcgcgggtgacgcggatagaggagagatacagacccagtatggagggctacagagctccctctcgccaagatgtgtacgggcctcagccacaagtgcgagtcggcggatcttctgtggacttacaccgattccatcctgagccatatggtttggaggacgatcagcgctcgatggggtatgatgatcttgattacggtatgatgtccgattacggcacagcaagacggactgggacacctagtgatcccagaaggagactacgctcatacgaagatatgattggcgaagaagtgccgagtgaccagtattactgggcgccactagctcagcacgagcgtggctcacttgctagtctggattcattacgaaaaggaggcccacctccacccaattggcgccagccagaacttcctgaggtgattgctatgctagggttcagactggatgcggtcaagtccaatgccgcagcatatctgcagcacctgtgctacagaaatgataaagtcaagacagacgtcagaaagctgaaaggcattccagtccttgtgggcctcctggaccatccaaaaaaagaagttcacctcggagcatgtggcgcactgaaaaatatctctttcggacgggaccaggataataaaatagccatcaaaaattgtgacggggtgccggctctggtaagattgctgcgtaaagctcgggacatggatctgaccgaagtgattaccggtacgctgtggaacctcagcagtcacgattctataaaaatggagatcgtggaccacgccttgcatgcccttaccgacgaggtgatcattccccactctggatgggagcgcgagcctaatgaagattgtaagcccagacacatcgagtgggaatctgtcctcacaaatactgccggatgcctgaggaatgtttctagcgagcggtcagaagcccgtaggaagctcagagagtgcgacggactcgtggatgctctgatcttcattgtccaggctgagataggtcagaaggatagtgactccaaacttgtggaaaattgtgtatgtttgctaagaaacctctcgtaccaagtgcaccgggaaatcccccaggccgagcgctaccaggaggcagcaccaaacgtggccaacaatactgggccacacgccgcttcttgtttcggagcaaagaaagggaagggcaagaaacctattgaagatcccgctaatgacacggttgattttcctaagcgaacctcaccagccaggggttatgagctgctgttccagcccgaggtggtgcggatttacatcagtctgttaaaagagtcaaaaacccccgctattctggaggcatcagcaggggctatacagaatttatgtgccggacgatggacttatgggcgttatatcagatcagcactgcgccaggagaaagccctgtccgctatcgctgacctgctcacaaacgagcatgagcgggtcgttaaggctgcaagcggagccctccggaacctcgcagtggacgccagaaataaagagttaatcggcaaacacgctatccctaacctagtcaagaaccttcctggcggtcagcagaacagcagctggaatttctcagaagacacagtaatttctattctgaatacgatcaatgaggttatcgccgagaatctcgaggccgctaagaaattgcgcgaaacccagggtatcgagaagctggtgcttattaacaagagcgggaatagatcagagaaggaagtgcgggcagccgctctagtcctacagactatatgggggtacaaagagctgcgaaaacctctggagaaagagggatggaagaaatctgactttcaggtcaacctgaataacgcttcacgctctcaaagttcacatagttatgacgatagcacgcttcctttgatcgatcggaatcagaaatccgacaataactactctacacccaacgagcggggagatcataatagaaccctggaccggtctggtgatcttggcgatatggagcccctaaagggaaccacacccctaatgcaagacgagggtcaggagtccctcgaagaggaactcgacgtgttggtccttgatgatgagggaggtcaggttagttacccttccatgcagaaaatctag

SEQ ID NO: 82687 - DNA, 5751 bp, Artificial Sequence
  derived and/or modified sequence
ctgccagatcagtttgtcaccacccaggctcccttgcctttggctgggtgcaacttccattttaggtgttggatctgagggggaaaaaaaagagagagggagagagagagaaagaagagcaggaaagatcccgaaaggaggaagaggtggcgaaaaatcaactgccctgctggatttgtctttctcagcaccttggcgaagccttgggtttctttcttaaaggactgatttttagaactccacatttgagaacggccggtttgtgggcgatgctgaccttgaaagacagaaattttcagatttgaaactcaacggaccccaggatcacagtcaccttctatatagcaccatccccaggatgcaggagccggggcagattgtggagacctacacggaggaggatcctgagggagccatgtctgtagtctctgtggagacctcagatgatgggaccactcggcgcacagagaccacggtcaagaaagtagtgaagactgtgacaacacggacagtacagccagtcgctatgggaccagacgggttgcctgtggatgcttcatcagtttctaacaactatatccagactttgggtcgtgatttccgcaagaatggcaatgggggacctggtccctatgtggggcaagctggcactgctacccttcctaggaacttccactaccctcctgatggttatagtcgccactatgaagatggttatccaggtggcagtgataactatggcagtctgtcccgggtgacccgcattgaggagcggtataggcccagcatggaaggctaccgggcacctagtagacaggatgtgtatgggccccaaccccaggttcgggtaggtgggagcagcgtggatctgcatcgctttcatccagagccttatgggctagaggatgaccagcgtagtatgggctatgatgacctggattatggtatgatgtctgattatggcactgcccgtcggactgggacaccctctgaccctcgtcggcgcctcaggagctatgaagacatgattggtgaggaggtgccatcggatcaatactactgggctcctttggcccagcatgagcgaggaagtttagcaagcttggatagcctgcgcaaaggagggcctccacctcctaattggagacagccagagctgccagaggtgatcgccatgcttggattccgcttggatgctgtcaagtccaatgcagctgcatacctgcaacacttatgctaccgcaatgacaaggtgaagactgacgtgcggaagctcaagggcatcccagtactggtgggattgttagaccatcccaaaaaggaagtgcaccttggagcctgtggagctctcaagaatatctcttttggacgtgaccaggataacaagattgccataaaaaactgtgatggtgtgcctgcccttgtgcgattgcttcgaaaggctcgtgatatggaccttactgaagttattaccggaaccctgtggaatctttcatcccatgactcaatcaaaatggagattgtggaccatgcactgcatgccttgacagatgaagtgatcattcctcattctggttgggagcgggaacctaatgaagactgtaagccacgccacattgagtgggaatcggtgctcaccaacacagctggctgccttaggaatgtaagctcagagaggagtgaagctcgccggaaacttcgggaatgtgatggtttagttgatgccctcattttcattgttcaggctgagattgggcagaaggattcagacagcaagcttgtagagaactgtgtttgccttcttcggaacttatcatatcaagttcaccgggagatcccacaggcagagcgttaccaagaggcagctcccaatgttgccaacaatactgggccacatgctgccagttgctttggggccaagaagggcaaagggaaaaaacctatagaggatccagcaaacgatacagtggatttccctaaaagaacgagtccagctcgaggctatgagctcttatttcagccagaggtggttcggatatacatctcacttcttaaggagagcaagactcctgccatcctagaagcctcagctggagctatccagaacttgtgtgctgggcgctggacgtatggtcgatacatccgctctgctctgcgtcaagagaaggctctttctgccatagctgacctcctgactaatgaacatgaacgggtggtgaaagctgcatctggagcactgagaaacctggctgtggatgctcgcaacaaagaattaattggtaaacatgctattcctaacttggtaaagaatctgccaggaggacagcagaactcctcttggaatttctctgaggacactgtcatctctattttgaacactatcaacgaggttatcgctgagaacttggaggctgccaaaaagcttcgagagacacagggtattgagaagctggtgttgatcaacaaatcagggaaccgctcagaaaaagaagttcgagcagcagcacttgtattacagacaatctggggatataaggaactgcggaagccactggaaaaagaaggatggaagaaatcagactttcaggtgaatctaaacaatgcttcccgaagccagagcagtcattcatatgatgatagtactctccctctcattgaccggaaccaaaaatcagataacaactattccacaccaaatgagagaggagaccacaatagaacactggatcgatcgggggatctaggcgacatggagccattgaagggaacaacacccttgatgcaggacgaggggcaggaatctctggaggaagagttggatgtgttggttttggatgatgaggggggccaagtgtcttacccctccatgcagaagatttagcaccactatctccgttccatctgggcttatatgtacttttattttttggtggtgaaattgactgatgattttcctttttcttcgctggactattgtgccaactgccaggctgcctcctgcccttacagccctaagtggctgccttctttccatcaactcccaacttcttcctgtgaagtttaattgtctcaacgcctccccctcccccattccctccatttttctcccaagaaacctgactcaattatttgcatattttgagaaactgctgcagattagttctttttgccagttttccctggaactcctggccttttgtggaggggagggatggagagaataggaatcttcactagaagccgtgggaagaattggaagttacatgctgtatatgcaatgtccagcagtctgataaactgacgattcttaatcaagatttttttcctgatggggaagggacttttattttcttttagagaggggaaagtgtgagctcttcccttattcctaatggctatttttgaagcaaagaaggccagcaacattggcacatgccacctggcaaaggacccttgagtaagtgaaggtctcctaaaactgggattaagaaaccttgctctcctcatctccaaggcagggaccatcaagaacctacagactccatctcttctgcaagcctcatgccaaccctgggctattgctgctgccccttaaacacaggctgtccttaacccacctctcctgccctgtgatatgtctgctgagttggcctggccatttccaagaggctgtagaaaggggagaatgtcaaggaagacttttggtagagaaggagcagaaagatgtgtttttgggaagaagaagacctctaggaggagctagtaggaatgtacatgaagcaattagtctgaaactggcttccccactcccccgtttctccttttcctatccttataggcctgtcccttgcctctgccctggattggttggcaaactaaaggacttgatgtacataactcctgtcccttttcccttacaaggtggggattgcccctggctttgcctcttctttgtgcctttggcctggggtgcatctcctcccgcccttccatgtgcctttctttgcctctgcagtctcatttctcataattttgcaaattatattttgttgctttcttacctactattggccctaaatagcagaaagaagagaagtgaccgagagaacctcagattcttcattgaggattggtatagccatgatttcagtcatagcaagcttttgctcaacagcatatgggtgggattttgcaaaaatcctattctgatgaatctcaaagtaaggctggtaagagaagtgagtggtgtgactcttactccttaggtgcccagaatttaccatcatctctgaaggagttacagggaagtggtctccccaattctcccctccctccagtattgccccctctcactttagcatatattaattagcaggttgggctagagaaatcagctgctatgcgggttgattattattattatttctaatccttttccttatttgccttctactccccttaatctaatctaaaagctctgttccatgcaactggagttccttatccctctcttccccttcccttatatattgaggctatggggtaggagaaaagtgcacaacccaccaccccctttactcgtgcattaaaatttcttatttacccttttcccccttcccatttcttcccactttcatctaccttttctggcaaaaaggagccttttgctctctgtgaccctaagagcacactgcacagggaaaattgccccatccagacctggctccactcttgatctctcttgtcctcttctgctcttttcctggtgctcttttttctcggtggggtgtgggtaatagaacagccgtgggcttttggggacctttaacttttttttctctcttttgtttataaaaaacactaaacattcaattccagagaaccaaaaatcccaccttcccaccgaacactactaaggggcttgtgttctgctccataccttttctcttttctttctgtcttgttaatgcttttaaaaacaaatgagttttttatataaataaagtttttaaagtgtgtatgtggggggtctgtgtcatttcttcacttcaagctgttatttcttccctgctttgcatctttgttacttccttatgtatcagtgtcctttccagagcaaccagaaggaggttataccaggatttattttgagctcagccccaactctttatcaagcaacattcttgttaactatatgtgaaacattttttcttctgaagattcttaaaaattgaatgtggctgaagttgaacatgggagcttattgctaatttagagataggaaactgaagcataaagaattaatgacttactttaattactggaattcttctgcaacatttgacaaaactaaccttgaataaggcccactgtaatacgtagctctcttaaatataacacttaggactagaagattagaaactaccaatcccaactacgtaataggaaaatgtaggatcaaaaggcccatgtatataagtactgaccactgggccataatgttgcttctcaggctatatgcagtcctttagtcagaagtcaataggcctatttattaatattttacagaccatattacctggattaccagggactatctttgctgcagagatcaagggttaagatctatgggaagatacttatttttctgaggtccttatgtcctgtcatataattaaagactcaagagaatttatgtgaaatgctttctgtatgcccaaatctttagattaaaattatatagctgctcct

SEQ ID NO: 82688 - DNA, 2664 bp, Artificial Sequence
  derived and/or modified sequence
atggccaacggcaccctgaccagaagacaccagaacggcagattcgtgggcgacgccgacctggagagacagaagttcagcgacctgaagctgaacggcccccaggaccacagccacctgctgtacagcaccatccccagaatgcaggagcccggccagatcgtggagacctacaccgaggaggaccccgagggcgccatgagcgtggtgagcgtggagaccagcgacgacggcaccaccagaagaaccgagaccaccgtgaagaaggtggtgaagaccgtgaccaccagaaccgtgcagcccgtggccatgggccccgacggcctgcccgtggacgccagcagcgtgagcaacaactacatccagaccctgggcagagacttcagaaagaacggcaacggcggccccggcccctacgtgggccaggccggcaccgccaccctgcccagaaacttccactacccccccgacggctacagcagacactacgaggacggctaccccggcggcagcgacaactacggcagcctgagcagagtgaccagaatcgaggagagatacagacccagcatggagggctacagagcccccagcagacaggacgtgtacggcccccagccccaggtgagagtgggcggcagcagcgtggacctgcacagattccaccccgagccctacggcctggaggacgaccagagaagcatgggctacgacgacctggactacggcatgatgagcgactacggcaccgccagaagaaccggcacccccagcgaccccagaagaagactgagaagctacgaggacatgatcggcgaggaggtgcccagcgaccagtactactgggcccccctggcccagcacgagagaggcagcctggccagcctggacagcctgagaaagggcggcccccccccccccaactggagacagcccgagctgcccgaggtgatcgccatgctgggcttcagactggacgccgtgaagagcaacgccgccgcctacctgcagcacctgtgctacagaaacgacaaggtgaagaccgacgtgagaaagctgaagggcatccccgtgctggtgggcctgctggaccaccccaagaaggaggtgcacctgggcgcctgcggcgccctgaagaacatcagcttcggcagagaccaggacaacaagatcgccatcaagaactgcgacggcgtgcccgccctggtgagactgctgagaaaggccagagacatggacctgaccgaggtgatcaccggcaccctgtggaacctgagcagccacgacagcatcaagatggagatcgtggaccacgccctgcacgccctgaccgacgaggtgatcatcccccacagcggctgggagagagagcccaacgaggactgcaagcccagacacatcgagtgggagagcgtgctgaccaacaccgccggctgcctgagaaacgtgagcagcgagagaagcgaggccagaagaaagctgagagagtgcgacggcctggtggacgccctgatcttcatcgtgcaggccgagatcggccagaaggacagcgacagcaagctggtggagaactgcgtgtgcctgctgagaaacctgagctaccaggtgcacagagagatcccccaggccgagagataccaggaggccgcccccaacgtggccaacaacaccggcccccacgccgccagctgcttcggcgccaagaagggcaagggcaagaagcccatcgaggaccccgccaacgacaccgtggacttccccaagagaaccagccccgccagaggctacgagctgctgttccagcccgaggtggtgagaatctacatcagcctgctgaaggagagcaagacccccgccatcctggaggccagcgccggcgccatccagaacctgtgcgccggcagatggacctacggcagatacatcagaagcgccctgagacaggagaaggccctgagcgccatcgccgacctgctgaccaacgagcacgagagagtggtgaaggccgccagcggcgccctgagaaacctggccgtggacgccagaaacaaggagctgatcggcaagcacgccatccccaacctggtgaagaacctgcccggcggccagcagaacagcagctggaacttcagcgaggacaccgtgatcagcatcctgaacaccatcaacgaggtgatcgccgagaacctggaggccgccaagaagctgagagagacccagggcatcgagaagctggtgctgatcaacaagagcggcaacagaagcgagaaggaggtgagagccgccgccctggtgctgcagaccatctggggctacaaggagctgagaaagcccctggagaaggagggctggaagaagagcgacttccaggtgaacctgaacaacgccagcagaagccagagcagccacagctacgacgacagcaccctgcccctgatcgacagaaaccagaagagcgacaacaactacagcacccccaacgagagaggcgaccacaacagaaccctggacagaagcggcgacctgggcgacatggagcccctgaagggcaccacccccctgatgcaggacgagggccaggagagcctggaggaggagctggacgtgctggtgctggacgacgagggcggccaggtgagctaccccagcatgcagaagatctag

SEQ ID NO: 82689 - DNA, 2523 bp, Artificial Sequence
  derived and/or modified sequence
atgcaggagcccggccagatcgtggagacctacaccgaggaggaccccgagggcgccatgagcgtggtgagcgtggagaccagcgacgacggcaccaccagaagaaccgagaccaccgtgaagaaggtggtgaagaccgtgaccaccagaaccgtgcagcccgtggccatgggccccgacggcctgcccgtggacgccagcagcgtgagcaacaactacatccagaccctgggcagagacttcagaaagaacggcaacggcggccccggcccctacgtgggccaggccggcaccgccaccctgcccagaaacttccactacccccccgacggctacagcagacactacgaggacggctaccccggcggcagcgacaactacggcagcctgagcagagtgaccagaatcgaggagagatacagacccagcatggagggctacagagcccccagcagacaggacgtgtacggcccccagccccaggtgagagtgggcggcagcagcgtggacctgcacagattccaccccgagccctacggcctggaggacgaccagagaagcatgggctacgacgacctggactacggcatgatgagcgactacggcaccgccagaagaaccggcacccccagcgaccccagaagaagactgagaagctacgaggacatgatcggcgaggaggtgcccagcgaccagtactactgggcccccctggcccagcacgagagaggcagcctggccagcctggacagcctgagaaagggcggcccccccccccccaactggagacagcccgagctgcccgaggtgatcgccatgctgggcttcagactggacgccgtgaagagcaacgccgccgcctacctgcagcacctgtgctacagaaacgacaaggtgaagaccgacgtgagaaagctgaagggcatccccgtgctggtgggcctgctggaccaccccaagaaggaggtgcacctgggcgcctgcggcgccctgaagaacatcagcttcggcagagaccaggacaacaagatcgccatcaagaactgcgacggcgtgcccgccctggtgagactgctgagaaaggccagagacatggacctgaccgaggtgatcaccggcaccctgtggaacctgagcagccacgacagcatcaagatggagatcgtggaccacgccctgcacgccctgaccgacgaggtgatcatcccccacagcggctgggagagagagcccaacgaggactgcaagcccagacacatcgagtgggagagcgtgctgaccaacaccgccggctgcctgagaaacgtgagcagcgagagaagcgaggccagaagaaagctgagagagtgcgacggcctggtggacgccctgatcttcatcgtgcaggccgagatcggccagaaggacagcgacagcaagctggtggagaactgcgtgtgcctgctgagaaacctgagctaccaggtgcacagagagatcccccaggccgagagataccaggaggccgcccccaacgtggccaacaacaccggcccccacgccgccagctgcttcggcgccaagaagggcaagggcaagaagcccatcgaggaccccgccaacgacaccgtggacttccccaagagaaccagccccgccagaggctacgagctgctgttccagcccgaggtggtgagaatctacatcagcctgctgaaggagagcaagacccccgccatcctggaggccagcgccggcgccatccagaacctgtgcgccggcagatggacctacggcagatacatcagaagcgccctgagacaggagaaggccctgagcgccatcgccgacctgctgaccaacgagcacgagagagtggtgaaggccgccagcggcgccctgagaaacctggccgtggacgccagaaacaaggagctgatcggcaagcacgccatccccaacctggtgaagaacctgcccggcggccagcagaacagcagctggaacttcagcgaggacaccgtgatcagcatcctgaacaccatcaacgaggtgatcgccgagaacctggaggccgccaagaagctgagagagacccagggcatcgagaagctggtgctgatcaacaagagcggcaacagaagcgagaaggaggtgagagccgccgccctggtgctgcagaccatctggggctacaaggagctgagaaagcccctggagaaggagggctggaagaagagcgacttccaggtgaacctgaacaacgccagcagaagccagagcagccacagctacgacgacagcaccctgcccctgatcgacagaaaccagaagagcgacaacaactacagcacccccaacgagagaggcgaccacaacagaaccctggacagaagcggcgacctgggcgacatggagcccctgaagggcaccacccccctgatgcaggacgagggccaggagagcctggaggaggagctggacgtgctggtgctggacgacgagggcggccaggtgagctaccccagcatgcagaagatctag

SEQ ID NO: 82690 - DNA, 390 bp, Artificial Sequence
  derived and/or modified sequence
atggctaacggaaccttgacccgccgacatcaaaacggtcggtttgtgggcgatgccgatctggaacgccagaagtttagtgatctgaaactgaatgggcctcaggaccactcacacttgttatacagcactattcctagaatgcaggaaccaggacaaatcgtggagacttatactgaagaagatcctgagggcgccatgagtgtggtcagtgtcgaaacttccgacgacggcaccactaggcggaccgaaactacggtaaagaaggtggtgaagacagtcaccactcggactgtgcagcctgtggcaatggggcctgatggcctcccagtggacgcaagtagcgttagcaacaattacatccagacccttggacgggatttccggtag

SEQ ID NO: 82691 - DNA, 390 bp, Artificial Sequence
  derived and/or modified sequence
atggccaacggcaccctgacccggcggcaccagaatggccgctttgtgggagatgctgacctggagcggcagaagttcagtgacctgaagctgaatggcccccaggaccacagccacctgctgtacagcaccatccccaggatgcaggagcccggccagatcgtggagacctacacagaagaagatcctgagggcgccatgtctgtggtgtctgtggagaccagtgatgatggcaccaccaggagaacagagaccaccgtgaagaaggtggtgaagacagtgaccaccaggacagtgcagcctgtggccatgggcccagatggcctgcctgtggatgccagctctgtgagcaacaactacatccagaccctgggccgggacttcagatag

SEQ ID NO: 82692 - DNA, 390 bp, Artificial Sequence
  derived and/or modified sequence
atggccaacggcaccctgacccggcggcaccagaacggccggttcgtgggtgacgctgatctggagcggcagaagttttccgacctgaagctgaacggcccacaggaccactcccacttgctatatagtacaattccgagaatgcaggaacccggacagatcgtggaaacgtataccgaggaggaccccgagggcgccatgagcgtggtctctgttgagacaagtgatgatggcaccacgaggagaaccgaaacgacagtaaagaaagtagttaagacagtcaccactcgcaccgtgcagcccgtggcaatggggccggacggtctgcccgtagacgccagctctgttagtaacaattacatccaaactctggggagggatttccgatag

SEQ ID NO: 82693 - DNA, 390 bp, Artificial Sequence
  derived and/or modified sequence
atggccaacggaacacttacccgcagacatcagaacggcagattcgtaggcgacgctgatttggaaagacagaaattctccgacctaaagcttaatggccctcaggaccactcccacttgctgtactccaccatccccagaatgcaggagccgggtcaaattgtcgaaacttacactgaagaggacccggagggcgcaatgtcagtggtgtcggtggagacctccgatgacgggactacaaggagaaccgaaaccactgtaaaaaaagttgttaaaacagtgaccacacgaaccgtgcagcctgtcgccatgggacccgacggactcccagtcgacgcgtcatctgtatccaacaattatatccaaacactggggagagacttccgctag

SEQ ID NO: 82694 - DNA, 390 bp, Artificial Sequence
  derived and/or modified sequence
atggccaacggcaccctgaccagaagacaccagaacggcagattcgtgggcgacgccgacctggagagacagaagttcagcgacctgaagctgaacggcccccaggaccacagccacctgctgtacagcaccatccccagaatgcaggagcccggccagatcgtggagacctacaccgaggaggaccccgagggcgccatgagcgtggtgagcgtggagaccagcgacgacggcaccaccagaagaaccgagaccaccgtgaagaaggtggtgaagaccgtgaccaccagaaccgtgcagcccgtggccatgggccccgacggcctgcccgtggacgccagcagcgtgagcaacaactacatccagaccctgggcagagacttcagatag

SEQ ID NO: 82695 - protein, 497 aa, Artificial Sequence
  derived and/or modified sequence
MKNQCETVWLKSPIKLKLIFINNEWQNSESGRVFPVYNPATGEQVCEVQEADKADIDKAVQAARLAFSLGSVWRRMDASERGRLLDKLADLVERDRAVLATMESLNGGKPFLQAFYVDLQGVIKTFRYYAGWADKIHGMTIPVDGDYFTFTRHEPIGVCGQIIPWNFPLLMFAWKIAPALCCGNTVVIKPAEQTPLSALYMGALIKEAGFPPGVINILPGYGPTAGAAIASHIGIDKIAFTGSTEVGKLIQEAAGRSNLKRVTLELGGKSPNIIFADADLDYAVEQAHQGVFFNQGQCCTAGSRIFVEESIYEEFVRRSVERAKRRVVGSPFDPTTEQGPQIDKKQYNKILELIQSGVAEGAKLECGGKGLGRKGFFIEPTVFSNVTDDMRIAKEEIFGPVQEILRFKTMDEVIERANNSDFGLVAAVFTNDINKALTVSSAMQAGTVWINCYNALNAQSPFGGFKMSGNGREMGEFGLREYSEVKTVTVKIPQKNS

SEQ ID NO: 82696 - DNA, 1494 bp, Artificial Sequence
  derived and/or modified sequence
atgaagaaccaatgcgagaccgtctggctgaagtcgcccatcaagttgaagctgatattcataaacaatgaatggcagaacagcgagagcggcagggtcttccccgtttacaatccggccactggggagcaggtgtgtgaagttcaagaggctgacaaggccgatattgacaaggctgttcaagctgcccggttagctttttcgctgggaagcgtctggcggcggatggatgccagcgagaggggtagactgctggacaagctggcggatcttgtggaacgggacagggctgtgcttgccacaatggaatccttgaacggtggaaagcccttccttcaggcgttttatgtcgacctacagggagtaattaaaactttcagatattatgccggctgggccgacaagattcatgggatgacaattccggtagatggtgactacttcacgtttacacgacacgagcccattggagtgtgcggtcagattatcccatggaactttcccctgcttatgtttgcttggaagatcgcaccagcactctgctgcgggaatacagttgtaatcaaaccagcagagcagacacccctctcagccctgtacatgggagctctcatcaaggaagctggattccccccaggtgtaatcaacatactccctggctacgggcctactgctggcgcggcaattgccagccatatcggcattgataaaatagcattcacaggctcaaccgaagtggggaagctcattcaggaggccgcagggaggagcaacttgaaacgcgttaccctcgagttgggcggaaagtccccaaacattatattcgccgacgccgatctggactacgccgttgagcaggctcaccagggcgtttttttcaatcaaggacagtgctgtactgctggttcccgcatttttgtggaggaatccatctacgaggaattcgttaggcgctccgttgagcgcgccaaaaggagggtggtgggcagccctttcgatcccactacagagcaggggccacaaattgataagaaacagtacaacaagattttggagcttatccagtcaggcgttgcggaaggagcgaagctcgagtgtggtggaaagggactaggtcgcaaaggtttctttatcgaaccaaccgtgttctctaacgtcaccgatgatatgcgaatcgccaaggaggagatctttgggcctgtccaagagattcttagattcaagaccatggatgaggtgatagaaagggctaataactctgacttcgggttggttgcagctgtgttcactaacgatattaacaaggcccttacagtctcatccgccatgcaggctgggacagtgtggatcaattgctacaatgcgttaaatgcacagagcccttttggcggcttcaagatgtcgggcaatggccgggagatgggcgagtttggccttcgcgagtattccgaggttaaaaccgtgacagtcaaaattcctcaaaaaaattcctag

SEQ ID NO: 82697 - DNA, 1494 bp, Artificial Sequence
  derived and/or modified sequence
atgaagaaccagtgtgaaacagtgtggctgaagagccccatcaagctgaagctgatcttcatcaacaatgagtggcagaacagcgagagcggccgggtcttccctgtgtacaacccagccactggagagcaggtgtgtgaggtgcaggaggccgacaaggctgacatcgacaaggctgtgcaggccgcccggctggccttcagcctgggctctgtgtggaggaggatggatgccagcgagcggggccgcctgctggacaagctggccgacctggtggagcgggacagagctgtgctggccaccatggagagcctgaatggaggcaagcccttcctgcaggccttctacgtggacctgcagggcgtcatcaagaccttccgctactatgccggctgggccgacaagatccacggcatgaccatccctgtggatggagactacttcaccttcaccaggcatgagcccatcggcgtgtgtggccagatcatcccctggaacttccccctgctgatgtttgcctggaagatcgccccagccctgtgctgcggcaacacagtggtgatcaagccagctgagcagacccccctgagcgccctgtacatgggcgccctgatcaaggaggccggcttccccccaggagtcatcaacatcctgcccggctacggccccacagctggagctgccatcgccagccacatcggcatcgacaagatcgccttcaccggcagcacagaggtgggcaagctgatccaggaggccgccggccgcagcaacctgaagagggtgaccctggagctgggcggcaagagccccaacatcatctttgctgatgctgacctggactatgctgtggagcaggcccaccagggcgtcttcttcaaccagggccagtgctgcacagctggcagccgcatctttgtggaggagagcatctatgaggagtttgtgagaagatctgtggagcgggccaagagaagagtggtgggcagcccctttgaccccaccacagagcagggcccccagattgacaagaagcagtacaacaagatcctggagctgatccagagcggcgtggccgagggcgccaagctggagtgtggcggcaagggcctgggcaggaagggcttcttcatcgagcccaccgtcttcagcaatgtgacagatgacatgagaattgccaaggaggagatcttcggccctgtgcaggagatcctgcgcttcaagaccatggatgaagtcatcgagcgggccaacaacagcgactttggcctggtggccgctgtgttcaccaatgacatcaacaaggccctgactgtgtcctctgccatgcaggccggcaccgtgtggatcaactgctacaatgccctgaatgcccagagcccctttggaggcttcaagatgtctggaaatggccgggagatgggagaatttggcctgcgggagtacagcgaggtgaagacagtgacagtgaagatcccccagaagaacagctag

SEQ ID NO: 82698 - DNA, 3049 bp, Artificial Sequence
  derived and/or modified sequence
gacacccggcccgccaccatgacttccagcaagatagagatgcccggcgaggtgaaggccgaccccgccgccctcatggcgtcgctgcacctcctgccgtcgcccacgcccaatctcgaaattaagtacaccaaggtgtgaaaattggacttgctggcagaatcctttttgggagaagatgaagaatcagtgtgagactgtttggttaaaatccccaataaaactgaaactgatctttataaacaacgagtggcagaactcagagagtgggagagtgttccctgtctataatccagccacaggagaacaggtgtgtgaagttcaagaagcagacaaggcagatatagacaaagcagtgcaggcagcccgcctggctttctctcttggttcagtgtggagaaggatggatgcttcagaaaggggacgtctgttggataagcttgcagacttggtggaacgggacagggcagttcttgcaaccatggaatccctaaatggtggcaaaccattcctgcaagctttttatgtggatttgcagggcgtcatcaaaacctttcgatattacgcaggctgggctgataaaattcatgggatgaccattcctgtagatggagactattttacctttacaagacatgaacccattggagtgtgtggacagatcatcccatggaacttccccctgctgatgtttgcctggaaaatagctccagctttgtgctgtggcaatacagtagttattaagccagcagagcaaacaccactcagtgcactctacatgggagccctcatcaaggaggctggctttcctcccggggtcatcaatattttgccaggatatgggccaacggctggggcagcaatagcttctcacattggcatagacaagattgcattcacagggtctactgaggttggaaagcttatccaagaagcagctggaagaagtaatttgaagagagtaactctggaacttggaggcaaaagtcctaatattatttttgctgatgctgacttggactatgctgtggagcaggcccaccagggtgtgttcttcaatcaaggtcagtgctgcactgcaggctctcgcatcttcgtggaggagtccatctatgaggagtttgtgagaagaagcgtggagcgggccaagaggcgcgtagtggggagtccctttgaccccaccactgagcagggtccccagattgataagaaacagtacaacaagatcttggaactcatccagagtggtgtggctgagggcgccaagctggaatgtggaggcaaaggactgggccgaaaggggtttttcattgagcccacagtgttttccaacgtcactgatgatatgcggattgccaaggaggagatctttggccctgttcaggaaattttgagatttaagacgatggatgaagttatcgaaagagccaataactcagactttggactcgtagcagctgtctttactaatgacatcaacaaggccctcacagtgtcttctgcaatgcaagctgggactgtttggatcaattgttacaatgccttaaatgcccagagcccctttgggggattcaagatgtctggaaatgggagagaaatgggagaatttggcttgcgggagtactcagaagttaagacggtgacagtaaagatcccccagaagaactcctaagaaggccaagaaggaggatgaagcccagcctgcacgtctgtccctctctgctttctctgtagggcccagctctcaggaatacaaagttgagccacggtccttacttaaagattgaaaagataacatgtaggccaggcaggtcactgcacaactaaagcaaaccagctgggtacagtttcttggcactctgtaaggggccaccttaatcataccaaatattggggaaagtgggataaagggaggaggaggagctagcagacacatccagtatctccttctggagcacaggatgaaataagggagctgtattatttcatgtctttgtcacaaagaactttcctctcaaggaaaggtgacctttctcctgtcttcattttcctccttccaggccctcctcgctcacccacccctccctctcttccaaggagatgtcagctgagctcattctggggcagatgtttgggccgggaacaatttttcaaggttgtaaagccaaattatcatttcatgttatccatttcttcaaagcaaaacatgaaatggttttagctagagtcagaccagaatgaaaatgccaggagctggtacactacagatgtagtaagaacctgggatattcctgacccaatctggttttcttttacccataaataacatgaatgaaaaaagattgggacaatagagactggaagtcatcatgtgcagttcaccgcttctgagcttgctgcagttttggggtgtgtgtgtattagattccttctcagttattctggaataaggcaaggagtgggttgtttttcatagctagataagatcttttccaaagtttttcttagaaccaaccaaaaaacaatccgagtaggcccaagaatttgataatgctggatgccttgcagacatcattcagtttctaatattgggcaacaattattattaaatgaattatttctgtagttggaatctgtaccttctgaacctctacaccaataactgctgcaggtgtgattttggtctgtcacactgtacatctatcataatgtgccctgtatctattggcagtgaccttggaaaatctggccaagcctaggggtttccttttccatttgccaagttccattgtgccaggactgccgtgctccactgagctcctctgtcacaccccattcttgcccctcactgggcaggccatggcctacagcttgcagggagtaaagcaggcccgcctccctttcttcccatccacatactcctcttctgctttccagtgactccaccagtttgatgtgggaagtgttagcttcctttccttcttccatcccttcttccatctttccagctgtcaaatccaatccagtctctaacctaaatgcagatcat

SEQ ID NO: 82699 - DNA, 577 bp, Artificial Sequence
  derived and/or modified sequence
cagcctctagtaacttgtttcttcctggaaaagatgaatctgatcccaattaacttaaataaaacaaaccaaacaaaactctccactaccagcctggcagctagggaggcattattgggtctgaatgtaggaaatcaggaaatacttacaatcaagatgaacgtgcccaagaactcagagagggtttctttcgctaagctgctcttcaagaccagtctctgcttgaagctttttcccttttctgctccctcaggctgcatcttggggcttctctgaggactcctgtttctaccaatacctacctgttgtggtcctcactttcacagccagatgaaaatggacgttttgacaatggctcacagattcctggagatgtctgatctttataaacaacgagtggcagaactcagagagtgggagagtgttccctgtctataatccagccacaggagaacaggtgtgtgaagttcaagaagcagacaaggcagatatagacaaagcagtgcaggcagcccgcctggctttctctcttggttcagtgtggagaaggatggatgcttcagaaaggggacgtctg

SEQ ID NO: 82700 - DNA, 1494 bp, Artificial Sequence
  derived and/or modified sequence
atgaagaaccagtgcgagaccgtgtggctgaagagccccatcaagctgaaactgatttttattaataacgagtggcagaattcggaatctggccgtgtgttcccagtatacaaccctgcgaccggagagcaagtttgtgaagtccaggaggccgacaaagcagacatagacaaagccgtccaggccgcccggctggcattcagcctggggagcgtgtggaggaggatggatgcttcggagcgggggcgccttctcgacaaactggccgacttagtggagagggaccgcgccgtcctggcaactatggaatctcttaacggcggcaagcccttcctgcaggcattctacgtcgacttgcagggcgtgattaagacgttcagatactacgcaggttgggcagacaagattcatggaatgacaattccggtcgatggcgactacttcacgtttaccaggcacgaacctataggagtgtgtggacaaatcattccttggaactttccactgctgatgtttgcatggaagatcgcccccgctctgtgttgcggtaacactgtcgtgatcaagccagctgaacaaaccccattgagcgccttgtatatgggcgctcttatcaaagaagcaggttttcctccaggcgtcatcaatatactcccgggttatggcccaaccgcgggagccgccatcgcctcacacatcgggatagataagatagcctttacaggttcaacagaagtcggcaaactgatacaagaagccgccggcagaagcaatctgaagcgggtgacactggagctgggtgggaagtctcctaacatcatatttgctgatgccgatcttgactacgccgtcgaacaagcccaccaaggtgtgttctttaatcagggccagtgctgtacagcagggtcaaggatcttcgtagaagaaagcatatacgaggagtttgtgcggagaagtgtggaaagagctaaacgaagggtggtaggcagtccgtttgatcctacaactgagcagggcccgcagattgacaaaaaacagtataacaagattctagagttgatacagagcggagttgctgagggcgctaagctggaatgtgggggaaagggcctggggagaaaggggttcttcatcgagcctacagtgttcagcaatgtgaccgacgacatgcgcattgccaaggaagagatttttgggcccgtgcaggagatactgcggttcaaaaccatggacgaagtaatcgagagagcgaataattcggactttgggctcgtggccgcagtcttcaccaacgatatcaacaaagctctcacagtctcatcagcgatgcaggcaggaaccgtatggataaactgttataacgcgctgaatgcccagtctccattcgggggatttaagatgtctggcaatggcagagaaatgggtgagtttggactgcgcgagtatagcgaggtgaagactgtgactgtgaaaatccctcagaagaattcttag

SEQ ID NO: 82701 - DNA, 1494 bp, Artificial Sequence
  derived and/or modified sequence
atgaaaaaccagtgtgaaaccgtatggttgaaaagcccgattaaattaaagttaatcttcattaataatgagtggcagaattccgagagcggccgtgtgtttccagtgtacaaccctgctacaggtgaacaagtttgcgaggtacaggaagctgacaaggccgacatcgataaggctgtgcaggccgctcggctggcgttcagcttggggtctgtgtggagacgcatggacgcatcagaaaggggacgccttctggacaaactagcagatctcgtcgagagagatagagcggtgcttgcgaccatggagagcctcaacgggggtaaaccctttctgcaggcgttctatgtggatctccaaggtgttattaaaaccttcaggtactacgccggatgggccgataaaattcatggcatgaccataccggttgacggcgactacttcactttcacaagacacgagcctataggagtttgcggacagattataccttggaattttcctcttcttatgttcgcctggaaaatcgccccagcgctgtgttgtggaaatacagtcgtcattaagcccgctgagcagacccccttatccgccctgtacatgggcgcattgattaaagaggctggctttcctcctggggtcatcaacattcttccgggatatggcccaactgctggagcggctatcgcgtcccatatcggaatcgacaagatcgcattcaccggctccaccgaggtcggtaagcttattcaggaggccgctggaagaagcaacctgaagcgcgtgacattagaattgggcggtaagagccctaacatcatattcgccgacgcagatctggactacgcagtggagcaggcccatcaaggcgtgttctttaaccaggggcagtgctgcacagctggcagtcgtattttcgtcgaagaaagtatctacgaggaatttgtcaggcgtagtgttgagcgagctaagcgcagggtggtggggtctccgtttgacccaaccaccgagcagggccctcagatcgacaaaaagcaatacaataagattctagagctgattcagtccggggtggccgaaggcgcaaaattggagtgcggcggtaaggggttaggaaggaaggggtttttcatcgagccgaccgtgtttagtaatgtgacggacgacatgcgcatagccaaagaggagattttcgggccagtgcaggaaattctgcgcttcaaaactatggacgaggtaatcgaaagagctaacaactctgattttgggctggtggcagcggtttttactaacgatatcaacaaagcacttaccgtgtccagcgcgatgcaggccggtactgtgtggattaactgttataatgcgctaaacgcccaaagtcccttcggagggttcaagatgtccggtaacgggagggaaatgggagagtttggactgagggagtacagcgaagtgaagacagtcactgtcaagatcccccagaaaaacagctag

SEQ ID NO: 82702 - DNA, 1494 bp, Artificial Sequence
  derived and/or modified sequence
atgaagaaccagtgcgagaccgtgtggctgaagagccccatcaagctgaagctgatcttcatcaacaacgagtggcagaacagcgagagcggcagagtgttccccgtgtacaaccccgccaccggcgagcaggtgtgcgaggtgcaggaggccgacaaggccgacatcgacaaggccgtgcaggccgccagactggccttcagcctgggcagcgtgtggagaagaatggacgccagcgagagaggcagactgctggacaagctggccgacctggtggagagagacagagccgtgctggccaccatggagagcctgaacggcggcaagcccttcctgcaggccttctacgtggacctgcagggcgtgatcaagaccttcagatactacgccggctgggccgacaagatccacggcatgaccatccccgtggacggcgactacttcaccttcaccagacacgagcccatcggcgtgtgcggccagatcatcccctggaacttccccctgctgatgttcgcctggaagatcgcccccgccctgtgctgcggcaacaccgtggtgatcaagcccgccgagcagacccccctgagcgccctgtacatgggcgccctgatcaaggaggccggcttcccccccggcgtgatcaacatcctgcccggctacggccccaccgccggcgccgccatcgccagccacatcggcatcgacaagatcgccttcaccggcagcaccgaggtgggcaagctgatccaggaggccgccggcagaagcaacctgaagagagtgaccctggagctgggcggcaagagccccaacatcatcttcgccgacgccgacctggactacgccgtggagcaggcccaccagggcgtgttcttcaaccagggccagtgctgcaccgccggcagcagaatcttcgtggaggagagcatctacgaggagttcgtgagaagaagcgtggagagagccaagagaagagtggtgggcagccccttcgaccccaccaccgagcagggcccccagatcgacaagaagcagtacaacaagatcctggagctgatccagagcggcgtggccgagggcgccaagctggagtgcggcggcaagggcctgggcagaaagggcttcttcatcgagcccaccgtgttcagcaacgtgaccgacgacatgagaatcgccaaggaggagatcttcggccccgtgcaggagatcctgagattcaagaccatggacgaggtgatcgagagagccaacaacagcgacttcggcctggtggccgccgtgttcaccaacgacatcaacaaggccctgaccgtgagcagcgccatgcaggccggcaccgtgtggatcaactgctacaacgccctgaacgcccagagccccttcggcggcttcaagatgagcggcaacggcagagagatgggcgagttcggcctgagagagtacagcgaggtgaagaccgtgaccgtgaagatcccccagaagaacagctag

SEQ ID NO: 82703 - protein, 590 aa, Artificial Sequence
  derived and/or modified sequence
MKEKEELLKLIAVLEKETAQLREQVGRMERELNHEKERCDQLQAEQKGLTEVTQSLKMENEEFKKRFSDATSKAHQLEEDIVSVTHKAIEKETELDSLKDKLKKAQHEREQLECQLKTEKDEKELYKVHLKNTEIENTKLMSEVQTLKNLDGNKESVITHFKEEIGRLQLCLAEKENLQRTFLLTTSSKEDTCFLKEQLRKAEEQVQATRQEVVFLAKELSDAVNVRDRTMADLHTARLENEKVKKQLADAVAELKLNAMKKDQDKTDTLEHELRREVEDLKLRLQMAADHYKEKFKECQRLQKQINKLSDQSANNNNVFTKKTGNQQKVNDASVNTDPATSASTVDVKPSPSAAEADFDIVTKGQVCEMTKEIADKTEKYNKCKQLLQDEKAKCNKYADELAKMELKWKEQVKIAENVKLELAEVQDNYKELKRSLENPAERKMEDGADGAFYPDEIQRPPVRVPSWGLEDNVVCSQPARNFSRPDGLEDSEDSKEDENVPTAPDPPSQHLRGHGTGFCFDSSFDVHKKCPLCELMFPPNYDQSKFEEHVESHWKVCPMCSEQFPPDYDQQVFERHVQTHFDQNVLNFD

SEQ ID NO: 82704 - DNA, 1773 bp, Artificial Sequence
  derived and/or modified sequence
atgaaggagaaggaggagctgctgaagctgatcgccgtgctggagaaggagaccgcccagctgagagagcaggtgggcagaatggagagagagctgaaccacgagaaggagagatgcgaccagctgcaggccgagcagaagggcctgaccgaggtgacccagagcctgaagatggagaacgaggagttcaagaagagattcagcgacgccaccagcaaggcccaccagctggaggaggacatcgtgagcgtgacccacaaggccatcgagaaggagaccgagctggacagcctgaaggacaagctgaagaaggcccagcacgagagagagcagctggagtgccagctgaagaccgagaaggacgagaaggagctgtacaaggtgcacctgaagaacaccgagatcgagaacaccaagctgatgagcgaggtgcagaccctgaagaacctggacggcaacaaggagagcgtgatcacccacttcaaggaggagatcggcagactgcagctgtgcctggccgagaaggagaacctgcagagaaccttcctgctgaccaccagcagcaaggaggacacctgcttcctgaaggagcagctgagaaaggccgaggagcaggtgcaggccaccagacaggaggtggtgttcctggccaaggagctgagcgacgccgtgaacgtgagagacagaaccatggccgacctgcacaccgccagactggagaacgagaaggtgaagaagcagctggccgacgccgtggccgagctgaagctgaacgccatgaagaaggaccaggacaagaccgacaccctggagcacgagctgagaagagaggtggaggacctgaagctgagactgcagatggccgccgaccactacaaggagaagttcaaggagtgccagagactgcagaagcagatcaacaagctgagcgaccagagcgccaacaacaacaacgtgttcaccaagaagaccggcaaccagcagaaggtgaacgacgccagcgtgaacaccgaccccgccaccagcgccagcaccgtggacgtgaagcccagccccagcgccgccgaggccgacttcgacatcgtgaccaagggccaggtgtgcgagatgaccaaggagatcgccgacaagaccgagaagtacaacaagtgcaagcagctgctgcaggacgagaaggccaagtgcaacaagtacgccgacgagctggccaagatggagctgaagtggaaggagcaggtgaagatcgccgagaacgtgaagctggagctggccgaggtgcaggacaactacaaggagctgaagagaagcctggagaaccccgccgagagaaagatggaggacggcgccgacggcgccttctaccccgacgagatccagagaccccccgtgagagtgcccagctggggcctggaggacaacgtggtgtgcagccagcccgccagaaacttcagcagacccgacggcctggaggacagcgaggacagcaaggaggacgagaacgtgcccaccgcccccgacccccccagccagcacctgagaggccacggcaccggcttctgcttcgacagcagcttcgacgtgcacaagaagtgccccctgtgcgagctgatgttcccccccaactacgaccagagcaagttcgaggagcacgtggagagccactggaaggtgtgccccatgtgcagcgagcagttcccccccgactacgaccagcaggtgttcgagagacacgtgcagacccacttcgaccagaacgtgctgaacttcgactag

SEQ ID NO: 82705 - DNA, 1773 bp, Artificial Sequence
  derived and/or modified sequence
atgaaggagaaggaagaattactgaaactgattgcagtactagagaaagagacagctcagttacgggaacaggtgggcaggatggaacgcgagctgaaccacgaaaaggagcggtgcgaccagctgcaggctgagcagaagggactgacggaggtgacacagtccttgaaaatggaaaacgaagaattcaagaagcggttttccgacgccacttctaaggctcatcaactagaggaggacatcgtatctgtgacacataaggcaattgaaaaggagactgagctggactccctgaaagataaactaaagaaggcgcaacatgagagagaacaactggaatgccaactgaagaccgagaaagacgagaaggagctgtataaagttcatctaaagaacactgaaatcgagaacacgaaactcatgtctgaagtccagaccctaaagaatttagacgggaataaggagtccgttatcactcactttaaagaggaaatcggtcggttacaactgtgcctcgccgagaaggaaaacctccaaaggactttccttcttaccacgtcttcaaaggaggatacgtgcttccttaaagaacaattgaggaaagcagaggagcaggtacaagcaaccaggcaagaagttgtgtttctcgccaaggagctgagcgacgccgtgaacgttcgtgatcggacaatggccgacctccatactgcgagactcgagaatgagaaggtgaaaaagcaattggcagatgccgttgctgaacttaagctgaacgccatgaagaaagatcaggataagaccgacacgctcgaacacgaactcagacgggaagttgaggatctgaagctccggctccagatggccgcggaccattacaaagaaaagtttaaagaatgtcagagacttcagaaacaaattaataagctatctgatcagagtgccaataataacaacgtgttcactaagaagaccggcaaccaacagaaagtgaacgatgcatcggtcaataccgaccctgccacatcggcctccaccgtggacgtcaaaccctctccctccgccgccgaagcagattttgacatcgtcacaaagggtcaggtgtgcgagatgacaaaggagatcgctgacaagactgaaaaatacaacaagtgtaagcagcttctacaggacgagaaagccaagtgtaacaaatacgccgacgaactagctaaaatggagttgaaatggaaagagcaagttaagatagctgagaacgtcaagttagagttagcagaggtgcaagacaattacaaggagctcaagcggagtctagaaaatccagcggagagaaagatggaagatggcgccgatggcgctttttatcccgacgagattcagcggccaccagtgcgcgtcccctcatgggggctggaggacaatgtggtctgctctcagccagcccggaatttcagcaggccggatggcctcgaagactcggaagacagtaaggaagacgaaaacgtgccgaccgcccccgatcctccctcacagcacctgcggggccacggtacaggtttttgctttgattctagctttgacgtacacaaaaaatgtccgctttgtgagcttatgtttccccctaactacgaccaaagtaagtttgaagagcacgttgagtcacactggaaggtgtgccctatgtgttccgagcaatttccccccgactacgatcaacaggtctttgaacgccatgtgcagacccattttgatcagaacgtcctgaattttgactag

SEQ ID NO: 82706 - DNA, 1773 bp, Artificial Sequence
  derived and/or modified sequence
atgaaggagaaggaggagctgctgaagctgattgctgtgctggagaaggagacagcccagctgcgggagcaggtgggccgcatggagcgggagctgaaccacgagaaggagcgctgtgaccagctgcaggccgagcagaagggcctgacagaggtgacccagagcctgaagatggagaatgaggagttcaagaagcgcttcagtgatgccaccagcaaggcccaccagctggaggaggacatcgtgtctgtgacccacaaggccatcgagaaggagacagagctggacagcctgaaggacaagctgaagaaggcccagcacgagcgggagcagctggagtgccagctgaagacagagaaggatgagaaggagctgtacaaggtgcacctgaagaacacagaaattgagaacaccaagctgatgtctgaggtgcagaccctgaagaacctggatggcaacaaggagagcgtcatcacccacttcaaggaggagatcggccgcctgcagctgtgcctggccgagaaggagaacctgcagaggaccttcctgctgaccaccagcagcaaggaggacacctgcttcctgaaggagcagctgaggaaggccgaggagcaggtgcaggccacccggcaggaggtggtgttcctggccaaggagctgagtgatgctgtgaatgtgcgggacaggaccatggctgacctgcacacagcccggctggagaatgagaaggtgaagaagcagctggctgatgctgtggccgagctgaagctgaatgccatgaagaaggaccaggacaagacagacaccctggagcacgagctgcggcgggaggtggaggacctgaagctgcggctgcagatggctgctgaccactacaaggagaagttcaaggagtgccagaggctgcagaagcagatcaacaagctgagtgaccagagcgccaacaacaacaacgtgttcaccaagaagacaggcaaccagcagaaggtgaatgatgcctctgtgaacacagatcctgccaccagcgccagcacagtggatgtgaagcccagccccagcgctgctgaggccgactttgatattgtgaccaagggccaggtgtgtgagatgaccaaggagattgctgacaagacagagaagtacaacaagtgcaagcagctgctgcaggatgagaaggccaagtgcaacaagtatgcagatgagctggccaagatggagctgaagtggaaggagcaggtgaagattgctgaaaatgtgaagctggagctggccgaggtgcaggacaactacaaggagctgaagaggagcctggagaacccagctgagaggaagatggaggatggagcagatggagccttctacccagatgagatccagaggcctcctgtgcgggtgcccagctggggcctggaggacaacgtggtgtgcagccagcctgccaggaacttcagcaggccagatggcctggaggacagcgaggacagcaaagaagatgaaaatgtgcccacagccccagacccccccagccagcacctgcggggccatggaacaggcttctgctttgacagcagctttgatgtgcacaagaagtgccccctgtgtgagctgatgtttcctcccaactatgaccagagcaagtttgaggagcacgtggagagccactggaaggtgtgccccatgtgcagcgagcagttccccccagactatgaccagcaggtgtttgaaagacatgtgcagacccactttgaccagaatgtgctgaactttgattag

SEQ ID NO: 82707 - DNA, 1773 bp, Artificial Sequence
  derived and/or modified sequence
atgaaggagaaggaggagctgctgaagctgatcgccgtgctggagaaggaaactgcccagctgagagagcaggtcggcagaatggagagggaactgaatcatgagaaagagcgttgcgaccagttgcaggcagagcagaaagggctgacagaagtcacacaatctttgaagatggagaacgaagagttcaaaaagagattttccgatgctacttccaaggctcaccaactggaggaggatattgtcagtgtaactcataaggccattgagaaggaaacagagctggatagccttaaagataagctgaagaaagcccagcacgaacgggagcaattggaatgtcaactgaaaactgagaaggacgagaaggagctgtataaggttcaccttaagaatacagagatcgaaaacaccaagcttatgtctgaggtacagaccctcaaaaatctggacggtaacaaggagagcgtaatcactcactttaaagaagaaatcgggcgtctgcaactctgcctggcagaaaaagagaacttacagagaacatttctcctgaccacttcttccaaggaggatacctgtttccttaaagagcagctgaggaaagccgaggagcaggtgcaggccactaggcaggaagtggtgtttctggcgaaagagcttagcgatgccgtgaacgtgagagatagaacaatggcagacctgcacactgcccgcctcgaaaatgaaaaggtgaagaaacaacttgccgacgccgtggctgaactgaaactgaacgccatgaaaaaagatcaagacaagaccgacacactggaacatgagttgcggcgcgaagtggaggatttgaaactaagactgcagatggccgctgaccactacaaggagaagttcaaagagtgccagcgactacagaagcaaattaataaactgtctgaccagtctgcgaacaataacaatgtgttcacaaaaaagaccgggaaccaacagaaggtaaacgatgctagcgtgaatacagacccggcaactagcgctagcacggttgatgtcaagccatctcccagcgcggccgaagccgatttcgatatcgtcactaagggtcaggtgtgtgagatgacgaaggagattgccgataaaacagagaaatacaataagtgtaagcagctcctgcaggacgagaaagcgaagtgcaataaatacgctgacgaactcgccaagatggagttaaagtggaaagagcaagtgaagatcgccgagaatgtcaagctcgaactcgcagaagttcaggataattataaagagctgaagaggtcgctcgaaaaccccgccgagcggaagatggaggacggcgccgatggtgccttttatcccgacgaaattcaacgccccccagtgagagtcccctcttggggtttagaggataatgtagtttgcagtcagccagcaaggaacttcagtcgccctgatgggttggaagactctgaggacagtaaggaggacgagaatgtgccgactgccccggaccctccaagtcagcatctgcgtggccacggtacaggcttttgttttgattccagctttgatgttcataagaaatgcccactgtgtgagctgatgtttccacccaattatgatcaatcgaagttcgaggagcacgtggagtctcattggaaggtctgccccatgtgtagtgaacaattccctcctgactatgaccagcaagtgttcgagcgtcatgttcagacccattttgaccagaacgtactcaatttcgactag

SEQ ID NO: 82708 - DNA, 1773 bp, Artificial Sequence
  derived and/or modified sequence
atgaaggagaaagaggaactacttaagctgatcgccgtgctggaaaaagagaccgcgcagctgcgtgagcaagtggggaggatggaacgggagctgaatcatgaaaaggagagatgcgaccaattacaggctgaacagaaggggctgactgaagtaacccagagcctcaagatggaaaatgaagagtttaagaagaggtttagcgacgcaacatcgaaggctcatcaactagaggaggatattgtgagcgttacacataaggcaatcgaaaaggaaactgagctggactctctgaaggataaactcaaaaaggcccagcacgaacgcgagcagcttgaatgccaactcaagaccgaaaaggacgaaaaagaattgtacaaggtgcatttgaagaacaccgagattgagaacacgaaactcatgagtgaagtgcagactctcaagaatctggacggcaacaaggagtcagtgattactcacttcaaagaagagattgggaggctgcagctgtgtttagccgaaaaggagaatttgcagcggactttcttgctgactacctcatcaaaagaagatacctgtttcctgaaggaacagctgcgaaaagccgaggaacaggtgcaggccacacgtcaggaggtagtcttcttggccaaagagttgtctgatgccgtgaacgtacgagatagaaccatggcagatctgcatacggctcggctagaaaatgagaaggtgaaaaaacaactcgcagatgcggtggccgaattaaagctcaatgctatgaagaaagatcaagacaagacagataccctagagcatgaactgagacgggaagttgaggatctcaagctacggctccagatggccgctgatcattacaaggagaaatttaaggagtgccagagactgcagaaacaaatcaataagttgtctgatcaatctgcgaacaacaataatgtgttcacaaagaaaaccggcaatcagcagaaagttaacgatgcttccgtcaataccgatcccgcaaccagcgcttccacagtggatgttaagccctcgccgtcggccgcagaggctgatttcgacattgtgactaagggccaggtctgcgagatgacgaaagagatcgcggacaaaacggaaaagtacaataaatgtaaacagctacttcaggatgaaaaggccaaatgcaataaatacgccgacgaactcgcgaaaatggagttaaaatggaaggagcaggtgaagatcgcagagaacgtcaagctggaattggctgaagttcaggacaactataaggagctgaaaaggtccctcgaaaaccccgcagagcgcaaaatggaggacggagccgatggagcattttacccggacgagatccaacggccacctgtgagggttcctagttggggccttgaagacaacgtcgtgtgctcgcagcccgctcggaatttctctaggccagatgggctggaggattcagaggatagtaaggaagacgaaaatgtgccaacagctcctgaccccccttctcaacatctgaggggccatggaaccggattctgtttcgacagttcctttgatgttcacaaaaagtgcccactgtgtgagctgatgttcccaccaaattatgaccaatccaaattcgaagagcatgtcgagtcacattggaaggtgtgccctatgtgcagtgaacaattccccccagattacgatcaacaggtttttgaaagacacgtgcagactcattttgaccagaatgttctgaactttgactag

SEQ ID NO: 82709 - DNA, 2221 bp, Artificial Sequence
  derived and/or modified sequence
aggggaggtgtagccggtctttgggggtaggcggtagtggcggaagaggttcggcggctgatggcggatcaggatcggaagcctgcgtaactttctcccttgatccgggagtctttccactggattcacaatgacatcctttcaagaagtcccattgcagacttccaactttgcccatgtcatctttcaaaatgtggccaagagttaccttcctaatgcacacctggaatgtcattacaccttaactccatatattcatccacatccaaaagattgggttggtatattcaaggttggatggagtactgctcgtgattattacacgtttttatggtcccctatgcctgaacattatgtggaaggatcaacagtcaattgtgtactagcattccaagttgaaaattgagaaaaccatgaaagaaaaagaagaactgttaaagttaattgccgttctggaaaaagaaacagcacaacttcgagaacaagttgggagaatggaaagagaacttaaccatgagaaagaaagatgtgaccaactgcaagcagaacaaaagggtcttactgaagtaacacaaagcttaaaaatggaaaatgaagagtttaagaagaggttcagtgatgctacatccaaagcccatcagcttgaggaagatattgtgtcagtaacacataaagcaattgaaaaagaaaccgaattagacagtttaaaggacaaactcaagaaggcacaacatgaaagagaacaacttgaatgtcagttgaagacagagaaggatgaaaaggaactttataaggtacatttgaagaatacagaaatagaaaataccaagcttatgtcagaggtccagactttaaaaaatttagatgggaacaaagaaagcgtgattactcatttcaaagaagagattggcaggctgcagttatgtttggctgaaaaggaaaatctgcaaagaactttcctgcttacaacctcaagtaaagaagatacttgttttttaaaggagcaacttcgtaaagcagaggaacaggttcaggcaactcggcaagaagttgtctttctggctaaagaactcagtgatgctgtcaacgtacgagacagaacgatggcagacctgcatactgcacgcttggaaaacgagaaagtgaaaaagcagttagctgatgcagtggcagaacttaaactaaatgctatgaaaaaagatcaggacaagactgatacactggaacacgaactaagaagagaagttgaagatctgaaactccgtcttcagatggctgcagaccattataaagaaaaatttaaggaatgccaaaggctccaaaaacaaataaacaaactttcagatcaatcagctaataataataatgtcttcacaaagaaaacggggaatcagcagaaagtgaatgatgcttcagtaaacacagacccagccacttctgcctctactgtagatgtaaagccatcaccttctgcagcagaggcagattttgacatagtaacaaaggggcaagtctgtgaaatgaccaaagaaattgctgacaaaacagaaaagtataataaatgtaaacaactcttgcaggatgagaaagcaaaatgcaataaatatgctgatgaacttgcaaaaatggagctgaaatggaaagaacaagtgaaaattgctgaaaatgtaaaacttgaactagctgaagtacaggacaattataaagaacttaaaaggagtctagaaaatccagcagaaaggaaaatggaagatggagcagatggtgctttttacccagatgaaatacaaaggccacctgtcagagtcccctcttggggactggaagacaatgttgtctgcagccagcctgctcgaaactttagtcggcctgatggcttagaggactctgaggatagcaaagaagatgagaatgtgcctactgctcctgatcctccaagtcaacatttacgtgggcatgggacaggcttttgctttgattccagctttgatgttcacaagaagtgtcccctctgtgagttaatgtttcctcctaactatgatcagagcaaatttgaagaacatgttgaaagtcactggaaggtgtgcccgatgtgcagcgagcagttccctcctgactatgaccagcaggtgtttgaaaggcatgtgcagacccattttgatcagaatgttctaaattttgactagttactttttattatgagttaatatagtttagcagt

SEQ ID NO: 82710 - protein, 443 aa, Artificial Sequence
  derived and/or modified sequence
MYDDSYVPGFEDSEAGSADSYTSRPSLDSDVSLEEDRESARREVESQAQQQLERAKKYSNDWWIGRLVKEGGDIAFIPSPQRLESIRLKQEQKARRSGNPSSLSDIGNRRSPPPSLAKQKQKQAEHVPPYDVVPSMRPVVLVGPSLKGYEVTDMMQKALFDFLKHRFDGRISITRVTADLSLAKRSVLNNPGKRTIIERSSARSSIAEVQSEIERIFELAKSLQLVVLDADTINHPAQLAKTSLAPIIVFVKVSSPKVLQRLIRSRGKSQMKHLTVQMMAYDKLVQCPPESFDVILDENQLEDACEHLAEYLEVYWRATHHPAPGPGLLGPPSAIPGLQNQQLLGERGEEHSPLERDSLMPSDEASESSRQAWTGSSQRSSRHLEEDYADAYQDLYQPHRQHTSGLPSANGHDPQDRLLAQDSEHNHSDRNWQRNRPWPKDSY

SEQ ID NO: 82711 - DNA, 1332 bp, Artificial Sequence
  derived and/or modified sequence
atgtatgatgactcttacgttccaggcttcgaggatagcgaggctgggtcagccgactcctatactagcagaccaagccttgattccgatgtatcgctcgaagaggatcgcgagtcagccaggcgggaggtcgagagccaggcccagcaacaactggaaagggcgaagaaatacagtaacgattggtggatcggccggctggtgaaggaggggggcgatattgcgtttatcccatctcctcagaggctcgaatccataagactgaaacaggagcagaaggcacggcggtctggaaatccaagcagtctgagtgatatcggcaaccgaaggtcccccccaccctcactggcgaagcaaaagcagaagcaggccgagcacgtacccccttatgacgtagtgccaagcatgcgacctgtggttttagtggggccctccctgaagggatacgaagtgacggatatgatgcagaaggcgttgttcgactttctcaagcaccggttcgacggccgaatttctataactcgggtaaccgctgacctgtctctggccaaacggtcagtgttaaataatcctggaaagcggactatcatcgagcggagcagcgcaagaagttctatagcagaggtgcaatctgaaatcgagaggatttttgaactcgccaaaagtctgcaactcgtggtgctagatgctgataccatcaatcacccggcccaactggctaagacttccctggccccaataattgtgtttgtcaaggtcagcagtccaaaagttttacagaggcttattcggtctcggggaaaaagtcaaatgaaacatcttactgtgcagatgatggcctacgataagctggtgcagtgccctccagaatccttcgatgttatcttggatgagaatcagctggaagacgcgtgcgagcatctggccgagtatctggaagtgtactggcgggcaacccaccaccccgctccgggccccggactgttaggacctcctagcgctatacccggtttacaaaaccagcagcttctgggcgaacgcggagaagaacatagccccctggagagggactctttgatgccaagcgatgaggccagtgagtcttcacgtcaagcttggactggtagttcccaacggagttcaagacatctggaggaagactacgcggacgcctaccaagacctttatcaaccccatagacagcacacatccggcctcccctctgcgaacggtcacgatccgcaggaccggctgcttgcacaggattctgagcacaatcacagcgatcggaactggcagcgaaatcggccatggccaaaggactcatactag

SEQ ID NO: 82712 - DNA, 1332 bp, Artificial Sequence
  derived and/or modified sequence
atgtatgatgacagctatgtgcccggctttgaagattctgaggccggcagcgctgacagctacaccagccggcccagcctggacagtgatgtgtccctggaggaggaccgggagagcgcccggcgggaggtggagagccaggcccagcagcagctggagcgggccaagaagtacagcaatgactggtggattggccgcctggtgaaggagggcggggacatcgccttcatccccagcccccagaggctggagagcatccggctgaagcaggagcagaaggccaggagaagtggcaaccccagcagcctgagtgacatcggcaacagaagaagccccccacccagcctggccaagcagaagcagaagcaggccgagcacgtgcccccctatgatgtggtgcccagcatgaggcctgtggtgctggtgggccccagcctgaagggctatgaggtgacagacatgatgcagaaggccctgtttgacttcctgaagcacagatttgatggccgcatcagcatcaccagggtgacagctgacctgagcctggccaagaggtctgtgctgaacaaccctgggaagaggaccatcatcgagaggagcagcgcccggagcagcattgctgaggtgcagagcgagattgagcgcatctttgagctggccaagagcctgcagctggtggtgctggatgctgacaccatcaaccacccagcccagctggccaagaccagcctggcccccatcatcgtgtttgtgaaggtgagcagccccaaggtgctgcagaggctcatccgcagccggggcaagagccagatgaagcacctgactgtgcagatgatggcctatgacaagctggtgcagtgccccccagagagctttgatgtgatcctggatgagaaccagctggaggatgcctgtgagcacctggccgagtacctggaggtgtactggagggccacccaccacccagcccctggccctggcctgctgggccccccatctgccatccctggcctgcagaaccagcagctgctgggggagcggggggaggagcacagccccctggagcgggacagcctgatgcccagtgatgaggccagcgagagcagccggcaggcctggacaggcagcagccagaggagcagccgccacctggaggaggactatgcagatgcctaccaggacctgtaccagccccaccggcagcacaccagcggcctgcccagcgccaacggccatgacccccaggaccggctgctggcccaggacagcgagcacaaccacagcgacaggaactggcagaggaaccggccctggcccaaggacagctactag

SEQ ID NO: 82713 - DNA, 1332 bp, Artificial Sequence
  derived and/or modified sequence
atgtacgacgacagctacgtgcccggcttcgaggacagcgaggccggctccgccgacagctatacctcacggccgagcctggatagcgacgtttccctggaagaagatagggagtctgctcgaagagaggtagaatctcaagcccagcagcaactggagcgtgcgaagaagtacagtaatgattggtggattggcaggctggtcaaagagggaggtgacattgccttcatacccagcccacagcggctggaaagcatccgcctgaaacaagagcagaaagcacgtcgctcaggaaacccaagctcgttgtctgacattggtaacagacgatcccccccccctagtctggcgaagcagaagcagaaacaggccgagcatgttcctccctacgacgttgtgccatctatgaggcccgtggtgctggtcggaccgagtctaaaagggtatgaggtgacagacatgatgcagaaagccttattcgacttccttaaacataggtttgatggaagaatttcaataacacgcgtcacagccgatttgtctctcgccaaacggagcgtgctgaacaaccccggcaaaagaaccatcattgaaagaagctctgcaaggtcttccattgcagaggtgcagtctgagattgaacgcattttcgaactggctaagtctctgcaactcgtggtgctggacgctgacacgatcaatcatcctgctcagttagctaaaacttctcttgcccccattatcgtatttgtcaaagtgagttcccccaaagtgctgcagcgactgatacgaagtcgtggtaagtcccaaatgaaacatctcaccgttcagatgatggcatacgacaaacttgtgcagtgcccacctgaatcatttgatgtgatcctggatgagaatcagctggaggacgcatgcgaacacctagcggagtatttggaggtgtactggcgcgccacacaccatccggcccccgggcctggccttcttggacctccctccgctattccaggactacagaatcagcaactcctgggcgaaaggggagaagaacactctcctctagagcgcgattcactaatgccatcggacgaagccagtgagagcagccgtcaggcctggacggggagttcacagcgcagctcacgacacctcgaagaggactatgcagacgcctaccaggatctttaccagcctcaccgccaacacactagcggactcccctcagctaacggccatgacccccaggatcgcctgctagcccaggatagtgaacacaatcacagcgatcggaattggcaaaggaacaggccctggcccaaagactcatactag

SEQ ID NO: 82714 - DNA, 1332 bp, Artificial Sequence
  derived and/or modified sequence
atgtacgacgacagttacgtaccagggtttgaggactccgaagctgggtccgcagatagctatacgagccgtcctagtctggactccgacgtctctctggaagaagatagagaaagcgccagacgtgaagtggagtcccaggcccagcagcaactggagcgtgctaagaaatactcaaatgattggtggatcggaagactggttaaagaaggcggagacatcgcattcatcccaagtccccaacggttagagtcaatcagactgaaacaggagcagaaagcccgaagatccggaaatccatccagtctgtccgacatcggcaatcgccgaagtcctccaccctctcttgccaagcagaagcagaagcaggccgagcacgtaccaccctacgacgtggtcccctcaatgagaccggtggtactggtgggcccatccttgaaaggttacgaggtgaccgatatgatgcagaaagctctgtttgacttcttgaaacaccggttcgacgggaggatttccatcacaagggtgacagcagatctgtcactggctaagcggtcagtcctgaataaccccggtaagagaaccatcattgaaaggtcttccgcaagaagcagcattgccgaggtgcagtccgaaatcgagaggatttttgaactggcaaagagcctgcaactggtggtgctggacgccgataccataaatcatcccgcacagctcgctaagacatccttagctccaattatcgtgtttgtcaaagtatcatctccaaaagtgctccagcgcctgattagaagtcgcggaaagtcccagatgaagcacttgacagtccaaatgatggcgtacgacaaactggtgcagtgtcccccagaaagctttgacgtcattcttgatgaaaaccaattggaggacgcttgcgagcacctggcagagtatctggaagtgtattggcgagccacacatcatccggcaccgggacccggtctgctcggccctccttccgctatcccaggactgcagaaccagcaactgttaggggagaggggagaagagcactccccactcgagcgcgactctttaatgccaagtgatgaagcgagtgaatcgagtcgccaggcttggacagggagctcacagcgcagctcacgccatctggaagaagactatgcagatgcctaccaggatctgtatcagccacaccggcagcacaccagcggtctacctagcgcgaacgggcatgacccccaggataggctgctggcgcaggatagcgaacataaccacagtgacaggaattggcagcggaacagaccctggcccaaggattcctactag

SEQ ID NO: 82715 - DNA, 2395 bp, Artificial Sequence
  derived and/or modified sequence
tcccccgacccggactcccccatgtatgacgactcctacgtgcccgggtttgaggactcggaggcgggttcagccgactcctacaccagccgcccatctctggactcagacgtctccctggaggaggaccgggagagtgcccggcgtgaagtagagagccaggctcagcagcagctcgaaagggccaagaagtacagcaatgactggtggatcgggcggctagtgaaagagggcggggacatcgccttcatccccagcccccagcgcctggagagcatccggctcaaacaggagcagaaggccaggagatctgggaacccttccagcctgagtgacattggcaaccgacgctcccctccgccatctctagccaagcagaagcaaaagcaggcggaacatgttcccccatatgacgtggtgccctccatgcggcctgtggtgctggtgggaccctctctgaaaggttatgaggtcacagacatgatgcagaaggctctcttcgacttcctcaaacacagatttgatggcaggatctccatcacccgagtcacagccgacctctccctggcaaagcgatctgtgctcaacaatccgggcaagaggaccatcattgagcgctcctctgcccgctccagcattgcggaagtgcagagtgagatcgagcgcatatttgagctggccaaatccctgcagctagtagtgttggacgctgacaccatcaaccacccagcacagctggccaagacctcgctggcccccatcatcgtctttgtcaaagtgtcctcaccaaaggtactccagcgtctcattcgctcccgggggaagtcacagatgaagcacctgaccgtacagatgatggcatatgataagctggttcagtgcccaccggagtcatttgatgtgattctggatgagaaccagctggaggatgcctgtgagcacctggctgagtacctggaggtttactggcgggccacgcaccacccagcccctggccccggacttctgggtcctcccagtgccatccccggacttcagaaccagcagctgctgggggagcgtggcgaggagcactccccccttgagcgggacagcttgatgccctctgatgaggccagcgagagctcccgccaagcctggacaggatcttcacagcgtagctcccgccacctggaggaggactatgcagatgcctaccaggacctgtaccagcctcaccgccaacacacctcggggctgcctagtgctaacgggcatgacccccaagaccggcttctagcccaggactcagagcacaaccacagtgaccggaactggcagcgcaaccggccttggcccaaggatagctactgacagcctcctgctgccctaccctggcaggcacaggcgcagctggctggggggcccactccaggcagggtggcgttagactggcatcaggctggcactaggctcagcccccaaaaccccctgcccagccccagcttcagggctgcctgtggtcccaaggttctgggagaaacaggggaccccctcacctcctgggcagtgacccctactaggctcccattccaggtactagctgtgtgttctgcacccctggcaccttcctctcctcccacacaggaagctgccccactgggcagtgccctcaggccaggatccccttagcagggtccttcccaccagactcagggaagggatgccccattaaagtgacaaaagggtggggtgtgggcaccatggcatgaggaagaaacaaggtccctgagcaggcacaagtcctgacagtcaagggactgctttggcatccagggcctccagtcacctcactgccatacattagaaatgagacaatcaaagcccccccagggtggcacacccatctgtttgctggggtgtggcagccacatccaagactggagcagcaggctggccacgctcgggccagagagagctcacagctgaagctcttggagggaagggctctcctcaccctgccaggaagcttcttaacatgtgacaggaccagggaccaggagcatggtgaagccaagtggcagatgggagccaacctggatgggggtttggggaaggagggcatgtgtagcagagaacttaggggggcctccttgcctttctcattcttttgccctgcatcctgtcatttctgttcttgtccctcatacatctttggagaaccgggctccagactttgttccctgactcatagctgccgcttgttaggttagggttagatggggagagacagggcacagaggacctgtctccccggctactcttgccttatggctctagtgtgtgacctacagagcatgctccacaagcccctgcctcacctcactgtcatcactaataaacatcatgcacagtc

SEQ ID NO: 82716 - DNA, 1332 bp, Artificial Sequence
  derived and/or modified sequence
atgtacgacgacagctacgtgcccggcttcgaggacagcgaggccggcagcgccgacagctacaccagcagacccagcctggacagcgacgtgagcctggaggaggacagagagagcgccagaagagaggtggagagccaggcccagcagcagctggagagagccaagaagtacagcaacgactggtggatcggcagactggtgaaggagggcggcgacatcgccttcatccccagcccccagagactggagagcatcagactgaagcaggagcagaaggccagaagaagcggcaaccccagcagcctgagcgacatcggcaacagaagaagccccccccccagcctggccaagcagaagcagaagcaggccgagcacgtgcccccctacgacgtggtgcccagcatgagacccgtggtgctggtgggccccagcctgaagggctacgaggtgaccgacatgatgcagaaggccctgttcgacttcctgaagcacagattcgacggcagaatcagcatcaccagagtgaccgccgacctgagcctggccaagagaagcgtgctgaacaaccccggcaagagaaccatcatcgagagaagcagcgccagaagcagcatcgccgaggtgcagagcgagatcgagagaatcttcgagctggccaagagcctgcagctggtggtgctggacgccgacaccatcaaccaccccgcccagctggccaagaccagcctggcccccatcatcgtgttcgtgaaggtgagcagccccaaggtgctgcagagactgatcagaagcagaggcaagagccagatgaagcacctgaccgtgcagatgatggcctacgacaagctggtgcagtgcccccccgagagcttcgacgtgatcctggacgagaaccagctggaggacgcctgcgagcacctggccgagtacctggaggtgtactggagagccacccaccaccccgcccccggccccggcctgctgggcccccccagcgccatccccggcctgcagaaccagcagctgctgggcgagagaggcgaggagcacagccccctggagagagacagcctgatgcccagcgacgaggccagcgagagcagcagacaggcctggaccggcagcagccagagaagcagcagacacctggaggaggactacgccgacgcctaccaggacctgtaccagccccacagacagcacaccagcggcctgcccagcgccaacggccacgacccccaggacagactgctggcccaggacagcgagcacaaccacagcgacagaaactggcagagaaacagaccctggcccaaggacagctactag

SEQ ID NO: 82717 - protein, 483 aa, Artificial Sequence
  derived and/or modified sequence
MSFSDSSATFLLNEGSADSYTSRPSLDSDVSLEEDRESARREVESQAQQQLERAKHKPVAFAVRTNVSYCGVLDEECPVQGSGVNFEAKDFLHIKEKYSNDWWIGRLVKEGGDIAFIPSPQRLESIRLKQEQKARRSGNPSSLSDIGNRRSPPPSLAKQKQKQAEHVPPYDVVPSMRPVVLVGPSLKGYEVTDMMQKALFDFLKHRFDGRISITRVTADLSLAKRSVLNNPGKRTIIERSSARSSIAEVQSEIERIFELAKSLQLVVLDADTINHPAQLAKTSLAPIIVFVKVSSPKVLQRLIRSRGKSQMKHLTVQMMAYDKLVQCPPESFDVILDENQLEDACEHLAEYLEVYWRATHHPAPGPGLLGPPSAIPGLQNQQLLGERGEEHSPLERDSLMPSDEASESSRQAWTGSSQRSSRHLEEDYADAYQDLYQPHRQHTSGLPSANGHDPQDRLLAQDSEHNHSDRNWQRNRPWPKDSY

SEQ ID NO: 82718 - DNA, 1452 bp, Artificial Sequence
  derived and/or modified sequence
atgtctttttcagactctagcgctacgtttcttctgaatgagggcagtgcggatagctacacatcacgtccaagtttggactccgacgtgtcccttgaagaggatcgggagagcgcacggcgtgaggtggaatcacaggcccagcagcagctggagcgagccaaacataagcccgtggccttcgccgtgagaacgaacgttagttactgcggcgtactcgatgaagagtgccctgtgcagggttccggagtgaacttcgaggccaaggactttttgcatatcaaggaaaaatactcgaacgattggtggatcggacgcctcgttaaggaagggggtgatattgcctttattccttctccacagagactcgaaagtattcgcctgaagcaggagcagaaggcgcggagatccggcaatccctcatccctgagtgatatcgggaacagaagaagcccaccaccgtcactggccaagcagaaacaaaagcaggccgagcatgtccccccctatgatgtggtcccatctatgcggcccgtggtgttagtgggtccgtcccttaaggggtacgaagtgacagacatgatgcaaaaggcccttttcgactttctcaagcacagatttgatgggcggatttctatcacgagagtgactgccgacctttctctcgccaagcgcagtgtcctgaataatcccgggaagcgaacaataatcgagcgctctagcgctaggagtagcatcgcagaggttcaaagcgagattgaaagaatctttgaactggccaaaagcctccagttagtcgtactggacgccgatactatcaatcaccctgctcaactcgccaaaaccagtctggcacccattatcgtttttgttaaggtgtcgagcccgaaggtactgcagaggctgataagaagccgaggaaagtcccaaatgaaacacttgaccgttcagatgatggcctatgataaactggtccagtgcccccctgagagttttgacgtaattttagatgaaaaccaattggaggacgcctgcgaacacttggccgaatacctggaggtgtattggcgcgcaacccatcacccagcaccaggccccggccttctcgggccgcctagtgcgatcccgggacttcaaaaccaacagctcctaggggaacgaggcgaggagcattcccccctcgagcgagactctctgatgccaagcgacgaggcctctgagtcgtcacggcaggcttggacggggagcagccaacgtagctcgcggcacctggaggaggactatgccgatgcttatcaggatctgtatcagccacaccggcaacatacaagcggattgcctagtgcgaatggacacgacccccaggatcgcttgttagcccaggattccgaacataatcatagcgaccgcaactggcagcgaaatagaccctggcccaaagatagctactag

SEQ ID NO: 82719 - DNA, 1452 bp, Artificial Sequence
  derived and/or modified sequence
atgtccttcagtgacagcagcgccaccttcctgctgaatgaaggcagcgctgacagctacaccagccggcccagcctggacagtgatgtgtccctggaggaggaccgggagagcgcccggcgggaggtggagagccaggcccagcagcagctggagcgggccaagcacaagcctgtggcctttgctgtgaggaccaacgtgtcctactgcggcgtgctggatgaggagtgccctgtgcagggcagcggcgtgaactttgaggccaaggacttcctgcacatcaaggagaagtacagcaatgactggtggattggccgcctggtgaaggagggcggggacatcgccttcatccccagcccccagaggctggagagcatccggctgaagcaggagcagaaggccaggagaagtggcaaccccagcagcctgagtgacatcggcaacagaagaagccccccacccagcctggccaagcagaagcagaagcaggccgagcacgtgcccccctatgatgtggtgcccagcatgaggcctgtggtgctggtgggccccagcctgaagggctatgaggtgacagacatgatgcagaaggccctgtttgacttcctgaagcacagatttgatggccgcatcagcatcaccagggtgacagctgacctgagcctggccaagaggtctgtgctgaacaaccctgggaagaggaccatcatcgagaggagcagcgcccggagcagcattgctgaggtgcagagcgagattgagcgcatctttgagctggccaagagcctgcagctggtggtgctggatgctgacaccatcaaccacccagcccagctggccaagaccagcctggcccccatcatcgtgtttgtgaaggtgagcagccccaaggtgctgcagaggctcatccgcagccggggcaagagccagatgaagcacctgactgtgcagatgatggcctatgacaagctggtgcagtgccccccagagagctttgatgtgatcctggatgagaaccagctggaggatgcctgtgagcacctggccgagtacctggaggtgtactggagggccacccaccacccagcccctggccctggcctgctgggccccccatctgccatccctggcctgcagaaccagcagctgctgggggagcggggggaggagcacagccccctggagcgggacagcctgatgcccagtgatgaggccagcgagagcagccggcaggcctggacaggcagcagccagaggagcagccgccacctggaggaggactatgcagatgcctaccaggacctgtaccagccccaccggcagcacaccagcggcctgcccagcgccaacggccatgacccccaggaccggctgctggcccaggacagcgagcacaaccacagcgacaggaactggcagaggaaccggccctggcccaaggacagctactag

SEQ ID NO: 82720 - DNA, 1452 bp, Artificial Sequence
  derived and/or modified sequence
atgagcttcagcgacagcagcgccaccttcctgctgaacgagggcagcgctgattcgtacacatcccggccctcgcttgactcagatgtgagcctggaggaggaccgtgagtctgctcgcagggaagtcgagtcacaggcacaacagcaactggagagggccaagcacaagcccgtcgccttcgccgtccgaaccaacgtcagttattgcggtgtgctagacgaggagtgccctgtccaggggagcggcgttaactttgaggccaaggacttcctgcacattaaggaaaaatattcaaacgattggtggatagggcgcctggtgaaggagggaggggatattgcttttataccgtcaccgcagcgtctggagtccatcagactaaagcaggaacaaaaagcccgtaggtccggcaacccctcctctctctcagatatcgggaacagacgttctcccccccctagcttggccaaacaaaagcaaaagcaagcagaacatgttcccccttatgacgtcgtgcccagcatgcgccctgtggtgctggtcgggccgtccttgaaaggctatgaggtgaccgacatgatgcagaaagccctgtttgactttcttaagcaccgttttgacggtaggatctccatcaccagagtcactgctgacctgtcccttgctaagcgctccgtactgaacaatccaggcaagcgaactatcattgagcgtagctcagctcgatccagtattgcagaagtccagagtgagattgagaggatctttgagcttgccaaaagcctgcagctggtagtcctggacgccgatacgatcaatcatcccgcccagctggccaaaacctcgctagccccaataatagtttttgtgaaggtctcttcccccaaggtgctgcagcgtctgatccgctccagggggaagtcccagatgaagcacctgacggtccagatgatggcctacgataagctggtccaatgcccgcccgaaagcttcgatgtgattcttgacgaaaaccagctggaagatgcctgcgaacacttggccgaatacttggaggtttactggcgggccacgcatcatccggcccccggccccggcctgctcggccccccaagcgcaatcccaggactgcaaaatcaacagctcctgggcgagaggggggaagagcactcccccttggagagggactctcttatgccttctgacgaggctagtgagagctcacgacaggcctggacaggatcgagtcagcgcagttcccgacatcttgaagaagattacgcagatgcctaccaagacttataccagcctcaccggcaacatacctcaggtttgccctccgctaacggtcacgacccacaggaccgactgctggcacaagattcagaacataaccattctgatagaaactggcagcggaatcggccatggcccaaagactcctactag

SEQ ID NO: 82721 - DNA, 1452 bp, Artificial Sequence
  derived and/or modified sequence
atgtcattctccgactcttcagcaactttcctccttaatgagggcagtgcagacagttacaccagcaggccaagtctcgactctgacgtctcccttgaagaagatcgcgagtctgccagacgagaggttgagtcccaggcccagcagcagctcgaacgggcaaagcataagcccgttgccttcgcagttagaacaaatgtgagctactgtggggtgctggatgaagaatgcccagtgcagggctccggcgtgaatttcgaggcgaaggacttcctgcacatcaaggagaaatacagcaacgattggtggatcggtcgcctggtcaaagaaggaggcgacattgcattcatcccgagtccgcagaggctggagtctattcgcctgaaacaagagcagaaggctaggaggtctggaaacccatctagcttgagcgacattggcaaccggagaagccctcctcccagcttggctaaacaaaaacagaagcaggctgagcacgtacctccctatgacgtcgtgccctccatgcgcccagtcgttctggtcggcccatccctgaaaggatacgaggtgacggatatgatgcagaaggccctctttgacttcctgaaacaccgcttcgatgggaggatttctatcacccgggtgacagcggatctctccctggctaagaggtccgtgctgaacaacccaggaaagcgcaccataatcgagagatcaagcgcccgaagcagtatagcagaagtgcagagcgaaattgaacgcatatttgaactggcgaaatccctccagctcgtagtgcttgacgcagacacaatcaaccacccggctcaattggctaagacctccctggctcctatcattgtgttcgtgaaagtaagttcccccaaagtgctgcagcgacttatccgctccagaggtaaatcccagatgaaacatctgaccgtgcagatgatggcctacgataagctcgtgcaatgccccccagagtcctttgacgtcatactggacgagaaccaactggaggacgcgtgcgaacacctggcggagtatttagaagtatattggcgggcaacgcaccatcccgctcccggacccggtttgctcgggcctccaagtgcaatacctgggctgcagaatcaacagcttctgggcgagcgaggggaagagcactctccactcgaaagggactcactgatgcccagcgacgaggctagtgagtcatcaagacaagcttggactgggtcctcacagaggagttccagacatcttgaggaagactatgctgatgcctatcaggacttatatcagccacaccgccagcataccagtgggctgccgtctgctaatggacatgacccacaggataggctgctagcacaggattccgaacataatcatagtgataggaattggcagcgcaataggccttggcctaaagatagctactag

SEQ ID NO: 82722 - DNA, 1872 bp, Artificial Sequence
  derived and/or modified sequence
aggcgtgcaggcgggagcagcgtgcagagcagcggccgggttttgctcccgcctcggagcccctggcccgggggagggggagaggccgctagcctggtctatgtctttttctgactccagtgcaaccttcctgctgaacgagggttcagccgactcctacaccagccgcccatctctggactcagacgtctccctggaggaggaccgggagagtgcccggcgtgaagtagagagccaggctcagcagcagctcgaaagggccaagcacaaacctgtggcatttgcggtgaggaccaatgtcagctactgtggcgtactggatgaggagtgcccagtccagggctctggagtcaactttgaggccaaagattttctgcacattaaagagaagtacagcaatgactggtggatcgggcggctagtgaaagagggcggggacatcgccttcatccccagcccccagcgcctggagagcatccggctcaaacaggagcagaaggccaggagatctgggaacccttccagcctgagtgacattggcaaccgacgctcccctccgccatctctagccaagcagaagcaaaagcaggcggaacatgttcccccatatgacgtggtgccctccatgcggcctgtggtgctggtgggaccctctctgaaaggttatgaggtcacagacatgatgcagaaggctctcttcgacttcctcaaacacagatttgatggcaggatctccatcacccgagtcacagccgacctctccctggcaaagcgatctgtgctcaacaatccgggcaagaggaccatcattgagcgctcctctgcccgctccagcattgcggaagtgcagagtgagatcgagcgcatatttgagctggccaaatccctgcagctagtagtgttggacgctgacaccatcaaccacccagcacagctggccaagacctcgctggcccccatcatcgtctttgtcaaagtgtcctcaccaaaggtactccagcgtctcattcgctcccgggggaagtcacagatgaagcacctgaccgtacagatgatggcatatgataagctggttcagtgcccaccggagtcatttgatgtgattctggatgagaaccagctggaggatgcctgtgagcacctggctgagtacctggaggtttactggcgggccacgcaccacccagcccctggccccggacttctgggtcctcccagtgccatccccggacttcagaaccagcagctgctgggggagcgtggcgaggagcactccccccttgagcgggacagcttgatgccctctgatgaggccagcgagagctcccgccaagcctggacaggatcttcacagcgtagctcccgccacctggaggaggactatgcagatgcctaccaggacctgtaccagcctcaccgccaacacacctcggggctgcctagtgctaacgggcatgacccccaagaccggcttctagcccaggactcagagcacaaccacagtgaccggaactggcagcgcaaccggccttggcccaaggatagctactgacagcctcctgctgccctaccctggcaggcacaggcgcagctggctggggggcccactccaggcagggtggcgttagactggcatcaggctggcactaggctcagcccccaaaaccccctgcccagccccagcttcagggctgcctgtggtcccaaggttctgggagaaacaggggaccccctcacctcctgggcagtgacccctactaggctcccattccaggtactagctgtgtgttctgcacccctggcaccttcctctcctcccacacaggaagctgccccactgggcagtgccctcaggccaggatccccttagca

SEQ ID NO: 82723 - DNA, 1452 bp, Artificial Sequence
  derived and/or modified sequence
atgagcttcagcgacagcagcgccaccttcctgctgaacgagggcagcgccgacagctacaccagcagacccagcctggacagcgacgtgagcctggaggaggacagagagagcgccagaagagaggtggagagccaggcccagcagcagctggagagagccaagcacaagcccgtggccttcgccgtgagaaccaacgtgagctactgcggcgtgctggacgaggagtgccccgtgcagggcagcggcgtgaacttcgaggccaaggacttcctgcacatcaaggagaagtacagcaacgactggtggatcggcagactggtgaaggagggcggcgacatcgccttcatccccagcccccagagactggagagcatcagactgaagcaggagcagaaggccagaagaagcggcaaccccagcagcctgagcgacatcggcaacagaagaagccccccccccagcctggccaagcagaagcagaagcaggccgagcacgtgcccccctacgacgtggtgcccagcatgagacccgtggtgctggtgggccccagcctgaagggctacgaggtgaccgacatgatgcagaaggccctgttcgacttcctgaagcacagattcgacggcagaatcagcatcaccagagtgaccgccgacctgagcctggccaagagaagcgtgctgaacaaccccggcaagagaaccatcatcgagagaagcagcgccagaagcagcatcgccgaggtgcagagcgagatcgagagaatcttcgagctggccaagagcctgcagctggtggtgctggacgccgacaccatcaaccaccccgcccagctggccaagaccagcctggcccccatcatcgtgttcgtgaaggtgagcagccccaaggtgctgcagagactgatcagaagcagaggcaagagccagatgaagcacctgaccgtgcagatgatggcctacgacaagctggtgcagtgcccccccgagagcttcgacgtgatcctggacgagaaccagctggaggacgcctgcgagcacctggccgagtacctggaggtgtactggagagccacccaccaccccgcccccggccccggcctgctgggcccccccagcgccatccccggcctgcagaaccagcagctgctgggcgagagaggcgaggagcacagccccctggagagagacagcctgatgcccagcgacgaggccagcgagagcagcagacaggcctggaccggcagcagccagagaagcagcagacacctggaggaggactacgccgacgcctaccaggacctgtaccagccccacagacagcacaccagcggcctgcccagcgccaacggccacgacccccaggacagactgctggcccaggacagcgagcacaaccacagcgacagaaactggcagagaaacagaccctggcccaaggacagctactag

SEQ ID NO: 82724 - protein, 471 aa, Artificial Sequence
  derived and/or modified sequence
MEGSADSYTSRPSLDSDVSLEEDRESARREVESQAQQQLERAKHKPVAFAVRTNVSYCGVLDEECPVQGSGVNFEAKDFLHIKEKYSNDWWIGRLVKEGGDIAFIPSPQRLESIRLKQEQKARRSGNPSSLSDIGNRRSPPPSLAKQKQKQAEHVPPYDVVPSMRPVVLVGPSLKGYEVTDMMQKALFDFLKHRFDGRISITRVTADLSLAKRSVLNNPGKRTIIERSSARSSIAEVQSEIERIFELAKSLQLVVLDADTINHPAQLAKTSLAPIIVFVKVSSPKVLQRLIRSRGKSQMKHLTVQMMAYDKLVQCPPESFDVILDENQLEDACEHLAEYLEVYWRATHHPAPGPGLLGPPSAIPGLQNQQLLGERGEEHSPLERDSLMPSDEASESSRQAWTGSSQRSSRHLEEDYADAYQDLYQPHRQHTSGLPSANGHDPQDRLLAQDSEHNHSDRNWQRNRPWPKDSY

SEQ ID NO: 82725 - DNA, 1416 bp, Artificial Sequence
  derived and/or modified sequence
atggaaggctctgccgattcttacacctcccgcccctccttagacagcgacgtgagcctagaagaggacagagaaagcgcccgccgagaagtagagagccaggcccagcagcagctagagcgcgcaaagcataaaccggtggctttcgccgtacggaccaacgtcagttactgcggcgtgctagacgaagaatgccccgtacaagggtccggagtgaatttcgaggctaaggatttcctgcacatcaaggaaaagtactccaatgattggtggattgggaggctcgtgaaagagggcggtgatattgcctttattccaagcccacagcgactggaaagcattcgtctaaaacaggagcaaaaggccagaaggtcaggaaatcccagctcactctcagatatcggaaataggcgctcccctccccccagcctcgccaagcagaaacagaaacaggccgaacacgtaccgccatatgacgtcgtcccttccatgcgcccagtggtactcgtgggaccgagcctaaaaggctacgaggttactgacatgatgcagaaagcactttttgactttctcaagcacaggtttgacgggagaatctccatcacaagagtgactgccgatctctccctcgcgaagcggtctgtccttaataaccccgggaaacggactattattgagagaagctctgctcggagttctatagctgaagtccaaagcgagattgagcgcatcttcgaactagccaagtccttacaactagtcgtcctggacgctgatacaattaaccatcccgcacaactcgccaagacctcgctggcccccatcatcgttttcgtgaaggtgtccagccccaaggtattgcagcggctgatcaggtcacgtgggaaatcccagatgaagcacctgacagtccagatgatggcttacgataaactagtacagtgccctcctgagagcttcgacgtgattcttgacgagaaccaactggaagacgcttgcgagcatctcgctgaatatctagaggtttactggcgagctacgcaccatccggctccagggccaggtcttctggggcctccaagtgcaataccgggcctacagaatcaacagttgttgggtgagagaggcgaagaacatagccccttggaaagagacagccttatgcccagtgatgaagcttcagaaagttccagacaagcatggacgggatcctcccaacgaagcagtcggcaccttgaagaagactatgccgacgcataccaggacctctaccagccacaccgccaacacaccagcggcttaccatccgctaacggccatgacccgcaggatcgtctgctggcacaggatagtgagcacaatcactccgatcggaattggcagaggaatcgcccttggccaaaggattcttattag

SEQ ID NO: 82726 - DNA, 1416 bp, Artificial Sequence
  derived and/or modified sequence
atggagggcagcgctgacagctacaccagccggcccagcctggacagtgatgtgtccctggaggaggaccgggagagcgcccggcgggaggtggagagccaggcccagcagcagctggagcgggccaagcacaagcctgtggcctttgctgtgaggaccaacgtgtcctactgcggcgtgctggatgaggagtgccctgtgcagggcagcggcgtgaactttgaggccaaggacttcctgcacatcaaggagaagtacagcaatgactggtggattggccgcctggtgaaggagggcggggacatcgccttcatccccagcccccagaggctggagagcatccggctgaagcaggagcagaaggccaggagaagtggcaaccccagcagcctgagtgacatcggcaacagaagaagccccccacccagcctggccaagcagaagcagaagcaggccgagcacgtgcccccctatgatgtggtgcccagcatgaggcctgtggtgctggtgggccccagcctgaagggctatgaggtgacagacatgatgcagaaggccctgtttgacttcctgaagcacagatttgatggccgcatcagcatcaccagggtgacagctgacctgagcctggccaagaggtctgtgctgaacaaccctgggaagaggaccatcatcgagaggagcagcgcccggagcagcattgctgaggtgcagagcgagattgagcgcatctttgagctggccaagagcctgcagctggtggtgctggatgctgacaccatcaaccacccagcccagctggccaagaccagcctggcccccatcatcgtgtttgtgaaggtgagcagccccaaggtgctgcagaggctcatccgcagccggggcaagagccagatgaagcacctgactgtgcagatgatggcctatgacaagctggtgcagtgccccccagagagctttgatgtgatcctggatgagaaccagctggaggatgcctgtgagcacctggccgagtacctggaggtgtactggagggccacccaccacccagcccctggccctggcctgctgggccccccatctgccatccctggcctgcagaaccagcagctgctgggggagcggggggaggagcacagccccctggagcgggacagcctgatgcccagtgatgaggccagcgagagcagccggcaggcctggacaggcagcagccagaggagcagccgccacctggaggaggactatgcagatgcctaccaggacctgtaccagccccaccggcagcacaccagcggcctgcccagcgccaacggccatgacccccaggaccggctgctggcccaggacagcgagcacaaccacagcgacaggaactggcagaggaaccggccctggcccaaggacagctactag

SEQ ID NO: 82727 - DNA, 1416 bp, Artificial Sequence
  derived and/or modified sequence
atggagggcagcgccgacagctacaccagccggcccagcctggactcagatgtgtctttagaagaagatcgcgagtcagcaaggcgcgaagtggagagccaagcccagcagcagctggaaagggccaagcacaagccagtggcgtttgcggtgcgcaccaacgtaagttactgtggagtgctggatgaagaatgccccgttcaggggagcggcgttaattttgaggctaaggatttccttcatattaaagagaagtactcaaatgactggtggatcggaagactggtgaaagagggaggtgatatcgcattcataccaagcccccagcggctagaatctataaggctgaaacaggagcaaaaggctcgccggtcaggcaatccaagctctctaagtgacataggtaatagacgatccccaccacctagtcttgctaagcaaaagcaaaaacaggccgaacatgtcccaccatatgatgtcgtgccatccatgcgccctgtggtcctggttgggcccagcctcaagggttatgaagtcacagatatgatgcagaaggccctatttgattttttaaagcacaggtttgacggacggatctccattactcgtgtgactgctgacttatccctcgctaaacggtccgttttgaataatccaggcaaacggaccataatagagaggtcttcagctcggtccagtatcgctgaagtgcaatctgagatcgaaaggatcttcgaactggcaaagagcctgcagcttgtggttctggatgctgatactatcaaccaccctgctcaactggcaaagacctctctggcccccattatagtcttcgttaaggtttccagccctaaggtgctgcagcgactgatccggagccggggaaaatctcagatgaagcacctcacggttcagatgatggcctatgataaacttgtccagtgccctcccgagtccttcgacgtcattctggatgagaaccaactcgaggacgcatgcgagcatctggcggagtatctcgaggtctattggcgtgctacacaccatcctgctcctgggcctgggctgctgggccccccttctgcaattcccggtttacaaaatcagcagctcttgggcgagcggggagaggagcacagccctcttgagcgggactcattaatgccttccgacgaggccagcgaatcttcgcgtcaagcttggactggcagcagtcaaaggtcgtctcgtcatctcgaggaagattacgctgatgcctaccaggatctttaccagccccatcgacagcacactagcggtctgccatccgctaacggacatgaccctcaggaccgcctgctagcgcaggactccgaacacaaccactctgatagaaattggcaacggaaccgcccctggccaaaagacagctactag

SEQ ID NO: 82728 - DNA, 1416 bp, Artificial Sequence
  derived and/or modified sequence
atggagggaagtgctgattcttatacctcgcgcccttccttggactccgatgtttctctggaggaagacagagagagcgctcggcgtgaggttgaaagtcaagcgcagcaacaactagagcgcgcaaagcacaaacctgtcgcttttgcggtgaggaccaacgtgtcttactgcggggtgctggacgaggagtgccccgtgcaggggtccggcgtgaattttgaggccaaggatttcttacacatcaaggaaaagtattccaatgattggtggatcggcaggctggtgaaagagggtggggatattgcctttattccgagtccacaacgactggagagcatccggctcaagcaggagcaaaaggctaggcgcagcggcaacccaagttcattgagtgatatcggaaaccgcagatccccaccaccaagcctggctaagcagaaacagaagcaggccgaacacgtgcccccttatgacgtcgttccatcaatgagaccagtggtgctcgtgggcccttccctgaaaggatacgaagttaccgacatgatgcagaaggctctcttcgattttctcaagcacagattcgatggacggatttctatcacaagggtcaccgccgatctgtctctcgcaaaacggtccgtccttaacaatccgggaaagcgcacgattattgagaggtcatcggccagatcctctatagctgaggtgcagtcagagatagaacggatttttgagctggccaagagcctccagctcgtcgtccttgatgccgataccataaatcaccctgcacagctggccaagacatcactggcccctatcatcgtgttcgtgaaggtgtcctccccaaaagtattgcagcgattaatccggagccgaggcaaatcccagatgaagcacctgaccgtgcaaatgatggcatatgataagctggtccagtgccccccagagagctttgacgtgattttagatgaaaaccagctagaagatgcatgtgagcatctggccgagtaccttgaggtgtattggcgcgctactcatcaccctgctccaggaccagggctcctgggacctccttccgcgattccaggtctccagaaccaacaattgctgggtgaacggggagaggagcattcccctctggagcgggattctctcatgccttccgacgaggcctcagagtcctccaggcaggcttggaccgggtccagccagagatcaagccgacacctcgaagaggactacgccgatgcttatcaggacctgtaccagcctcatcggcaacacacaagtggtttaccgtcagcaaacggtcacgatccacaggacaggctgctggcacaggacagcgagcacaaccactccgatcgcaattggcagagaaataggccatggcccaaggactcgtattag

SEQ ID NO: 82729 - DNA, 1814 bp, Artificial Sequence
  derived and/or modified sequence
actgacccgaggagcggtcccgcgactctgtactccctgctgcccagtcccggccaggacgctgcccggcttagctggggcgcccctcgagaccaggatggagggttcagccgactcctacaccagccgcccatctctggactcagacgtctccctggaggaggaccgggagagtgcccggcgtgaagtagagagccaggctcagcagcagctcgaaagggccaagcacaaacctgtggcatttgcggtgaggaccaatgtcagctactgtggcgtactggatgaggagtgcccagtccagggctctggagtcaactttgaggccaaagattttctgcacattaaagagaagtacagcaatgactggtggatcgggcggctagtgaaagagggcggggacatcgccttcatccccagcccccagcgcctggagagcatccggctcaaacaggagcagaaggccaggagatctgggaacccttccagcctgagtgacattggcaaccgacgctcccctccgccatctctagccaagcagaagcaaaagcaggcggaacatgttcccccatatgacgtggtgccctccatgcggcctgtggtgctggtgggaccctctctgaaaggttatgaggtcacagacatgatgcagaaggctctcttcgacttcctcaaacacagatttgatggcaggatctccatcacccgagtcacagccgacctctccctggcaaagcgatctgtgctcaacaatccgggcaagaggaccatcattgagcgctcctctgcccgctccagcattgcggaagtgcagagtgagatcgagcgcatatttgagctggccaaatccctgcagctagtagtgttggacgctgacaccatcaaccacccagcacagctggccaagacctcgctggcccccatcatcgtctttgtcaaagtgtcctcaccaaaggtactccagcgtctcattcgctcccgggggaagtcacagatgaagcacctgaccgtacagatgatggcatatgataagctggttcagtgcccaccggagtcatttgatgtgattctggatgagaaccagctggaggatgcctgtgagcacctggctgagtacctggaggtttactggcgggccacgcaccacccagcccctggccccggacttctgggtcctcccagtgccatccccggacttcagaaccagcagctgctgggggagcgtggcgaggagcactccccccttgagcgggacagcttgatgccctctgatgaggccagcgagagctcccgccaagcctggacaggatcttcacagcgtagctcccgccacctggaggaggactatgcagatgcctaccaggacctgtaccagcctcaccgccaacacacctcggggctgcctagtgctaacgggcatgacccccaagaccggcttctagcccaggactcagagcacaaccacagtgaccggaactggcagcgcaaccggccttggcccaaggatagctactgacagcctcctgctgccctaccctggcaggcacaggcgcagctggctggggggcccactccaggcagggtggcgttagactggcatcaggctggcactaggctcagcccccaaaaccccctgcccagccccagcttcagggctgcctgtggtcccaaggttctgggagaaacaggggaccccctcacctcctgggcagtgacccctactaggctcccattccaggtactagctgtgtgttctgcacccctggcaccttcctctcctcccacacaggaagctgccccactgggcagtgccctca

SEQ ID NO: 82730 - DNA, 1416 bp, Artificial Sequence
  derived and/or modified sequence
atggagggcagcgccgacagctacaccagcagacccagcctggacagcgacgtgagcctggaggaggacagagagagcgccagaagagaggtggagagccaggcccagcagcagctggagagagccaagcacaagcccgtggccttcgccgtgagaaccaacgtgagctactgcggcgtgctggacgaggagtgccccgtgcagggcagcggcgtgaacttcgaggccaaggacttcctgcacatcaaggagaagtacagcaacgactggtggatcggcagactggtgaaggagggcggcgacatcgccttcatccccagcccccagagactggagagcatcagactgaagcaggagcagaaggccagaagaagcggcaaccccagcagcctgagcgacatcggcaacagaagaagccccccccccagcctggccaagcagaagcagaagcaggccgagcacgtgcccccctacgacgtggtgcccagcatgagacccgtggtgctggtgggccccagcctgaagggctacgaggtgaccgacatgatgcagaaggccctgttcgacttcctgaagcacagattcgacggcagaatcagcatcaccagagtgaccgccgacctgagcctggccaagagaagcgtgctgaacaaccccggcaagagaaccatcatcgagagaagcagcgccagaagcagcatcgccgaggtgcagagcgagatcgagagaatcttcgagctggccaagagcctgcagctggtggtgctggacgccgacaccatcaaccaccccgcccagctggccaagaccagcctggcccccatcatcgtgttcgtgaaggtgagcagccccaaggtgctgcagagactgatcagaagcagaggcaagagccagatgaagcacctgaccgtgcagatgatggcctacgacaagctggtgcagtgcccccccgagagcttcgacgtgatcctggacgagaaccagctggaggacgcctgcgagcacctggccgagtacctggaggtgtactggagagccacccaccaccccgcccccggccccggcctgctgggcccccccagcgccatccccggcctgcagaaccagcagctgctgggcgagagaggcgaggagcacagccccctggagagagacagcctgatgcccagcgacgaggccagcgagagcagcagacaggcctggaccggcagcagccagagaagcagcagacacctggaggaggactacgccgacgcctaccaggacctgtaccagccccacagacagcacaccagcggcctgcccagcgccaacggccacgacccccaggacagactgctggcccaggacagcgagcacaaccacagcgacagaaactggcagagaaacagaccctggcccaaggacagctactag

SEQ ID NO: 82731 - protein, 217 aa, Artificial Sequence
  derived and/or modified sequence
MDPQCTMGLSNILFVMAFLLSANFSQPEIVPISNITENVYINLTCSSIHGYPEPKKMSVLLRTKNSTIEYDGVMQKSQDNVTELYDVSISLSVSFPDVTSNMTIFCILETDKTRLLSSPFSIELEDPQPPPDHIPWITAVLPTVIICVMVFCLILWKWKKKKRPRNSYKCGTNTMEREESEQTKKREKIHIPERSDEAQRVFKSSKTSSCDKSDTCF

SEQ ID NO: 82732 - DNA, 351 bp, Artificial Sequence
  derived and/or modified sequence
atggaccctcagtgcaccatgggcctctcaaatattctttttgtgatggccttcctcctctccgaactagaggacccccaaccaccacctgatcatatcccctggataacggcagtattgcccacagtgataatttgtgtgatggtattctgcctgatcctgtggaagtggaaaaaaaaaaagagaccaaggaattcttataaatgcgggacaaatacaatggaacgagaggaatcagaacaaacaaagaaaagggagaagattcacatccccgagcgttccgacgaggcgcagcgagtgttcaaatcttccaaaacctctagctgtgataagtccgacacttgtttttag

SEQ ID NO: 82733 - DNA, 654 bp, Artificial Sequence
  derived and/or modified sequence
atggacccgcagtgtaccatggggcttagtaatattctgtttgtcatggcattcctgttgagcgcaaatttcagtcagcccgagattgtcccaatatcaaacatcactgagaacgtgtatatcaatttaacatgttcttctattcacgggtatcctgaaccaaagaagatgtccgtgttgctgagaaccaaaaatagcacgatcgagtatgatggtgttatgcaaaagtcccaagataacgtcaccgagttgtatgacgtaagcatctccctgtctgtgtcatttccagacgtcaccagcaacatgaccatcttctgcattctggagacagacaaaacccggctcctttcgtcccccttctcgattgaacttgaagaccctcagcctccacccgatcatatcccgtggattacggctgtgctccccaccgtcatcatctgtgttatggtgttttgtttaatcctttggaaatggaaaaaaaagaaaaggccacggaactcatacaagtgcggcactaacacaatggagagggaggagtctgagcaaacaaagaaacgggaaaaaattcacattcccgagcgcagcgacgaggcgcagagggtttttaagtcctcaaagacaagctcttgcgataagtcagatacttgcttttag

SEQ ID NO: 82734 - DNA, 351 bp, Artificial Sequence
  derived and/or modified sequence
atggacccccagtgcaccatgggcctgagcaacatcctgtttgtgatggccttcctgctgtctgagctggaggacccccagcccccaccagaccacatcccctggatcacagctgtgctgcccaccgtcatcatctgtgtgatggtgttctgcctgatcctgtggaagtggaagaagaagaagaggcccaggaacagctacaagtgtggcaccaacaccatggagcgggaggagagcgagcagaccaagaagcgggagaagatccacatccctgagaggagtgatgaggcccagagggtcttcaagagcagcaagaccagcagctgtgacaagagtgacacctgcttctag

SEQ ID NO: 82735 - DNA, 654 bp, Artificial Sequence
  derived and/or modified sequence
atggacccccagtgcaccatgggcctgagcaacatcctgtttgtgatggccttcctgctgagcgccaacttcagccagcctgagatcgtgcccatcagcaacatcacagaaaatgtgtacatcaacctgacctgcagcagcatccacggctacccagagcccaagaagatgtctgtgctgctgcggaccaagaacagcaccatcgagtatgatggagtgatgcagaagagccaggacaacgtgacagagctgtatgatgtgtccatcagcctgtctgtgtccttcccagatgtgaccagcaacatgaccatcttctgcatcctggagacagacaagacccggctgctgagcagccccttcagcattgagctggaggacccccagcccccaccagaccacatcccctggatcacagctgtgctgcccaccgtcatcatctgtgtgatggtgttctgcctgatcctgtggaagtggaagaagaagaagaggcccagaaattcctacaagtgtggcaccaacaccatggagcgggaggagagcgagcagaccaagaagcgggagaagatccacatccctgagaggagtgatgaggcccagagggtcttcaagagcagcaagaccagcagctgtgacaagagtgacacctgcttctag

SEQ ID NO: 82736 - DNA, 351 bp, Artificial Sequence
  derived and/or modified sequence
atggacccccagtgcaccatgggcctgagcaacatcctgttcgtgatggcttttctgttgagtgaattggaggatcctcagccccctccagaccacatcccatggatcaccgcagtgctgccaacagtcattatatgtgtcatggtgttctgtctgattctgtggaaatggaagaagaaaaaacggccaaggaattcctacaagtgcggaaccaatacaatggaaagggaagagtccgaacaaacaaaaaaaagggagaaaatacatattcctgaacgctccgacgaggcccaaagagtattcaaatcatccaaaacatctagttgcgataaaagcgacacttgcttttag

SEQ ID NO: 82737 - DNA, 654 bp, Artificial Sequence
  derived and/or modified sequence
atggacccccagtgcaccatgggcctgagcaacatcctgttcgtgatggccttcctgctctcagccaatttctcacagcctgaaatcgttcctatcagcaatataacggagaatgtctacataaacctgacttgcagctcgattcacggttaccctgagccaaaaaagatgtcagtcctgctacggacaaaaaacagcacgattgagtatgatggcgtgatgcagaagagccaggataatgtaaccgaactgtacgacgtctcgatttcgttatccgtctccttcccagacgtgacttccaatatgacaatcttctgtatcctcgagactgataagacgcggttattgagctcacctttcagcatcgagttggaagatccccagcccccccccgatcacattccctggatcaccgccgtgctgcccacggtgatcatatgcgtgatggtgttttgcctgattttgtggaaatggaagaaaaaaaaacgcccccggaactcttataagtgtggcacaaacacgatggagagggaagagtccgaacagacgaagaagcgcgaaaaaattcacattccggagaggtctgatgaggcgcagagagtgtttaaatcttctaagaccagttcatgtgacaagtccgacacatgtttctag

SEQ ID NO: 82738 - DNA, 351 bp, Artificial Sequence
  derived and/or modified sequence
atggatccgcaatgcacaatgggcctgagtaatatcctgttcgtcatggcctttctactgtcagagctggaggatcctcagcctccacccgatcacattccctggataacagcagttctgcccaccgttattatttgcgtaatggtgttttgtttaattctgtggaaatggaagaaaaaaaaacggcctcgcaacagttacaaatgcggtaccaacaccatggagcgggaggaatccgaacagacaaaaaagagagaaaagattcacatccccgagcggtctgacgaggcccagagggtttttaagtcatctaaaactagttcctgcgataaatccgatacgtgcttttag

SEQ ID NO: 82739 - DNA, 654 bp, Artificial Sequence
  derived and/or modified sequence
atggacccgcagtgcaccatgggcctcagtaatattctgtttgtgatggcatttcttctgtccgccaacttcagtcagcccgagattgtcccaatctccaatattactgagaacgtgtatattaatctgacctgttcatctatacacggatacccagagcccaaaaagatgtctgtgcttttacgtacaaaaaactcaacgattgagtacgacggcgttatgcagaagagtcaagacaacgtgaccgaactttacgacgtctccatctccctctccgtgtctttccctgatgtgacaagtaacatgaccatattttgtatcctcgagacagacaaaacccggctcctcagctctcccttctctatcgagctggaggatccccagcctccccctgaccacattccatggattacggccgtactgcccactgttataatttgcgtcatggttttctgtctgattctctggaaatggaaaaaaaagaaacgtcctcgcaactcttacaagtgcgggacaaataccatggagagggaagaaagtgaacagactaagaagcgcgaaaagatccatattccggaacggtcggacgaggcacagagagtgtttaagtccagcaaaacctcctcttgtgacaagagcgatacatgcttctag

SEQ ID NO: 82740 - DNA, 2068 bp, Artificial Sequence
  derived and/or modified sequence
ggaaggcttgcacagggtgaaagctttgcttctctgctgctgtaacagggactagcacagacacacggatgagtggggtcatttccagatattaggtcacagcagaagcagccaaaatggatccccagtgcactatgggactgagtaacattctctttgtgatggccttcctgctctctgagcttgaggaccctcagcctcccccagaccacattccttggattacagctgtacttccaacagttattatatgtgtgatggttttctgtctaattctatggaaatggaagaagaagaagcggcctcgcaactcttataaatgtggaaccaacacaatggagagggaagagagtgaacagaccaagaaaagagaaaaaatccatatacctgaaagatctgatgaagcccagcgtgtttttaaaagttcgaagacatcttcatgcgacaaaagtgatacatgtttttaattaaagagtaaagcccatacaagtattcattttttctaccctttcctttgtaagttcctgggcaacctttttgatttcttccagaaggcaaaaagacattaccatgagtaataagggggctccaggactccctctaagtggaatagcctccctgtaactccagctctgctccgtatgccaagaggagactttaattctcttactgcttcttttcacttcagagcacacttatgggccaagcccagcttaatggctcatgacctggaaataaaatttaggaccaatacctcctccagatcagattcttctcttaatttcatagattgtgttttttttttaaatagacctctcaatttctggaaaactgccttttatctgcccagaattctaagctggtgccccactgaattttgtgtgtacctgtgactaaacaactacctcctcagtctgggtgggacttatgtatttatgaccttatagtgttaatatcttgaaacatagagatctatgtactgtaatagtgtgattactatgctctagagaaaagtctacccctgctaaggagttctcatccctctgtcagggtcagtaaggaaaacggtggcctagggtacaggcaacaatgagcagaccaacctaaatttggggaaattaggagaggcagagatagaacctggagccacttctatctgggctgttgctaatattgaggaggcttgccccacccaacaagccatagtggagagaactgaataaacaggaaaatgccagagcttgtgaaccctgtttctcttgaagaactgactagtgagatggcctggggaagctgtgaaagaaccaaaagagatcacaatactcaaaagagagagagagagaaaaaagagagatcttgatccacagaaatacatgaaatgtctggtctgtccaccccatcaacaagtcttgaaacaagcaacagatggatagtctgtccaaatggacataagacagacagcagtttccctggtggtcagggaggggttttggtgatacccaagttattgggatgtcatcttcctggaagcagagctggggagggagagccatcaccttgataatgggatgaatggaaggaggcttaggactttccactcctggctgagagaggaagagctgcaacggaattaggaagaccaagacacagatcacccggggcttacttagcctacagatgtcctacgggaacgtgggctggcccagcatagggctagcaaatttgagttggatgattgtttttgctcaaggcaaccagaggaaacttgcatacagagacagatatactgggagaaatgactttgaaaacctggctctaaggtgggatcactaagggatggggcagtctctgcccaaacataaagagaactctggggagcctgagccacaaaaatgttcctttattttatgtaaaccctcaagggttatagactgccatgctagacaagcttgtccatgtaatattcccatgtttttaccctgcccctgccttgattagactcctagcacctggctagtttctaacatgttttgtgcagcacagtttttaataaatgcttgttacattc

SEQ ID NO: 82741 - DNA, 1572 bp, Artificial Sequence
  derived and/or modified sequence
attgccgaggaaggcttgcacagggtgaaagctttgcttctctgctgctgtaacagggactagcacagacacacggatgagtggggtcatttccagatattaggtcacagcagaagcagccaaaatggatccccagtgcactatgggactgagtaacattctctttgtgatggccttcctgctctctgctaacttcagtcaacctgaaatagtaccaatttctaatataacagaaaatgtgtacataaatttgacctgctcatctatacacggttacccagaacctaagaagatgagtgttttgctaagaaccaagaattcaactatcgagtatgatggtgttatgcagaaatctcaagataatgtcacagaactgtacgacgtttccatcagcttgtctgtttcattccctgatgttacgagcaatatgaccatcttctgtattctggaaactgacaagacgcggcttttatcttcacctttctctatagagcttgaggaccctcagcctcccccagaccacattccttggattacagctgtacttccaacagttattatatgtgtgatggttttctgtctaattctatggaaatggaagaagaagaagcggcctcgcaactcttataaatgtggaaccaacacaatggagagggaagagagtgaacagaccaagaaaagagaaaaaatccatatacctgaaagatctgatgaagcccagcgtgtttttaaaagttcgaagacatcttcatgcgacaaaagtgatacatgtttttaattaaagagtaaagcccatacaagtattcattttttctaccctttcctttgtaagttcctgggcaacctttttgatttcttccagaaggcaaaaagacattaccatgagtaataagggggctccaggactccctctaagtggaatagcctccctgtaactccagctctgctccgtatgccaagaggagactttaattctcttactgcttcttttcacttcagagcacacttatgggccaagcccagcttaatggctcatgacctggaaataaaatttaggaccaatacctcctccagatcagattcttctcttaatttcatagattgtgttttttttttaaatagacctctcaatttctggaaaactgccttttatctgcccagaattctaagctggtgccccactgaattttgtgtgtacctgtgactaaacaactacctcctcagtctgggtgggacttatgtatttatgaccttatagtgttaatatcttgaaacatagagatctatgtactgtaatagtgtgattactatgctctagagaaaagtctacccctgctaaggagttctcatccctctgtcagggtcagtaaggaaaacggtggcctagggtacaggcaacaatgagcagaccaacctaaatttggggaaattaggagaggcagagatagaacctggagccacttctatctgggctgttgctaatattgaggaggcttgccccacccaacaagccatagtggagagaactgaataaacaggaaaatgccagagcttgtgaaccctgtttctctt

SEQ ID NO: 82742 - DNA, 351 bp, Artificial Sequence
  derived and/or modified sequence
atggacccccagtgcaccatgggcctgagcaacatcctgttcgtgatggccttcctgctgagcgagctggaggacccccagcccccccccgaccacatcccctggatcaccgccgtgctgcccaccgtgatcatctgcgtgatggtgttctgcctgatcctgtggaagtggaagaagaagaagagacccagaaacagctacaagtgcggcaccaacaccatggagagagaggagagcgagcagaccaagaagagagagaagatccacatccccgagagaagcgacgaggcccagagagtgttcaagagcagcaagaccagcagctgcgacaagagcgacacctgcttctag

SEQ ID NO: 82743 - DNA, 654 bp, Artificial Sequence
  derived and/or modified sequence
atggacccccagtgcaccatgggcctgagcaacatcctgttcgtgatggccttcctgctgagcgccaacttcagccagcccgagatcgtgcccatcagcaacatcaccgagaacgtgtacatcaacctgacctgcagcagcatccacggctaccccgagcccaagaagatgagcgtgctgctgagaaccaagaacagcaccatcgagtacgacggcgtgatgcagaagagccaggacaacgtgaccgagctgtacgacgtgagcatcagcctgagcgtgagcttccccgacgtgaccagcaacatgaccatcttctgcatcctggagaccgacaagaccagactgctgagcagccccttcagcatcgagctggaggacccccagcccccccccgaccacatcccctggatcaccgccgtgctgcccaccgtgatcatctgcgtgatggtgttctgcctgatcctgtggaagtggaagaagaagaagagacccagaaacagctacaagtgcggcaccaacaccatggagagagaggagagcgagcagaccaagaagagagagaagatccacatccccgagagaagcgacgaggcccagagagtgttcaagagcagcaagaccagcagctgcgacaagagcgacacctgcttctag

SEQ ID NO: 82744 - protein, 116 aa, Artificial Sequence
  derived and/or modified sequence
MDPQCTMGLSNILFVMAFLLSELEDPQPPPDHIPWITAVLPTVIICVMVFCLILWKWKKKKRPRNSYKCGTNTMEREESEQTKKREKIHIPERSDEAQRVFKSSKTSSCDKSDTCF

SEQ ID NO: 82745 - DNA, 744 bp, Artificial Sequence
  derived and/or modified sequence
atggggaggactagcttcgatagcgactcttggacattgaggctgcacaatctccaaatcaaggataaaggtctctaccagtgcattatacaccacaaaaagcccacaggaatgatcagaatccaccagatgaatagtgaactcagcgtactcgcaaatttctcgcagccagagatcgtgcctatcagcaatatcaccgaaaatgtgtatattaaccttacatgcagctccattcacggttatccagaacccaagaaaatgtccgtgctgctccgcacaaagaattctacaattgagtacgatggcgtaatgcaaaagtcccaggataatgtgacagaactgtacgacgttagcattagcctcagcgtgtccttccctgatgtgacatcaaatatgacaattttctgtatcctagagacagataaaacccgcctcttgagttctccattctctattgagcttgaggaccctcaaccacctcctgatcatatcccttggattaccgctgtcctgcccaccgtaatcatatgcgtgatggttttttgcctaattctctggaagtggaagaagaagaaacgacccaggaatagctataagtgcggcaccaacaccatggagagggaggagtctgagcagactaagaagcgggagaagattcatatacccgagagaagtgatgaagcacagagggtgtttaagtcttccaagacctcttcatgcgataaatctgatacttgcttctag

SEQ ID NO: 82746 - DNA, 744 bp, Artificial Sequence
  derived and/or modified sequence
atgggccgcaccagctttgacagcgacagctggaccctgcggctgcacaacctgcagatcaaggacaagggcctgtaccagtgcatcatccaccacaagaagcccaccggcatgatccgcatccaccagatgaacagcgagctgtctgtgctggccaacttcagccagcctgagatcgtgcccatcagcaacatcacagaaaatgtgtacatcaacctgacctgcagcagcatccacggctacccagagcccaagaagatgtctgtgctgctgcggaccaagaacagcaccatcgagtatgatggagtgatgcagaagagccaggacaacgtgacagagctgtatgatgtgtccatcagcctgtctgtgtccttcccagatgtgaccagcaacatgaccatcttctgcatcctggagacagacaagacccggctgctgagcagccccttcagcattgagctggaggacccccagcccccaccagaccacatcccctggatcacagctgtgctgcccaccgtcatcatctgtgtgatggtgttctgcctgatcctgtggaagtggaagaagaagaagaggcccagaaattcctacaagtgtggcaccaacaccatggagcgggaggagagcgagcagaccaagaagcgggagaagatccacatccctgagaggagtgatgaggcccagagggtcttcaagagcagcaagaccagcagctgtgacaagagtgacacctgcttctag

SEQ ID NO: 82747 - DNA, 744 bp, Artificial Sequence
  derived and/or modified sequence
atgggccggaccagcttcgacagcgacagctggaccctgcggctgcacaaccttcagattaaggacaagggactataccagtgtatcattcatcataaaaaacccaccggtatgattcgaatccaccaaatgaatagcgagctgagtgtactggccaactttagccaacccgagattgtaccaatttctaatatcactgagaacgtgtatattaacctcacttgcagcagcattcatgggtaccccgagcccaaaaaaatgagcgtcctattgaggaccaagaacagcaccattgaatatgacggtgtcatgcagaagagtcaagacaatgtgactgaactctatgacgtgagcatttctctgtcagtatccttccccgacgttaccagcaacatgacaatattctgcatcctggagaccgacaagactcgcctgttatctagccctttttccatcgaattggaggatccacaacctcccccagatcacataccctggataacagctgtgttgcccacggtgattatctgtgttatggtcttttgtttgatactgtggaagtggaagaagaagaagcggccaaggaatagttataaatgtggcacaaacacaatggagagggaggaaagcgagcagacaaagaaacgggagaagatccatatccccgaacgctccgatgaggcccagcgggtgttcaaatcaagcaagactagtagctgcgacaaatctgatacatgcttttag

SEQ ID NO: 82748 - DNA, 744 bp, Artificial Sequence
  derived and/or modified sequence
atgggccgaacaagttttgacagcgacagctggacgctgagattgcacaatctccagattaaagacaaggggctctaccagtgtatcattcaccacaagaagccgacgggcatgattcgcatccatcagatgaattccgaactatcagttctggctaacttcagccagccagagattgtgccgatttctaacatcacggaaaacgtgtatatcaaccttacctgcagttccatccatggttatcccgaaccaaagaagatgagtgtgcttctgaggacaaaaaactctacaattgagtatgatggcgtaatgcagaagtcacaggacaacgtcacggaactctacgacgtctcaatctcactatctgtgagcttcccagatgttacatcgaacatgacgattttctgcattctcgagactgacaagacaagactattaagctcccccttttccatcgaactagaggacccgcagccacccccagaccacatcccgtggatcaccgccgtcctccccacagtaatcatttgtgtgatggtcttttgtttaattctgtggaagtggaagaaaaaaaagcgccctagaaatagctacaaatgtggaacaaacacaatggagagggaagagtccgaacagacaaaaaagagagaaaagattcacatcccggagaggtctgatgaggctcagcgcgtgttcaagagtagtaaaacaagctcatgcgacaagtctgatacctgcttctag

SEQ ID NO: 82749 - DNA, 744 bp, Artificial Sequence
  derived and/or modified sequence
atgggcagaaccagcttcgacagcgacagctggaccctgagactgcacaacctgcagatcaaggacaagggcctgtaccagtgcatcatccaccacaagaagcccaccggcatgatcagaatccaccagatgaacagcgagctgagcgtgctggccaacttcagccagcccgagatcgtgcccatcagcaacatcaccgagaacgtgtacatcaacctgacctgcagcagcatccacggctaccccgagcccaagaagatgagcgtgctgctgagaaccaagaacagcaccatcgagtacgacggcgtgatgcagaagagccaggacaacgtgaccgagctgtacgacgtgagcatcagcctgagcgtgagcttccccgacgtgaccagcaacatgaccatcttctgcatcctggagaccgacaagaccagactgctgagcagccccttcagcatcgagctggaggacccccagcccccccccgaccacatcccctggatcaccgccgtgctgcccaccgtgatcatctgcgtgatggtgttctgcctgatcctgtggaagtggaagaagaagaagagacccagaaacagctacaagtgcggcaccaacaccatggagagagaggagagcgagcagaccaagaagagagagaagatccacatccccgagagaagcgacgaggcccagagagtgttcaagagcagcaagaccagcagctgcgacaagagcgacacctgcttctag

SEQ ID NO: 82750 - protein, 4695 aa, Artificial Sequence
  derived and/or modified sequence
GAEAPPSTEEAAPPRSEEEEAPRPPTVEAPAEDGFSPSAEDAVSSVVDYRDLIPSEEGIVLPDDHEADLNRVRQRLAPRPVQSVISEVLSLPSSRRSSRYRRSMSGLPNLQETLKERQARFREARESRRLKIDPSYKYIFEILAENLGLDIVTVEELILDCPSLEAFTNFFAKDGCKTLKFLYQEGDVPGIECGRTIAGATKGAKMMKLYIDNAAPDKLKGLCIFFVRCRNDVAINVKTIQEEALFTVLDASKGLLNGIRDMLANIFLPAVLATNNWGALNQSKQGESEKHIFTETINRYLSFLDGARISIEGTVKLKTIDNVNFSKLHTFEEVTAAASNSETVHQLEEVLMVWYKQIEQVLIESEQMRKEAGDSGPLTELEHWKRMSAKFNYIIEQIKGPSCKAVINVLNVAHSKLLKNWRDLDARITDTANESKDNVRYLYTLEKVCQPLYNHDLVSMAHGIQNLINAIRMIHGVSRYYNTSERMTSLFIKVTNQMVTACKAYITDGGLNHVWDQETPVVLKKIQDCIFLFKEYQASFHKTRKLISESSGEKSFEVSEMYIFGKFEAFCKRLEKITEMITVVQTYSTLSNSTIEGIDIMAIKFRNIYQGVKKKQYDILDPRRTEFDTDFLDFMTKINGLEVQIQAFMNSSFGKILSSQQALQLLQRFQKLNIPCLGLEINHTIERILQYYVAELDATKKLYHSQKDDPPLARNMPPIAGKILWVRQLYRRISEPINYFFKNSDILSSPDGKAVIRQYNKISYVLVEFEVVYHTAWIREISQLHYALQATLFVRHPETGKLLVNFDPKILEVVRETKCMIKMKLDVPEQAKRLLKLESKLKADKLYLQGLLQYYDELCQEVPSVFVNLMTPKMKKVESVLRQGLTVLTWSSLTLESFFQEVELVLDMFNQLLKKISDLCEMHIDTVLKEIAKTVLISLPESGATKVEDMLTLNETYTKEWADILNHKSKHVEEAVRELISIFEQIYEVKYTGKVGKQSEQRKHVVFGSETGEGENNDYEANIVNEFDTHDKEDEFKKECKEVFAFFSHQLLDSLQKATRLSLDTMKRRIFVASLYGRKQSEDIISFIKSEVHLAIPNVVMIPSLDDIQQAINRMIQLTLEVSRGVAHWGQQQIRPIKSVIPSPTTTDVTHQNTGKLLKKEERSFEEAIPARKLKNFYPGVAEHKDISKLVLLLSSSVNSLRKAAHEALQDFQKYKTLWTEDRDVKVKEFLANNPSLTEIRSEILHYATFEQEIDELKPIIVVGALELHTEPMKLALSIEAKAWKMLLCRYLNEEYKKKMSYMIAFINEYLKKLSRPIRDLDDVRFAMEALSCIRDNEIQMDMTLGPIEEAYAILNRFEVEVTKEESEAVDTLRYSFNKLQSKAVSVQEDLVQVQPKFKSNLLESVEVFREDVINFAEAYELEGPMVPNIPPQEASNRLQIFQASFDDLWRKFVTYSSGEQLFGLPVTDYEVLHKTRKELNLLQKLYGLYDTVMSSISGYYEILWGDVDIEKINAELLEFQNRCRKLPKGLKDWQAFLDLKKRIDDFSESCPLLEMMTNKAMKQRHWDRISELTGTPFDVESDSFCLRNIMEAPLLKHKDDIEDICISAIKEKDIEAKLTQVIENWTNQNLSFAAFKGKGELLLKGTESGEIITLMEDSLMVLGSLLSNRYNAPFKKNIQNWVYKLSTSSDIIEEWLVVQNLWVYLEAVFVGGDIAKQLPQEAKRFQNIDKSWIKIMQRAHENPNVINCCVGDETMGQLLPHLHEQLEVCQKSLTGYLEKKRLLFPRFFFVSDPVLLEILGQASDSHTIQPHLPAVSDNINEVTFHAKDYDRIMAVISREGEKIVLDNSVMAKGPVEIWLLDLLKMQMSSLHNIIRSAFYQISDSGFQLLPFLSHFPAQVGLLGIQMLWTHDSEEALRNAKDDRKIMQVTNQKFLDILNTLISQTTHDLSKFDRVKFETLITIHVHQRDIFDDLVKMHIKSPTDFEWLKQSRFYFKEDLDQTVVSITDVDFIYQNEFLGCTDRLVITPLTDRCYITLAQALGMNMGGAPAGPAGTGKTETTKDMGRCLGKYVVVFNCSDQMDFRGLGRIFKGLAQSGSWGCFDEFNRIELPVLSVAAQQIYIVLTARKERKKQFIFSDGDCVDLNPEFGIFLTMNPGYAGRQELPENLKIQFRTVAMMVPDRQIIMRVKLASCGFLENVILAQKFYVLYKLCEEQLTKQVHYDFGLRNILSVLRTLGSQKRARPEDSELSIVMRGLRDMNLSKLVDEDEPLFLSLINDLFPGLQLDSNTYAELQNAVAHQVQIEGLINHPPWNLKLVQLYETSLVRHGLMTLGPSGSGKTTVITILMKAQTECGRPHREMRMNPKAITAPQMFGRLDTATNDWTDGIFSTLWRKTLKAKKGENIFLILDGPVDAIWIENLNSVLDDNKTLTLANGDRIPMAPSCKLLFEVHNIENASPATVSRMGMVYISSSALSWRPILQAWLKKRTAQEAAVFLTLYEKVFEDTYTYMKLNLNPKMQLLECNYIVQSLNLLEGLIPSKEEGGVSCVEHLHKLFVFGLMWSLGALLELESREKLEAFLRQHESKLDLPEIPKGSNQTMYEFYVTDYGDWEHWNKKLQPYYYPTDSIPEYSSILVPNVDNIRTNFLIDTIAKQHKAVLLTGEQGTAKTVMVKAYLKKYDPEVQLSKSLNFSSATEPMMFQRTIESYVDKRIGSTYGPPGGRKMTVFIDDINMPVINEWGDQITNEIVRQMMEMEGMYSLDKPGDFTTIVDVQLIAAMIHPGGGRNDIPQRLKRQFTVFNCTLPSNASIDKIFGIIGCGYFDPCRSFKPQICEMIVNLVSVGRVLWQWTKVKMLPTPSKFHYIFNLRDLSRIWQGMLTIKAEECASIPTLLSLFKHECSRVIADRFITPEDEQWFNAHLTRAVEENIGSDAASCILPEPYFVDFLREMPEPTGDEPEDSVFEVPKIYELMPSFDFLAEKLQFYQRQFNEIIRGTSLDLVFFKDAMTHLIKISRIIRTSCGNALLVGVGGSGKQSLSRLASFIAGYQIFQITLTRSYNVTNLTDDLKALYKVAGADGKGITFIFTDSEIKDEAFLEYLNNLLSSGEISNLFARDEMDEITQGLISVMKRELPRHPPTFDNLYEYFISRSRKNLHVVLCFSPVGEKFRARSLKFPGLISGCTMDWFSRWPREALIAVASYFLSDYNIVCSSEIKRQVVETMGLFHDMVSESCESYFQRYRRRAHVTPKSYLSFINGYKNIYAEKVKFINEQAERMNIGLDKLMEASESVAKLSQDLAVKEKELAVASIKADEVLAEVTVSAQASAKIKNEVQEVKDKAQKIVDEIDSEKVKAESKLEAAKPALEEAEAALNTIKPNDIATVRKLAKPPHLIMRIMDCVLLLFQKKIDPVTMDPEKSCCKPSWGESLKLMSATGFLWSLQQFPKDTINEETVELLQPYFNMDDYTFESAKKVCGNVAGLLSWTLAMAIFYGINREVLPLKANLAKQEGRLAVANAELGKAQALLDEKQAELDKVQAKFDAAMNEKMDLLNDADTCRKKMQAASTLIDGLSGEKIRWTQQSKEFKAQINRLVGDILLCTGFLSYLGPFNQIFRNYLLKDQWEMELRARKIPFTENLNLISMLVDPPTIGEWGLQGLPGDDLSIQNGIIVTKATRYPLLIDPQTQGKTWIKSKEKENDLQVTSLNHKYFRTHLEDSLSLGRPLLIEDIHEELDPALDNVLEKNFIKSGTTFKVKVGDKECDIMDTFKLYITTKLPNPAFTPEINAKTSVIDFTVTMKGLENQLLRRVILTEKQELEAERVKLLEDVTFNKRKMKELEDNLLYKLSATKGSLVDDESLIGVLRTTKQTAAEVSEKLHVAAETEIKINAAQEEFRPAATRGSILYFLITEMSMVNIMYQTSLAQFLKLFDQSMARSEKSPLPQKRITNIIEYLTYEVFTYSVRGLYENHKFLFVLLMTLKIDLQRGTVKHREFQALIKGGAALDLKACPPKPYRWILDMTWLNLVELSKLPQFAEIMNQISRNEKGWKSWFDKDAPEEEIIPDGYNDSLDTCHKLLLIRSWCPDRTVFQARKYIADSLEEKYTEPVILNLEKTWEESDTRTPLICFLSMGSDPTNQIDALAKKLKLECRTISMGQGQEVHARKLIQMSMQQGGWVLLQNCHLGLEFMEELLETLITTEASDDSFRVWITTEPHDRFPITLLQTSLKFTNEPPQGVRAGLKRTFAGINQDLLDISNLPMWKPMLYTVAFLHSTVQERRKFGPLGWNIPYEFNSADFSASVQFIQNHLDECDIKKGVSWNTVRYMIGEVQYGGRVTDDFDKRLLNCFARVWFSEKMFEPSFCFYTGYKIPLCKTLDQYFEYIQSLPSLDNPEVFGLHPNADITYQSNTASAVLETITNIQPKESGGGVGETREAIVYRLSEDMLSKLPPDYIPHEVKSRLIKMGHLNSMNIFLRQEIDRMQRVISILRSSLSDLKLAIEGTIIMSENLRDALDNMYDARIPQLWKRVSWDSSTLGFWFTELLERNAQFSTWIFEGRPNVFWMTGFFNPQGFLTAMRQEVTRAHKGWALDTVTIHNEVLRQTKEEITSPPGEGVYIYGLYMDGAAWDRRNGKLMESTPKVLFTQLPVLHIFAINSTAPKDPKLYVCPIYKKPRRTDLTFITVVYLRTVLSPDHWILRGVALLCDIK

SEQ ID NO: 82751 - protein, 4490 aa, Artificial Sequence
  derived and/or modified sequence
MMKLYIDNAAPDKLKGLCIFFVRCRNDVAINVKTIQEEALFTVLDASKGLLNGIRDMLANIFLPAVLATNNWGALNQSKQGESEKHIFTETINRYLSFLDGARISIEGTVKLKTIDNVNFSKLHTFEEVTAAASNSETVHQLEEVLMVWYKQIEQVLIESEQMRKEAGDSGPLTELEHWKRMSAKFNYIIEQIKGPSCKAVINVLNVAHSKLLKNWRDLDARITDTANESKDNVRYLYTLEKVCQPLYNHDLVSMAHGIQNLINAIRMIHGVSRYYNTSERMTSLFIKVTNQMVTACKAYITDGGLNHVWDQETPVVLKKIQDCIFLFKEYQASFHKTRKLISESSGEKSFEVSEMYIFGKFEAFCKRLEKITEMITVVQTYSTLSNSTIEGIDIMAIKFRNIYQGVKKKQYDILDPRRTEFDTDFLDFMTKINGLEVQIQAFMNSSFGKILSSQQALQLLQRFQKLNIPCLGLEINHTIERILQYYVAELDATKKLYHSQKDDPPLARNMPPIAGKILWVRQLYRRISEPINYFFKNSDILSSPDGKAVIRQYNKISYVLVEFEVVYHTAWIREISQLHYALQATLFVRHPETGKLLVNFDPKILEVVRETKCMIKMKLDVPEQAKRLLKLESKLKADKLYLQGLLQYYDELCQEVPSVFVNLMTPKMKKVESVLRQGLTVLTWSSLTLESFFQEVELVLDMFNQLLKKISDLCEMHIDTVLKEIAKTVLISLPESGATKVEDMLTLNETYTKEWADILNHKSKHVEEAVRELISIFEQIYEVKYTGKVGKQSEQRKHVVFGSETGEGENNDYEANIVNEFDTHDKEDEFKKECKEVFAFFSHQLLDSLQKATRLSLDTMKRRIFVASLYGRKQSEDIISFIKSEVHLAIPNVVMIPSLDDIQQAINRMIQLTLEVSRGVAHWGQQQIRPIKSVIPSPTTTDVTHQNTGKLLKKEERSFEEAIPARKLKNFYPGVAEHKDISKLVLLLSSSVNSLRKAAHEALQDFQKYKTLWTEDRDVKVKEFLANNPSLTEIRSEILHYATFEQEIDELKPIIVVGALELHTEPMKLALSIEAKAWKMLLCRYLNEEYKKKMSYMIAFINEYLKKLSRPIRDLDDVRFAMEALSCIRDNEIQMDMTLGPIEEAYAILNRFEVEVTKEESEAVDTLRYSFNKLQSKAVSVQEDLVQVQPKFKSNLLESVEVFREDVINFAEAYELEGPMVPNIPPQEASNRLQIFQASFDDLWRKFVTYSSGEQLFGLPVTDYEVLHKTRKELNLLQKLYGLYDTVMSSISGYYEILWGDVDIEKINAELLEFQNRCRKLPKGLKDWQAFLDLKKRIDDFSESCPLLEMMTNKAMKQRHWDRISELTGTPFDVESDSFCLRNIMEAPLLKHKDDIEDICISAIKEKDIEAKLTQVIENWTNQNLSFAAFKGKGELLLKGTESGEIITLMEDSLMVLGSLLSNRYNAPFKKNIQNWVYKLSTSSDIIEEWLVVQNLWVYLEAVFVGGDIAKQLPQEAKRFQNIDKSWIKIMQRAHENPNVINCCVGDETMGQLLPHLHEQLEVCQKSLTGYLEKKRLLFPRFFFVSDPVLLEILGQASDSHTIQPHLPAVSDNINEVTFHAKDYDRIMAVISREGEKIVLDNSVMAKGPVEIWLLDLLKMQMSSLHNIIRSAFYQISDSGFQLLPFLSHFPAQVGLLGIQMLWTHDSEEALRNAKDDRKIMQVTNQKFLDILNTLISQTTHDLSKFDRVKFETLITIHVHQRDIFDDLVKMHIKSPTDFEWLKQSRFYFKEDLDQTVVSITDVDFIYQNEFLGCTDRLVITPLTDRCYITLAQALGMNMGGAPAGPAGTGKTETTKDMGRCLGKYVVVFNCSDQMDFRGLGRIFKGLAQSGSWGCFDEFNRIELPVLSVAAQQIYIVLTARKERKKQFIFSDGDCVDLNPEFGIFLTMNPGYAGRQELPENLKIQFRTVAMMVPDRQIIMRVKLASCGFLENVILAQKFYVLYKLCEEQLTKQVHYDFGLRNILSVLRTLGSQKRARPEDSELSIVMRGLRDMNLSKLVDEDEPLFLSLINDLFPGLQLDSNTYAELQNAVAHQVQIEGLINHPPWNLKLVQLYETSLVRHGLMTLGPSGSGKTTVITILMKAQTECGRPHREMRMNPKAITAPQMFGRLDTATNDWTDGIFSTLWRKTLKAKKGENIFLILDGPVDAIWIENLNSVLDDNKTLTLANGDRIPMAPSCKLLFEVHNIENASPATVSRMGMVYISSSALSWRPILQAWLKKRTAQEAAVFLTLYEKVFEDTYTYMKLNLNPKMQLLECNYIVQSLNLLEGLIPSKEEGGVSCVEHLHKLFVFGLMWSLGALLELESREKLEAFLRQHESKLDLPEIPKGSNQTMYEFYVTDYGDWEHWNKKLQPYYYPTDSIPEYSSILVPNVDNIRTNFLIDTIAKQHKAVLLTGEQGTAKTVMVKAYLKKYDPEVQLSKSLNFSSATEPMMFQRTIESYVDKRIGSTYGPPGGRKMTVFIDDINMPVINEWGDQITNEIVRQMMEMEGMYSLDKPGDFTTIVDVQLIAAMIHPGGGRNDIPQRLKRQFTVFNCTLPSNASIDKIFGIIGCGYFDPCRSFKPQICEMIVNLVSVGRVLWQWTKVKMLPTPSKFHYIFNLRDLSRIWQGMLTIKAEECASIPTLLSLFKHECSRVIADRFITPEDEQWFNAHLTRAVEENIGSDAASCILPEPYFVDFLREMPEPTGDEPEDSVFEVPKIYELMPSFDFLAEKLQFYQRQFNEIIRGTSLDLVFFKDAMTHLIKISRIIRTSCGNALLVGVGGSGKQSLSRLASFIAGYQIFQITLTRSYNVTNLTDDLKALYKVAGADGKGITFIFTDSEIKDEAFLEYLNNLLSSGEISNLFARDEMDEITQGLISVMKRELPRHPPTFDNLYEYFISRSRKNLHVVLCFSPVGEKFRARSLKFPGLISGCTMDWFSRWPREALIAVASYFLSDYNIVCSSEIKRQVVETMGLFHDMVSESCESYFQRYRRRAHVTPKSYLSFINGYKNIYAEKVKFINEQAERMNIGLDKLMEASESVAKLSQDLAVKEKELAVASIKADEVLAEVTVSAQASAKIKNEVQEVKDKAQKIVDEIDSEKVKAESKLEAAKPALEEAEAALNTIKPNDIATVRKLAKPPHLIMRIMDCVLLLFQKKIDPVTMDPEKSCCKPSWGESLKLMSATGFLWSLQQFPKDTINEETVELLQPYFNMDDYTFESAKKVCGNVAGLLSWTLAMAIFYGINREVLPLKANLAKQEGRLAVANAELGKAQALLDEKQAELDKVQAKFDAAMNEKMDLLNDADTCRKKMQAASTLIDGLSGEKIRWTQQSKEFKAQINRLVGDILLCTGFLSYLGPFNQIFRNYLLKDQWEMELRARKIPFTENLNLISMLVDPPTIGEWGLQGLPGDDLSIQNGIIVTKATRYPLLIDPQTQGKTWIKSKEKENDLQVTSLNHKYFRTHLEDSLSLGRPLLIEDIHEELDPALDNVLEKNFIKSGTTFKVKVGDKECDIMDTFKLYITTKLPNPAFTPEINAKTSVIDFTVTMKGLENQLLRRVILTEKQELEAERVKLLEDVTFNKRKMKELEDNLLYKLSATKGSLVDDESLIGVLRTTKQTAAEVSEKLHVAAETEIKINAAQEEFRPAATRGSILYFLITEMSMVNIMYQTSLAQFLKLFDQSMARSEKSPLPQKRITNIIEYLTYEVFTYSVRGLYENHKFLFVLLMTLKIDLQRGTVKHREFQALIKGGAALDLKACPPKPYRWILDMTWLNLVELSKLPQFAEIMNQISRNEKGWKSWFDKDAPEEEIIPDGYNDSLDTCHKLLLIRSWCPDRTVFQARKYIADSLEEKYTEPVILNLEKTWEESDTRTPLICFLSMGSDPTNQIDALAKKLKLECRTISMGQGQEVHARKLIQMSMQQGGWVLLQNCHLGLEFMEELLETLITTEASDDSFRVWITTEPHDRFPITLLQTSLKFTNEPPQGVRAGLKRTFAGINQDLLDISNLPMWKPMLYTVAFLHSTVQERRKFGPLGWNIPYEFNSADFSASVQFIQNHLDECDIKKGVSWNTVRYMIGEVQYGGRVTDDFDKRLLNCFARVWFSEKMFEPSFCFYTGYKIPLCKTLDQYFEYIQSLPSLDNPEVFGLHPNADITYQSNTASAVLETITNIQPKESGGGVGETREAIVYRLSEDMLSKLPPDYIPHEVKSRLIKMGHLNSMNIFLRQEIDRMQRVISILRSSLSDLKLAIEGTIIMSENLRDALDNMYDARIPQLWKRVSWDSSTLGFWFTELLERNAQFSTWIFEGRPNVFWMTGFFNPQGFLTAMRQEVTRAHKGWALDTVTIHNEVLRQTKEEITSPPGEGVYIYGLYMDGAAWDRRNGKLMESTPKVLFTQLPVLHIFAINSTAPKDPKLYVCPIYKKPRRTDLTFITVVYLRTVLSPDHWILRGVALLCDIK

SEQ ID NO: 82752 - protein, 4188 aa, Artificial Sequence
  derived and/or modified sequence
MEKDAEDGAPSEGAEAPPSTEEAAPPRSEEEEAPRPPTVEAPAEDGFSPSAEDAVSSVVDYRDLIPSEEGIVLPDDHEADLNRVRQRLAPRPVQSVISEVLSLPSSRRSSRYRRSMSGLPNLQETLKERQARFREARESRRLKIDPSYKYIFEILAENLGLDIVTVEELILDCPSLEAFTNFFAKDGCKTLKFLYQEGDVPGIECGRTIAGATKGAKMMKLYIDNAAPDKLKGLCIFFVRCRNDVAINVKTIQEEALFTVLDASKGLLNGIRDMLANIFLPAVLATNNWGALNQSKQGESEKHIFTETINRYLSFLDGARISIEGTVKLKTIDNVNFSKLHTFEEVTAAASNSETVHQLEEVLMVWYKQIEQVLIESEQMRKEAGDSGPLTELEHWKRMSAKFNYIIEQIKGPSCKAVINVLNVAHSKLLKNWRDLDARITDTANESKDNVRYLYTLEKVCQPLYNHDLVSMAHGIQNLINAIRMIHGVSRYYNTSERMTSLFIKVTNQMVTACKAYITDGGLNHVWDQETPVVLKKIQDCIFLFKEYQASFHKTRKLISESSGEKSFEVSEMYIFGKFEAFCKRLEKITEMITVVQTYSTLSNSTIEGIDIMAIKFRNIYQGVKKKQYDILDPRRTEFDTDFLDFMTKINGLEVQIQAFMNSSFGKILSSQQALQLLQRFQKLNIPCLGLEINHTIERILQYYVAELDATKKLYHSQKDDPPLARNMPPIAGKILWVRQLYRRISEPINYFFKNSDILSSPDGKAVIRQYNKISYVLVEFEVVYHTAWIREISQLHYALQATLFVRHPETGKLLVNFDPKILEVVRETKCMIKMKLDVPEQAKRLLKLESKLKADKLYLQGLLQYYDELCQEVPSVFVNLMTPKMKKVESVLRQGLTVLTWSSLTLESFFQEVELVLDMFNQLLKKISDLCEMHIDTVLKEIAKTVLISLPESGATKVEDMLTLNETYTKEWADILNHKSKHVEEAVRELISIFEQIYEVKYTGKVGKQSEQRKHVVFGSETGEGENNDYEANIVNEFDTHDKEDEFKKECKEVFAFFSHQLLDSLQKATRLSLDTMKRRIFVASLYGRKQSEDIISFIKSEVHLAIPNVVMIPSLDDIQQAINRMIQLTLEVSRGVAHWGQQQIRPIKSVIPSPTTTDVTHQNTGKLLKKEERSFEEAIPARKLKNFYPGVAEHKDISKLVLLLSSSVNSLRKAAHEALQDFQKYKTLWTEDRDVKVKEFLANNPSLTEIRSEILHYATFEQEIDELKPIIVVGALELHTEPMKLALSIEAKAWKMLLCRYLNEEYKKKMSYMIAFINEYLKKLSRPIRDLDDVRFAMEALSCIRDNEIQMDMTLGPIEEAYAILNRFEVEVTKEESEAVDTLRYSFNKLQSKAVSVQEDLVQVQPKFKSNLLESVEVFREDVINFAEAYELEGPMVPNIPPQEASNRLQIFQASFDDLWRKFVTYSSGEQLFGLPVTDYEVLHKTRKELNLLQKLYGLYDTVMSSISGYYEILWGDVDIEKINAELLEFQNRCRKLPKGLKDWQAFLDLKKRIDDFSESCPLLEMMTNKAMKQRHWDRISELTGTPFDVESDSFCLRNIMEAPLLKHKDDIEDICISAIKEKDIEAKLTQVIENWTNQNLSFAAFKGKGELLLKGTESGEIITLMEDSLMVLGSLLSNRYNAPFKKNIQNWVYKLSTSSDIIEEWLVVQNLWVYLEAVFVGGDIAKQLPQEAKRFQNIDKSWIKIMQRAHENPNVINCCVGDETMGQLLPHLHEQLEVCQKSLTGYLEKKRLLFPRFFFVSDPVLLEILGQASDSHTIQPHLPAVSDNINEVTFHAKDYDRIMAVISREGEKIVLDNSVMAKGPVEIWLLDLLKMQMSSLHNIIRSAFYQISDSGFQLLPFLSHFPAQVGLLGIQMLWTHDSEEALRNAKDDRKIMQVTNQKFLDILNTLISQTTHDLSKFDRVKFETLITIHVHQRDIFDDLVKMHIKSPTDFEWLKQSRFYFKEDLDQTVVSITDVDFIYQNEFLGCTDRLVITPLTDRCYITLAQALGMNMGGAPAGPAGTGKTETTKDMGRCLGKYVVVFNCSDQMDFRGLGRIFKGLAQSGSWGCFDEFNRIELPVLSVAAQQIYIVLTARKERKKQFIFSDGDCVDLNPEFGIFLTMNPGYAGRQELPENLKIQFRTVAMMVPDRQIIMRVKLASCGFLENVILAQKFYVLYKLCEEQLTKQVHYDFGLRNILSVLRTLGSQKRARPEDSELSIVMRGLRDMNLSKLVDEDEPLFLSLINDLFPGLQLDSNTYAELQNAVAHQVQIEGLINHPPWNLKLVQLYETSLVRHGLMTLGPSGSGKTTVITILMKAQTECGRPHREMRMNPKAITAPQMFGRLDTATNDWTDGIFSTLWRKTLKAKKGENIFLILDGPVDAIWIENLNSVLDDNKTLTLANGDRIPMAPSCKLLFEVHNIENASPATVSRMGMVYISSSALSWRPILQAWLKKRTAQEAAVFLTLYEKVFEDTYTYMKLNLNPKMQLLECNYIVQSLNLLEGLIPSKEEGGVSCVEHLHKLFVFGLMWSLGALLELESREKLEAFLRQHESKLDLPEIPKGSNQTMYEFYVTDYGDWEHWNKKLQPYYYPTDSIPEYSSILVPNVDNIRTNFLIDTIAKQHKAVLLTGEQGTAKTVMVKAYLKKYDPEVQLSKSLNFSSATEPMMFQRTIESYVDKRIGSTYGPPGGRKMTVFIDDINMPVINEWGDQITNEIVRQMMEMEGMYSLDKPGDFTTIVDVQLIAAMIHPGGGRNDIPQRLKRQFTVFNCTLPSNASIDKIFGIIGCGYFDPCRSFKPQICEMIVNLVSVGRVLWQWTKVKMLPTPSKFHYIFNLRDLSRIWQGMLTIKAEECASIPTLLSLFKHECSRVIADRFITPEDEQWFNAHLTRAVEENIGSDAASCILPEPYFVDFLREMPEPTGDEPEDSVFEVPKIYELMPSFDFLAEKLQFYQRQFNEIIRGTSLDLVFFKDAMTHLIKISRIIRTSCGNALLVGVGGSGKQSLSRLASFIAGYQIFQITLTRSYNVTNLTDDLKALYKVAGADGKGITFIFTDSEIKDEAFLEYLNNLLSSGEISNLFARDEMDEITQGLISVMKRELPRHPPTFDNLYEYFISRSRKNLHVVLCFSPVGEKFRARSLKFPGLISGCTMDWFSRWPREALIAVASYFLSDYNIVCSSEIKRQVVETMGLFHDMVSESCESYFQRYRRRAHVTPKSYLSFINGYKNIYAEKVKFINEQAERMNIGLDKLMEASESVAKLSQDLAVKEKELAVASIKADEVLAEVTVSAQASAKIKNEVQEVKDKAQKIVDEIDSEKVKAESKLEAAKPALEEAEAALNTIKPNDIATVRKLAKPPHLIMRIMDCVLLLFQKKIDPVTMDPEKSCCKPSWGESLKLMSATGFLWSLQQFPKDTINEETVELLQPYFNMDDYTFESAKKVCGNVAGLLSWTLAMAIFYGINREVLPLKANLAKQEGRLAVANAELGKAQALLDEKQAELDKVQAKFDAAMNEKMDLLNDADTCRKKMQAASTLIDGLSGEKIRWTQQSKEFKAQINRLVGDILLCTGFLSYLGPFNQIFRNYLLKDQWEMELRARKIPFTENLNLISMLVDPPTIGEWGLQGLPGDDLSIQNGIIVTKATRYPLLIDPQTQGKTWIKSKEKENDLQVTSLNHKYFRTHLEDSLSLGRPLLIEDIHEELDPALDNVLEKNFIKSGTTFKVKVGDKECDIMDTFKLYITTKLPNPAFTPEINAKTSVIDFTVTMKGLENQLLRRVILTEKQELEAERVKLLEDVTFNKRKMKELEDNLLYKLSATKGSLVDDESLIGVLRTTKQTAAEVSEKLHVAAETEIKINAAQEEFRPAATRGSILYFLITEMSMVNIMYQTSLAQFLKLFDQSMARSEKSPLPQKRITNIIEYLTYEVFTYSVRGLYENHKFLFVLLMTLKIDLQRGTVKHREFQALIKGGAALDLKACPPKPYRWILDMTWLNLVELSKLPQFAEIMNQISRNEKGWKSWFDKDAPEEEIIPDGYNDSLDTCHKLLLIRSWCPDRTVFQARKYIADSLEEKYTEPVILNLEKTWEESDTRTPLICFLSMGSDPTNQIDALAKKLKLECRTISMGQGQEVHARKLIQMSMQQVCDKRLLLLQHYC
